United States Patent Application Publication US 2021/0260178 A1 - sequence listing, part 21

SEQ ID NO: 34612 - RNA, 1686 nt, Artificial Sequence
  mRNA product Design i-3 (hSL-A100) comprising derived and/or modified sequence from LASV(LASV035-NIG-2009;Clade II)__AIT17588__GPCmut8 (opt1)
aggagaaagcuuaccaugggccagaucaucaccuucuuccaggaggugccccacgucaucgaggaggugaugaacaucgugcugaucgcccucagccugcuggccauccucaaggggaucuacaacgucgcgaccugcggccuguucgggcugguguccuuccuccugcugugcggccgcagcugcuccacgaccuacaaggggguguacgagcuccagacccuggagcuggacauggccagccucaacaugugcaugccgcuguccugcaccaagaacaacagccaccacuacaucauggucggcaacgagacgggccuggagcucacccugaccaacaccuccaucaucaaccacaaguucugcaaccugagcgacgcccacaagaagaaccucuacgaccacgcccugauguccaucaucagcacguuccaccuguccauccccaacuucaaccaguacgaggccaugagcugcgacuucaacgggggcaagaucuccgugcaguacaaccucagccacgcguacgccguggacgccgccaaccacugcgggaccaucgcgaacggcguccugcagaccuucaugcggauggccuggggcggguccuacaucgcccuggacagcggcaagggguccugggacugcaucaugaccagcuaccaguaccucaucauccagaacacgaccugggaggaccacugccaguucucccgccccagccccaucggcuaccuggggcugcucagccagcggacccgcgacaucuacaucucccggcgccugcugggcaccuucacguggacccucagcgacuccgagggcaacgagacccccgggggcuacugccugacccgguggaugcugaucgaggccgagcucaagugcuucgggaacacggccguggcgaagugcaacgagaagcacgacgaggaguucugcgacaugcugcgccuguucgacuucugcaagcaggccauccggcgccucaaggccccggcccagaugagcauccagcugaucaacaaggccgugaacgcgcugaucaacgaccagcucaucaugaagaaccaccuccgggacaucaugggcauccccuacugcaacuacuccaaguacugcuaccugaaccacaccgucaccgggaagaccagccugccccgcugcugccugguguccaacggcagcuaccugaacgagacgcacuucuccgacgacaucgagcagcaggccgacaacaugaucaccgagcuccugcagaaggaguacaucgaccggcagggcaagaccccgcuggggcugguggaccucuucgucuucagcaccuccuucuaccugaucagcaucuuccugcaccucgugaagauccccacgcaccgccacgugaucggcaagcccugccccaagccgcaccggcugaaccacauggggaucugcuccugcggccuguacaagcaccccgggguccccgugaaguggaagcgcugaggacuaguuauaagacugacuagcccgaugggccucccaacgggcccuccuccccuccuugcaccgagauuaaucaaaggcucuuuucagagccaccaaaaaaaaaaaaaaaaaaaaaaaaaaaaaaaaaaaaaaaaaaaaaaaaaaaaaaaaaaaaaaaaaaaaaaaaaaaaaaaaaaaaaaaaaaaaaaaaaaaaa

SEQ ID NO: 34613 - RNA, 1686 nt, Artificial Sequence
  mRNA product Design i-3 (hSL-A100) comprising derived and/or modified sequence from LASV(LASV1000-NIG-2009;Clade II)__AIT17782__GPCmut8 (opt1)
aggagaaagcuuaccaugggccagaucaucaccuucuuccaggaggugccccacgucaucgaggaggugaugaacaucgugcugaucgcccucagccugcuggccauccucaaggggaucuacaacgucgcgaccugcggccuguucgggcugguguccuuccuccugcugugcggccgcagcugcuccacgaccuacaaggggguguacgagcuccagacccuggagcuggacauggccagccucaacaugugcaugccgcuguccugcaccaagaacaacagccaccacuacaucauggucggcaacgagacgggccuggagcucacccugaccaacaccuccaucaucaaccacaaguucugcaaccugagcgacgcccacaagaagaaccucuacgaccacgcccugauguccaucaucagcacguuccaccuguccauccccaacuucaaccaguacgaggccaugagcugcgacuucaacgggggcaagaucuccgugcaguacaaccucagccacaccuacgcgguggacgccgccaaccacugcgggaccaucgccaacggcguccugcagaccuucaugcggauggcguggggcggguccuacaucgcccuggacagcggcaagggguccugggacugcaucaugacgagcuaccaguaccucaucauccagaacaccaccugggaggaccacugccaguucucccgccccagccccaucggcuaccuggggcugcucagccagcggacccgcgacaucuacaucucccggcgccugcugggcacguucaccuggacccucagcgacuccgagggcaacgagacccccgggggcuacugccugacgcgguggaugcugaucgaggccgagcucaagugcuucgggaacaccgccguggccaagugcaacgagaagcacgacgaggaguucugcgacaugcugcgccuguucgacuucugcaagcaggcgaucaagcggcucaagaccccggcccagaugagcauccagcugaucaacaaggccgugaacgcccugaucaacgaccagcucaucaugaagaaccaccuccgcgacaucaugggcauccccuacugcaacuacuccaaguacugcuaccugaaccacaccgucacggggaagaccagccugccccggugcugccugguguccaacggcagcuaccugaacgagacccacuucuccgacgacaucgagcagcaggccgacaacaugaucaccgagcuccugcagaaggaguacaucgaccgccagggcaagacgccgcuggggcugguggaccucuucgucuucagcaccuccuucuaccugaucagcaucuuccugcaccucgugaagauccccacccaccggcacguggucggcaagcccugccccaagccgcaccgccugaaccacauggggaucugcuccugcggccuguacaagcaccccggggugcccgugaaguggaagcggugaggacuaguuauaagacugacuagcccgaugggccucccaacgggcccuccuccccuccuugcaccgagauuaaucaaaggcucuuuucagagccaccaaaaaaaaaaaaaaaaaaaaaaaaaaaaaaaaaaaaaaaaaaaaaaaaaaaaaaaaaaaaaaaaaaaaaaaaaaaaaaaaaaaaaaaaaaaaaaaaaaaaa

SEQ ID NO: 34614 - RNA, 1686 nt, Artificial Sequence
  mRNA product Design i-3 (hSL-A100) comprising derived and/or modified sequence from LASV(LASV221-NIG-2010;Clade II)__AIT17624__GPCmut8 (opt1)
aggagaaagcuuaccaugggccagaucaucaccuucuuccaggaggugccccacgucaucgaggaggugaugaacaucgugcugaucgcccucagccugcuggccauccucaaggggaucuacaacgucgcgaccugcggccuguucgggcugguguccuuccuccugcugugcggccgcagcugcuccacgaccuacaaggggguguacgagcuccagacccuggagcuggacauggccagccucaacaugugcaugccgcuguccugcaccaagaacaacagccaccacuacaucauggucggcaacgagacgggccuggagcucacccugaccaacaccuccaucaucaaccacaaguucugcaaccugagcgacgcccacaagaagaaccucuacgaccacgcccugauguccaucaucagcacguuccaccuguccauccccaacuucaaccaguacgaggccaugagcugcgacuucaacgggggcaagaucuccgugcaguacaaccucagccacaccuacgcgaucgacgccgccaaccacugcgggaccaucgccaacggcgugcugcagaccuucaugcggauggcguggggcggguccuacaucgcccuggacagcggcaagggguccugggacugcaucaugacgagcuaccaguaccucaucauccagaacaccaccugggaggaccacugccaguucucccgccccagccccaucggcuaccuggggcugcucagccagcggacccgcgacaucuacaucucccggcgccugcugggcacguucaccuggacccucagcgacuccgagggcaacgagacccccgggggcuacugccugacgcgguggaugcugaucgaggccgagcucaagugcuucgggaacaccgccgucgccaagugcaacgagaagcacgacgaggaguucugcgacaugcugcgccuguucgacuucugcaagcaggcgauccggcgccucaagaccccggcccagaugagcauccagcugaucaacaaggccgugaacgcccugaucaacgaccagcucaucaugaagaaccaccuccgggacaucaugggcauccccuacugcaacuacuccaaguacugcuaccugaaccacaccgugacggggaagaccagccugccccgcugcugccuggucuccaacggcagcuaccugaacgagacccacuucuccgacgacaucgagcagcaggccgacaacaugaucaccgagaugcuccagaaggaguacauggaccggcagggcaagacgccgcuggggcugguggaccuguucguguucagcaccuccuucuaccucaucagcaucuuccugcaccuggucaagauccccacccaccgccacgugaucggcaagcccugccccaagccgcaccggcucaaccacauggggaucugcuccugcggccuguacaagcaccccggggugcccgucaaguggaagcgcugaggacuaguuauaagacugacuagcccgaugggccucccaacgggcccuccuccccuccuugcaccgagauuaaucaaaggcucuuuucagagccaccaaaaaaaaaaaaaaaaaaaaaaaaaaaaaaaaaaaaaaaaaaaaaaaaaaaaaaaaaaaaaaaaaaaaaaaaaaaaaaaaaaaaaaaaaaaaaaaaaaaaa

SEQ ID NO: 34615 - RNA, 1686 nt, Artificial Sequence
  mRNA product Design i-3 (hSL-A100) comprising derived and/or modified sequence from LASV(LASV237-NIG-2010;Clade II)__AIT17638__GPCmut8 (opt1)
aggagaaagcuuaccaugggccagaucaucaccuucuuccaggaggugccccacgucaucgaggaggugaugaacaucgugcugaucgcccucagccugcuggccauccucaaggggaucuacaacgucgcgaccugcggccuguucgggcugguguccuuccuccugcugugcggccgcagcugcuccacgaccuacaaggggguguacgagcuccagacccuggagcuggacauggccagccucaacaugugcaugccgcuguccugcaccaagaacaacagccaccacuacaucauggucggcaacgagacgggccuggagcucacccugaccaacaccuccaucaucaaccacaaguucugcaaccugagcgacgcccacaagaaggaccucuacgaccacgcccugauguccaucaucagcacguuccaccuguccauccccaacuucaaccaguacgaggccaugagcugcgacuucaacgggggcaagaucuccgugcaguacaaccucagccacaccuacgcgguggacgccgccaaccacugcgggaccaucgccaacggcguccugcagaccuucaugcggauggcguggggcggguccuacaucgcccuggacagcggcaagggguccugggacugcaucaugacgagcuaccaguaccucaucauccagaacaccaccugggaggaccacugccaguucucccgccccagccccaucggcuaccuggggcugcucagccagcggacccgcgacaucuacaucucccggcgccugcugggcacguucaccuggacccucagcgacuccgagggcaacgagacccccgggggcuacugccugacgcgguggaugcugaucgaggccgagcucaagugcuucgggaacaccgccguggccaagugcaacgagaagcacgacgaggaguucugcgacaugcugcgccuguucgacuucugcaagcaggcgauccggcgccucaagaccccggcccagaugagcauccagcugaucaacaaggccgugaacgcccugaucaacgaccagcucaucaugaagaaccaccuccgggacaucaugggcauccccuacugcaacuacuccaaguacugcuaccugaaccacaccgucacggggaagaccagccugccccgcugcugccugguguccaacggcagcuaccugaacgagacccacuucuccgacgacaucgagcagcaggccgacaacaugaucaccgagcuccugcagaaggaguacauggaccggcagggcaagacgccgcuggggcugguggaccucuucgucuucagcaccuccuucuaccugaucagcaucuuccugcaccucaucaagauccccacccaccgccacaucaccggcaagcccugccccaagccgcaccggcugaaccacauggggaucugcuccugcggccuguacaagcaccccggggugcccgugaaguggaagcgcugaggacuaguuauaagacugacuagcccgaugggccucccaacgggcccuccuccccuccuugcaccgagauuaaucaaaggcucuuuucagagccaccaaaaaaaaaaaaaaaaaaaaaaaaaaaaaaaaaaaaaaaaaaaaaaaaaaaaaaaaaaaaaaaaaaaaaaaaaaaaaaaaaaaaaaaaaaaaaaaaaaaaa

SEQ ID NO: 34616 - RNA, 1686 nt, Artificial Sequence
  mRNA product Design i-3 (hSL-A100) comprising derived and/or modified sequence from LASV(LASV253-NIG-2011;Clade II)__AIT17670__GPCmut8 (opt1)
aggagaaagcuuaccaugggccagaucaucaccuucuuccaggaggugccccacgucaucgaggaggugaugaacaucgugcugaucgcccucagccugcuggccauccucaaggggaucuacaacgucgcgaccugcggccuguucgggcugguguccuuccuccugcugugcggccgcagcugcuccacgaccuacaaggggguguacgagcuccagacccuggagcuggacauggccagccucaacaugugcaugccgcuguccugcaccaagaacaacagccaccacuacaucauggucggcaacgagacgggccuggagcucacccugaccaacaccuccaucaucaaccacaaguucugcaaccugagcgacgcccacaagaagaaccucuacgaccacgcccugauguccaucaucagcacguuccaccuguccauccccaacuucaaccaguacgaggccaugagcugcgacuucaacgggggcaagaucuccgugcaguacaaccucagccacaccuacgcgguggacgccgccaaccacugcgggaccaucgccaacggcguccugcagaccuucaugcggauggcguggggcggguccuacaucgcccuggacagcggcaagggguccugggacugcaucaugacgagcuaccaguaccucaucauccagaacaccaccugggaggaccacugccaguucucccgccccagccccaucggcuaccuggggcugcucagccagcggacccgcgacaucuacaucucccggcgccugcugggcacguucaccuggacccucagcgacuccgagggcaacgagacccccgggggcuacugccugacgcgguggaugcugaucgaggccgagcucaagugcuucgggaacaccgccguggccaagugcaacgagaagcacgacgaggaguucugcgacaugcugcgccuguucgacuucugcaagcaggcgauccggcgccucaaggccccggcccagaugagcauccagcugaucaacaaggccgugaacgcccugaucaacgaccagcucaucaugaagaaccaccuccgggacaucaugggcauccccuacugcaacuacuccaaguacugcuaccugaaccacaccgucaccgggcgcacgagccugccccggugcugccugguguccaacggcagcuaccugaacgagacccacuucuccgacgacaucgagcagcaggcggacaacaugaucaccgagcuccugcagaaggaguacaucgaccgccagggcaagaccccgcuggggcugguggaccucuucgucuucagcacguccuucuaccugaucagcaucuuccugcaccucgugaagauccccacccaccggcacaucaucggcaagcccugccccaagccgcaccgccugaaccacauggggaucugcuccugcggccuguacaagcaccccggggugcccgucaaguggaagcggugaggacuaguuauaagacugacuagcccgaugggccucccaacgggcccuccuccccuccuugcaccgagauuaaucaaaggcucuuuucagagccaccaaaaaaaaaaaaaaaaaaaaaaaaaaaaaaaaaaaaaaaaaaaaaaaaaaaaaaaaaaaaaaaaaaaaaaaaaaaaaaaaaaaaaaaaaaaaaaaaaaaaa

SEQ ID NO: 34617 - RNA, 1686 nt, Artificial Sequence
  mRNA product Design i-3 (hSL-A100) comprising derived and/or modified sequence from LASV(LASV254-NIG-2011;Clade II)__AIT17674__GPCmut8 (opt1)
aggagaaagcuuaccaugggccagaucaucaccuucuuccaggaggugccccacgucaucgaggaggugaugaacaucgugcugaucgcccucagccugcuggccauccucaaggggaucuacaacgucgcgaccugcggccuguucgggcugguguccuuccuccugcugugcggccgcagcugcuccacgaccuacaaggggguguacgagcuccagacccuggagcuggacaugaccaaccucaacaugugcaugccgcugagcugcacgaagaacaacucccaccacuacaucauggucggcaacgagaccggccuggagcucacccugaccaacacgagcaucaucaaccacaaguucugcaaccuguccgacgcccacaagaagaaccucuacaaccacgcccugaugagcaucaucuccaccuuccaccugagcauccccaacuucaaccaguacgaggccauguccugcgacuucaacgggggcaagaucagcgugcaguacaaccucucccacagcuacgccguggacgcggccaaccacugcgggaccaucgccaacggcguccugcagaccuucaugcggauggccuggggcggguccuacaucgcgcuggacagcggcaaggggaacugggacugcaucaugacguccuaccaguaccucaucauccagaacaccaccugggaggaccacugccaguucagccgccccucccccaucggcuaccuggggcugcucagccagcggacccgcgacaucuacaucagccggcgccugcugggcacguucaccuggacccucuccgacagcgagggcaacgagacccccgggggcuacugccugacgcgguggaugcugaucgaggccgagcucaagugcuucgggaacaccgccguggccaagugcaacgagaagcacgacgaggaguucugcgacaugcugcgccuguucgacuucugcaagcaggccauccggcgccucaagaccccggcgcaggccaacauccagcugaucaacaaggccgugaacgcccugaucaacgaccagcucaucaugaagaaccaccuccgggacaucaugggcauccccuacugcaacuacuccaaguacugcuaccugaaccacaccgucacggggaagaccagccugccccgcugcugccugguguccaacggcagcuaccugaacgagacccacuucuccgacgacaucgagcagcaggccgacaacaugaucaccgagcuccugcagaaggaguacauggaccggcagggcaagacgccgcuggggcugguggaccucuucgucuucagcaccuccuucuaccugaucagcaucuuccugcaccucgugaagauccccacccaccgccacgugaucggcaagcccugccccaagccgcaccggcugaaccacauggggaucugcuccugcggccuguacaagcaccccgggguccccgugaaguggaagcgcugaggacuaguuauaagacugacuagcccgaugggccucccaacgggcccuccuccccuccuugcaccgagauuaaucaaaggcucuuuucagagccaccaaaaaaaaaaaaaaaaaaaaaaaaaaaaaaaaaaaaaaaaaaaaaaaaaaaaaaaaaaaaaaaaaaaaaaaaaaaaaaaaaaaaaaaaaaaaaaaaaaaaa

SEQ ID NO: 34618 - RNA, 1686 nt, Artificial Sequence
  mRNA product Design i-3 (hSL-A100) comprising derived and/or modified sequence from LASV(Nig08-A19;Clade III)__ADU56618__GPCmut8 (opt1)
aggagaaagcuuaccaugggccagaucgugaccuucuuccaggaggucccccacgugaucgaggaggugaugaacaucguccugaucgcccucagcauccuggccauccugaaggggcucuacaacaucgcgaccugcggccugaucgggcuggugacguuccuccugcuguccggccgcagcugcuccaugaccuacaaggggguguacgagcuccagacccuggagcugaacaugaacacccucaacaugugcaugccgcugagcugcacgaagaacaacucccaccacuacaucauggucggcaacgagaccggccuggagcucacccugaccaacacgagccugcuccaccacaaguucugcaaccuguccgacgcccacaagaagaaccuguacgaccacacccucaugagcaucaucuccaccuuccaccugagcauccccaacuucaaccaguacgaggccauguccugcgacuucaacgggggcaagaucaccgugcaguacaaccugagccacuccuacgccaucgacgccgcgaaccacugcgggacgguggccaacggcguccuccagaccuucaugcggauggccuggggcgggagcuacaucgcccuggacuccggccgcgggaagugggacugcaucaugaccagcuaccaguaccugaucauccagaacaccacgugggaggaccacugccaguucucccggcccagccccaucggcuaccucgggcugcugucccagcgcacccgggacaucuacaucagccgccggcuccugggcaccuucaccuggacgcugagcgacuccgagggcaacgagacccccgggggcuacugccucacccgcuggaugcugaucgaggcggagcugaagugcuucgggaacaccgccguggccaagugcaacgagaagcacgacgaggaguucugcgacaugcuccggcuguucgacuucugcaagcaggccauccgccggcugaaggccccggcgcagaugagcauccagcucaucaacaaggccgugaacgcccugaucaacgaccagcugaucaugaagaaccaccuccgcgacaucaugggcauccccuacugcaacuacuccaaguacugcuaccugaaccacacgagcaccgggcggaccucccugccccgcugcugccucgucagcaacggcuccuaccugaacgagacccacuucagcgacgacaucgagcagcaggccgacaacaugaucacggagaugcugcagaaggaguaccuggaccggcagggcaagaccccgcucgggcugguggaccuguucguguucuccaccagcuucuaccucaucuccaucuuccugcaccuggucaagauccccacccaccgccacaucgugggcaagcccugccccaagccgcaccggcucaaccacauggggaucugcagcugcggccuguacaagcagcccggggugcccguccgcuggaagcggugaggacuaguuauaagacugacuagcccgaugggccucccaacgggcccuccuccccuccuugcaccgagauuaaucaaaggcucuuuucagagccaccaaaaaaaaaaaaaaaaaaaaaaaaaaaaaaaaaaaaaaaaaaaaaaaaaaaaaaaaaaaaaaaaaaaaaaaaaaaaaaaaaaaaaaaaaaaaaaaaaaaaa

SEQ ID NO: 34619 - RNA, 1689 nt, Artificial Sequence
  mRNA product Design i-3 (hSL-A100) comprising derived and/or modified sequence from LASV(G1180-SLE-2010;Clade IV)__AIT17168__GPCmut8 (opt1)
aggagaaagcuuaccaugggccagaucgugaccuucuuccaggaggucccccacgugaucgaggaggugaugaacaucguccugaucgcccucagcauccuggccgugcugaaggggcucuacaacuucgcgaccugcggccugguggggcugcucacguuccugcugcucugcggccgcuccugcaccgccagccgguacaagggggucuacgagcugcagacccuggagcucaacauggagacccugaacaugugcaugccgcuguccugcacgaagaacaacagccaccacuacaucauggugggcaacgagaccggccucgagcugacccugaccaacacguccaucaucaaccacaaguucugcaaccucagcgacgcccacaagaagaaccuguacgaccacgcccugauguccaucaucagcaccuuccaccucuccauccccaacuucaaccaguacgaggccaugagcugcgacuucaacgggggcaagaucuccgugcaguacaaccugagccacuccuacgcgggggacgccgccaaccacugcggcaccgucgccaacggggugcugcagaccuucaugcgcauggcguggggcggcagcuacaucgcccucgacuccgggcacggcagcugggacugcaucaugacguccuaccaguaccugaucauccagaacaccaccugggaggaccacugccaguucagccggcccucccccaucggguaccugggccuccugagccagcgcacccgggacaucuacaucagccgccggcugcucggcacguucaccuggacccuguccgacagcgaggggaaggacaccccgggcggguacugccugacgcgcuggaugcucaucgaggccgagcugaagugcuucggcaacaccgccguggccaagugcaacgagaagcacgacgaggaguucugcgacaugcugcggcuguucgacuucugcaagcaggcgauccagcgccugaaggcccccgcccagauguccauccagcugaucaacaaggccgucaacgcccucaucaacgaccagcugaucaugaagaaccaccuccgggacaucauggggauccccuacugcaacuacagcaaguacugcuaccucaaccacaccaccacgggcaagaccucccugcccaagugcugccuggugagcaacggcuccuaccucaacgagacccacuucagcgacgacaucgagcagcaggcggacaacaugaucaccgagaugcugcagaaggaguacauggagcgccaggggaagacgccgcugggccugguggaccucuucgucuucuccaccagcuucuaccugaucuccaucuuccugcaccucgugaagauccccacccaccggcacaucgugggcaagagcugccccaagccccaccgccugaaccacauggggaucugcuccugcgggcuguacaagcagccgggcguccccgugaaguggaagcggugaggacuaguuauaagacugacuagcccgaugggccucccaacgggcccuccuccccuccuugcaccgagauuaaucaaaggcucuuuucagagccaccaaaaaaaaaaaaaaaaaaaaaaaaaaaaaaaaaaaaaaaaaaaaaaaaaaaaaaaaaaaaaaaaaaaaaaaaaaaaaaaaaaaaaaaaaaaaaaaaaaaaa

SEQ ID NO: 34620 - RNA, 1689 nt, Artificial Sequence
  mRNA product Design i-3 (hSL-A100) comprising derived and/or modified sequence from LASV(G1442-SLE-2011;Clade IV)__AIT17180__GPCmut8 (opt1)
aggagaaagcuuaccaugggccagaucgugaccuucuuccaggaggucccccacgugaucgaggaggugaugaacaucguccugaucgcccucagcauccuggccgugcugaaggggcucuacaacguggcgaccugcggccugaucgggcuggucacguuccuccugcugugcggccgcuccugcaccaccacccucuacaaggggguguacgagcugcagacgcuggagcucaacauggagacccugaacaugugcaugccgcugagcugcaccaagaacaacucccaccacuacauccgggugggcaacgagaccggccucgagcugacgcugaccaacaccagcaucaucaaccacaaguucugcaaccucuccgacgcccacaagaagaaccuguacgaccacgcccugaugagcaucaucuccaccuuccaccucagcauccccaacuucaaccaguacgaggccauguccugcgacuucaacgggggcaagaucagcguccaguacaaccugucccacagcuacgccggggacgcggccaaccacugcggcacgguggccaacggggugcugcagaccuucaugcgcauggccuggggcggcuccuacaucgcgcucgacagcgggcggggcaacugggacugcaucaugaccuccuaccaguaccugaucauccagaacaccacgugggacgaccacugccaguucagccgccccucccccaucggguaccugggccuccugagccagcggacccgcgacgucuacaucucccggcgccugcucggcaccuucaccuggacgcugagcgacagcgaggggaaggacaccccgggcggguacugccugacccgguggaugcucaucgaggccgagcugaagugcuucggcaacaccgccguggccaagugcaacgagaagcacgacgaggaguucugcgacaugcugcgccucuucgacuucugcaagcaggccauccagcggcugaaggcgcccgcccagauguccauccagcugaucaacaaggccgugaacgcccucaucaacgaccagcugaucaugaagaaccaccuccgcgacaucauggggauccccuacugcaacuacagcaaguacugcuaccugaacaacacggccaccggcaagaccucccugcccaagugcugccugaucagcaacggcuccuaccucaacgagacccacuucagcgacgacaucgagcaggaggcggacaacaugaucacggagaugcugcagaaggaguacauggagcggcaggggaagaccccgcugggccuggucgaccucuucguguucuccaccagcuucuaccugaucuccaucuuccugcaccucgugaagauccccacccaccgccacaucgucggcaagagcugccccaagccccaccggcugaaccacauggggaucugcuccugcgggcuguacaagcagccgggcgugcccgugcgcuggaagcggugaggacuaguuauaagacugacuagcccgaugggccucccaacgggcccuccuccccuccuugcaccgagauuaaucaaaggcucuuuucagagccaccaaaaaaaaaaaaaaaaaaaaaaaaaaaaaaaaaaaaaaaaaaaaaaaaaaaaaaaaaaaaaaaaaaaaaaaaaaaaaaaaaaaaaaaaaaaaaaaaaaaaa

SEQ ID NO: 34621 - RNA, 1689 nt, Artificial Sequence
  mRNA product Design i-3 (hSL-A100) comprising derived and/or modified sequence from LASV(G3010-SLE-2013;Clade IV)__AIT17344__GPCmut8 (opt1)
aggagaaagcuuaccaugggccagaucgugaccuucuuccaggaggucccccacgugaucgaggaggugaugaacaucguccugaucgcccucagcauccuggccgugcugaaggggcucuacaacuucgcgaccugcggccugguggggcuggucacguuccuccugcugugcggccgcuccugcaccaccagccucuacaaggggguguacgagcugcagacccuggagcucaacauggagacgcugaacaugugcaugccgcuguccugcaccaagaacaacagccaccacuacaucauggugggcaacgagaccggccucgagcugacccugacgaacaccuccaucaucaaccacaaguucugcaaccucagcgacgcccacaagaagaaccuguacaaccacgcccugauguccaucaucagcaccuuccaccucuccauccccaacuucaaccaguacgaggccaugagcugcgacuucaacgggggcaagaucuccguccaguacaaccugagccacuccuacgccggggacgcggccagccacugcggcaccguggccaacggggugcugcagacguucaugcggauggccuggggcggcuccuacaucgcgcucgacagcggguacggcaagugggacugcaucaugaccuccuaccaguaccugaucauccagaacaccaccugggaggaccacugccaguucagccgccccucccccaucggguaccugggccuccugagccagcggacgcgcgacaucuacaucagccggcgccugcucggcaccuucaccuggacccuguccgacagcgaggggaaggacacgccgggcggguacugccugacccgguggaugcucaucgaggccgagcugaagugcuucggcaacaccgccgucgccaagugcaacgagaagcacgacgaggaguucugcgacaugcugcgccucuucgacuucugcaagcaggccauccagcggcugaagacccccgcgcagauguccauccagcugaucaacaaggccgugaacgcccucaucaacgaccagcugaucaugaagaaccaccuccgcgacaucauggggauccccuacugcaacuacagcaaguacugcuaccugaaccacacgaccaccggcaagaccucccugcccaagugcugccuggugagcaacggcuccuaccucaacgagacgcacuucagcgacgacaucgagcagcaggccgacaacaugaucaccgagaugcugcagaaggaguacauggagcggcaggggaagaccccgcugggccuggucgaccucuucguguucuccaccagcuucuaccugaucuccaucuuccugcaccucgugaagauccccacgcaccgccacaucgucggcaagagcugccccaagccccaccggcugaaccacauggggaucugcuccugcgggcuguacaagcagccgggcgugcccgugcgcuggaagcggugaggacuaguuauaagacugacuagcccgaugggccucccaacgggcccuccuccccuccuugcaccgagauuaaucaaaggcucuuuucagagccaccaaaaaaaaaaaaaaaaaaaaaaaaaaaaaaaaaaaaaaaaaaaaaaaaaaaaaaaaaaaaaaaaaaaaaaaaaaaaaaaaaaaaaaaaaaaaaaaaaaaaa

SEQ ID NO: 34622 - RNA, 1689 nt, Artificial Sequence
  mRNA product Design i-3 (hSL-A100) comprising derived and/or modified sequence from LASV(G502-SLE-2009;Clade IV)__AIT17126__GPCmut8 (opt1)
aggagaaagcuuaccaugggccagaucgugaccuucuuccaggaggucccccacgugaucgaggaggugaugaacaucguccugaucgcccucagcauccuggccgugcugaaggggcucuacaacuucgcgaccugcggccugguggggcugcucacguuccugcugcucugcggccgcuccugcaccaccgggcuguacaagggcgucuacgagcugcagacccucgagcugaacauggagacgcugaacaugugcaugccgcucagcugcaccaagaacaacucccaccacuacaucauggugggcaacgagaccgggcuggagcugacccucacgaacaccagcaucaucaaccacaaguucugcaaccuguccgacgcccacaagaagaaccuguacgaccacgcccucaugagcaucaucuccaccuuccaccugagcauccccaacuucaaccaguacgaggccauguccugcgacuucaacggcgggaagaucagcgugcaguacaaccugucccacagcuacgccggcgacgcggccgaccacugcgggaccgucgccaacggcgugcuccagacguucaugcggauggccuggggcggguccuacaucgcgcuggacagcggccgcgggcggugggacugcaucaugaccuccuaccaguaccugaucauccagaacaccaccugggaggaccacugccaguucagccgccccucccccaucggcuaccucggccugcugagccagcggacgcgcgacaucuacaucucccggcgccuccuggggaccuucaccuggacccugagcgacagcgagggcaaggacacgcccgggggcuacugccucacccgguggaugcugaucgaggccgagcugaagugcuucgggaacaccgccguggccaagugcaacgagaagcacgacgaggaguucugcgacaugcuccgccuguucgacuucugcaagcaggccauccagcggcugaaggcgccggcccagauguccauccagcucaucaacaaggccgucaacgcccugaucaacgaccagcuggugaugaagaaccaccuccgcgacaucaugggcauccccuacugcaacuacagccgguacugcuaccugaaccacaccacgaccggccgcaccucccugcccaagugcugccucgugagcaacggguccuaccugaacgagacccacuucagcgacgacaucgagcagcaggccgacaacaugaucacggagaugcugcagaaggaguacauggagcggcagggcaagaccccgcuggggcucgucgaccuguucguguucuccaccagcuucuaccugaucuccaucuuccuccaccuggugaagauccccacccaccgccacaucgucggcaagagcugccccaagccccaccggcugaaccacauggggaucugcuccugcggccucuacaagcagccgggcgugcccgugaaguggaagcgcugaggacuaguuauaagacugacuagcccgaugggccucccaacgggcccuccuccccuccuugcaccgagauuaaucaaaggcucuuuucagagccaccaaaaaaaaaaaaaaaaaaaaaaaaaaaaaaaaaaaaaaaaaaaaaaaaaaaaaaaaaaaaaaaaaaaaaaaaaaaaaaaaaaaaaaaaaaaaaaaaaaaaa

SEQ ID NO: 34623 - RNA, 1689 nt, Artificial Sequence
  mRNA product Design i-3 (hSL-A100) comprising derived and/or modified sequence from LASV(G733-SLE-2010;Clade IV)__AIT17154__GPCmut8 (opt1)
aggagaaagcuuaccaugggccagaucgugaccuucuuccaggaggucccccacgugaucgaggaggugaugaacaucguccugaucgcccucagcauccuggccgugcugaaggggcucuacaacuucgcgaccugcggcaucguggggcuggucuccuuccugcuccugugcggccgcagcugcacgaccucccuguacaaggggguguacgagcuccagacccuggagcugaacauggagacccucaacaugugcaugccgcugagcugcacgaagaacaacucccaccacuacaucauggugggcaacgagaccggccuggagcucacccugaccaacacgagcaucaucaaccacaaguucugcaaccuguccgacgcccacaagaagaaccucuacgaccacgcccugaugagcaucaucuccaccuuccaccugagcauccccaacuucaaccaguacgaggccauguccugcgacuucaacgggggcaagaucagcguccaguacaaccucucccacagcuacgccggggacgcggccaaccacugcggcaccaucgccaacggggugcugcagaccuucaugcggauggccuggggcggcuccuacaucgcgcuggacagcgggcgcgaccggugggacugcaucaugacguccuaccaguaccucaucauccagaacaccaccugggaggaccacugccaguucagccgccccucccccaucggcuaccuggggcugcucagccagcggacccgcgacaucuacaucagccggcgccugcugggcacguucaccuggacccucuccgacagcgagggcaaggacacccccgggggcuacugccugacgcgguggaugcugaucgaggccgagcucaagugcuucgggaacaccgccguggccaagugcaacgagaagcacgacgaggaguucugcgacaugcugcgccuguucgacuucugcaagcaggccauccagcggcucaaggcgccggcccagauguccauccagcugaucaacaaggccgucaacgcccugaucaacgaccagcucaucaugaagaaccaccuccgcgacaucaugggcauccccuacugcaacuacagcaaguacugcuaccugaaccacaccaccacggggaagaccucccugcccaagugcugccuggugagcaacggcuccuaccugaacgagacccacuucagcgacgacaucgagcagcaggccgacaacaugaucaccgagaugcuccagaaggaguacauggagcggcagggcaagacgccgcuggggcugguggaccuguucgucuucuccaccagcuucuaccucaucuccaucuuccugcaccuggugaagauccccacccaccgccacguggucggcaagagcugccccaagccccaccggcucaaccacauggggaucugcuccugcggccuguacgggcagccgggcgugcccgugaaguggaagcgcugaggacuaguuauaagacugacuagcccgaugggccucccaacgggcccuccuccccuccuugcaccgagauuaaucaaaggcucuuuucagagccaccaaaaaaaaaaaaaaaaaaaaaaaaaaaaaaaaaaaaaaaaaaaaaaaaaaaaaaaaaaaaaaaaaaaaaaaaaaaaaaaaaaaaaaaaaaaaaaaaaaaaa

SEQ ID NO: 34624 - RNA, 1689 nt, Artificial Sequence
  mRNA product Design i-3 (hSL-A100) comprising derived and/or modified sequence from MOPV/LASV reassortant(IGS-1;Clade IV)__AFY05576__GPCmut8 (opt1)
aggagaaagcuuaccaugggccagaucgugaccuucuuccaggaggucccccacgugaucgaggaggugaugaacaucguccugaucgcccucagcgugcuggccgugcugaaggggcucuacaacuucgcgaccugcggccuggucgggcuggugacguuccuccugcugugcggccgcuccugcaccaccagccucuacaaggggguguacgagcugcagacccuggagcucaacauggagacgcugaacaugugcaugccgcuguccugcaccaagaacaacagccaccacuacaucauggucggcaacgagaccggccucgagcugacccugacgaacaccuccaucaucaaccacaaguucugcaaccucagcgacgcccacaagaagaaccuguacgaccacgcccugauguccaucaucagcaccuuccaccucuccauccccaacuucaaccaguacgaggccaugagcugcgacuucaacgggggcaagaucuccgugcaguacaaccugagccacuccuacgccggggacgcggccaaccacugcggcaccguggccaacgggguccugcagacguucaugcggauggccuggggcggcagcuacaucgcgcucgacuccgggcgcggcaacugggacugcaucaugaccagcuaccaguaccugaucauccagaacaccaccugggaggaccacugccaguucucccggcccagccccaucggguaccugggccuccugucccagcgcacgcgggacaucuacaucagccgccggcugcucggcaccuucaccuggacccugagcgacuccgagggggaggacacgccgggcggguacugccugacccgcuggaugcucaucgaggccgagcugaagugcuucggcaacaccgccguggccaagugcaacgagaagcacgacgaggaguucugcgacaugcugcggcuguucgacuucugcaagcaggccauccagcgccugaaggcgcccgcccagaugagcauccagcugaucaacaaggccgugaacgcccucaucaacgaccagcugaucaugaagaaccaccuccgggacaucauggggauccccuacugcaacuacuccaaguacugcuaccucaaccacaccacgaccggccgcaccagccugcccaagugcugccuggucuccaacggcagcuaccucaacgagacccacuucuccgacgacaucgagcagcaggccgacaacaugaucacggagaugcugcagaaggaguacauggagcggcaggggaagaccccgcugggccugguggaccucuucguguucagcaccuccuucuaccugaucagcaucuuccugcaccucgucaagauccccacccaccgccacaucguggggaaguccugccccaagccccaccggcugaaccacaugggcaucugcagcugcgggcuguacaagcagccgggcgugcccgucaaguggaagcgcugaggacuaguuauaagacugacuagcccgaugggccucccaacgggcccuccuccccuccuugcaccgagauuaaucaaaggcucuuuucagagccaccaaaaaaaaaaaaaaaaaaaaaaaaaaaaaaaaaaaaaaaaaaaaaaaaaaaaaaaaaaaaaaaaaaaaaaaaaaaaaaaaaaaaaaaaaaaaaaaaaaaaa

SEQ ID NO: 34625 - RNA, 1689 nt, Artificial Sequence
  mRNA product Design i-3 (hSL-A100) comprising derived and/or modified sequence from LASV(LM765-SLE-2012;Clade IV)__AIT17814__GPCmut8 (opt1)
aggagaaagcuuaccaugggccagaucgugaccuucuuccaggaggucccccacgugaucgaggaggugaugaacaucguccugaucgcccucagcauccuggccgugcugaaggggcucuacaacuucgcgaccugcggccugguggggcuggucacguuccuccugcugugcggccgcuccugcaccaccagccucuacaaggggguguacgagcugcagacccuggagcucaacauggagacgcugaacaugugcaugccgcuguccugcaccaagaacaacagccaccacuacaucauggugggcaacgagaccggccucgagcugacccugacgaacaccuccaucaucgaccacaaguucugcaaccucagcgacgcccaccggaagaaccuguacgaccacgcccugauguccaucaucagcaccuuccaccucuccauccccaacuucaaccaguacgaggccaugagcugcgacuucaacgggggcaagaucuccguccaguacaaccugagccacuccuacgccaaggacgcggccgaccacugcgggaccguggccaacggcgugcugcagacguucaugcgcauggccuggggcgggagcuacaucgcgcucgacuccggccgggggcgcugggacugcaucaugaccagcuaccaguaccugaucauccagaacaccaccugggaggaccacugccaguucucccggcccagccccaucggcuaccuggggcuccugucccagcgcacgcgggacaucuacaucagccgccggcugcucggcaccuucaccuggacccugagcgacuccgagggcaaggacacgcccgggggcuacugccugacccgcuggaugcucaucgaggccgagcugaagugcuucgggaacaccgccgucgccaagugcaacgagaagcacgacgaggaguucugcgacaugcugcggcuguucgacuucugcaagcaggccauccagcgccugaaggcgccggcccagaugagcauccagcugaucaacaaggccgugaacgcccucaucaacgaccagcugaucaugaagaaccaccuccgggacaucaugggcauccccuacugcaacuacuccaaguacugcuaccucaaccacaccacgaccgggaagaccagccugcccaagugcugccugguguccaacggcagcuaccucaacgagacccacuucuccgacgacaucgagcagcaggccgacaacaugaucacggagaugcugcagaaggaguacauggagcgccagggcaagaccccgcuggggcuggucgaccucuucguguucagcaccuccuucuaccugaucagcaucuuccugcaccucgugaagauccccacccaccggcacaucgucggcaagcccugccccaagccgcaccgccugaaccacauggggaucugcuccugcggccuguacaagcagcccggggugcccgugaaguggaagcggugaggacuaguuauaagacugacuagcccgaugggccucccaacgggcccuccuccccuccuugcaccgagauuaaucaaaggcucuuuucagagccaccaaaaaaaaaaaaaaaaaaaaaaaaaaaaaaaaaaaaaaaaaaaaaaaaaaaaaaaaaaaaaaaaaaaaaaaaaaaaaaaaaaaaaaaaaaaaaaaaaaaaa

SEQ ID NO: 34626 - RNA, 1689 nt, Artificial Sequence
  mRNA product Design i-3 (hSL-A100) comprising derived and/or modified sequence from LASV(LM776-SLE-2012;Clade IV)__AIT17824__GPCmut8 (opt1)
aggagaaagcuuaccaugggccagaucgugaccuucuuccaggaggucccccacgugaucgaggaggugaugaacaucguccugaucgcccucagcauccuggccgugcugaaggggcucuacaacuucgcgaccugcggccugguggggcuggucacguuccuccugcugugcggccgcuccugcaccaccagcguguacaaggggguguacgagcuccagacccuggagcugaacauggagacgcucaacaugugcaugccgcuguccugcaccaagaacaacagccaccacuacaucauggucggcaacgagaccggccuggagcucacccugacgaacaccuccaucaucaaccacaaguucugcaaccugagcgacgcccacaagaagaaccucuacgaccacgcccugauguccaucaucagcaccuuccaccuguccauccccaacuucaaccaguacgaggccaugagcugcgacuucaacgggggcaagaucuccgugcaguacaaccucagccacuccuacgccggggacgcggccaaccacugcggcaccguggccaacgggguccugcagacguucaugcggauggccuggggcggcagcuacaucgcgcuggacuccgggcacggcaagugggacugcaucaugaccagcuaccaguaccucaucauccagaacaccaccugggaggaccacugccaguucucccgccccagccccaucggguaccugggccugcucucccagcggacgcgcgacaucuacaucagccggcgccugcugggcaccuucaccuggacccucagcgacuccgaggggaaggacacgccgggcggguacugccugacccgguggaugcugaucgaggccgagcucaagugcuucggcaacaccgccguggccaagugcaacgagaagcacgacgaggaguucugcgacaugcugcgccuguucgacuucugcaagcaggccauccagcggcucaaggcgcccgcccagaugagcauccagcugaucaacaaggccgugaacgcccugaucaacgaccagcucaucaugaagaaccaccuccgcgacaucauggggauccccuacugcaacuacuccaaguacugcuaccugaaccacaccacgaccggcaagaccagccugcccaagugcugccuggucuccaacggcagcuaccugaacgagacccacuucuccgacgacaucgagcagcaggccgacaacaugaucacggagaugcuccagaaggaguacauggagcggcaggggaagaccccgcugggccugguggaccuguucguguucagcaccuccuucuaccucaucagcaucuuccugcaccuggucaagauccccacccaccgccacaucguggggaaguccugccccaagccccaccggcucaaccacaugggcaucugcagcugcgggcuguacaagcagccgggcgugcccguccgcuggaagcggugaggacuaguuauaagacugacuagcccgaugggccucccaacgggcccuccuccccuccuugcaccgagauuaaucaaaggcucuuuucagagccaccaaaaaaaaaaaaaaaaaaaaaaaaaaaaaaaaaaaaaaaaaaaaaaaaaaaaaaaaaaaaaaaaaaaaaaaaaaaaaaaaaaaaaaaaaaaaaaaaaaaaa

SEQ ID NO: 34627 - RNA, 1689 nt, Artificial Sequence
  mRNA product Design i-3 (hSL-A100) comprising derived and/or modified sequence from LASV(Mad39;Clade IV)__ANH09722__GPCmut8 (opt1)
aggagaaagcuuaccaugggccagaucgugaccuucuuccaggaggucccccacgugaucgaggaggugaugaacaucguccugaucgcccucagcauccuggccgugcugaaggggcucuacaacguggcgaccugcggccugaucgggcuggucacguuccuccugcugugcggccgcuccugcaccaccacccucuacaaggggguguacgagcugcaggcccuggagcucaacauggagacgcugaacaugugcaugccgcugagcugcaccaagaacaacucccaccacuacauccgggugggcaacgagaccggccucgagcugacccugacgaacaccagccucaucaaccacaaguucugcaaccuguccgacgcccacaagaagaaccuguacgaccacgcccucaugagcaucaucuccaccuuccaccugagcauccccaacuucaaccaguacgaggccauguccugcgacuucaacgacgggaagaucagcguccaguacaaccugucccacaccuacgcgggcgacacggccaaccacugcgggaccguggccaacggcgugcuccagaccuucaugcgcauggccuggggcgggagcuacaucgcgcuggacuccggccgcgggggcugggacugcaucaugaccagcuaccaguaccugaucauccagaacacgaccugggaggaccacugccaguucucccggcccagccccaucggguaccucggccugcugucccagcggacccgcgacaucuacaucagccggcgccuccugggcaccuucacguggacccuguccgacagcgaggggaaggacaccccgggcggguacugccucacccgguggaugcugaucgaggccgagcugaagugcuucggcaacacggccgucgccaagugcaacgagaagcacgacgaggaguucugcgacaugcuccgccuguucgacuucugcaagcaggccauccagcggcugaaggcgcccgcccagaugagcauccagcucaucaacaaggccgugaacgcccugaucaacgaccagcugaucaugaagaaccaccuccgcgacaucauggggauccccuacugcaacuacuccaaguacugcuaccugaaccacaccgugaccggcaagaccagccugcccaagugcugccucgucuccaacggcagcuaccugaacgagacgcacuucuccgacgacaucgagcagcaggccgacaacaugaucaccgagaugcugcagaaggaguacauggagcggcaggggaagaccccgcugggccucguggaccuguucguguucagcaccuccuucuaccugaucagcaucuuccuccaccuggucaagauccccacgcaccgccacgugguggggaagcccugccccaagccgcaccggcugaaccacaugggcaucugcuccugcggguucuacaagcagcccggcguccccgugcgcuggaagcggugaggacuaguuauaagacugacuagcccgaugggccucccaacgggcccuccuccccuccuugcaccgagauuaaucaaaggcucuuuucagagccaccaaaaaaaaaaaaaaaaaaaaaaaaaaaaaaaaaaaaaaaaaaaaaaaaaaaaaaaaaaaaaaaaaaaaaaaaaaaaaaaaaaaaaaaaaaaaaaaaaaaaa

SEQ ID NO: 34628 - RNA, 1689 nt, Artificial Sequence
  mRNA product Design i-3 (hSL-A100) comprising derived and/or modified sequence from LASV(Z0947-SLE-2011;Clade IV)__AIT17840__GPCmut8 (opt1)
aggagaaagcuuaccaugggccagaucgugaccuucuuccaggaggucccccacgugaucgaggaggugaugaacaucguccugaucgcccucagcauccuggccgugcugaaggggcucuacaacuucgcgaccugcggccugguggggcuggucacguuccuccugcugugcggccgcuccugcaccaucagccucuacaaggggguguacgagcugcagacccuggagcucaacauggagacccugaacaugugcaugccgcuguccugcacgaagaacaacagccaccacuacaucauggugggcaacgagaccggccucgagcugacccugaccaacacguccaucaucaaccacaaguucugcaaccucagcgacgcccacaagaagaaccuguacgaccacgcccugauguccaucaucagcaccuuccaccucuccauccccaacuucaaccaguacgaggccaugagcugcgacuucaacgggggcaagaucuccguccaguacaaccugagccacuccuacgccggggacgcggccaaccacugcggcaccguggccaacggggugcugcagaccuucaugcggauggccuggggcggcagcuacaucgcgcucgacuccgggcgcgaccggugggacugcaucaugacgagcuaccaguaccugaucauccagaacaccaccugggaggaccacugccaguucucccgccccagccccaucggcuaccuggggcuccugucccagcggacccgcgacaucuacaucagccggcgccugcucggcacguucaccuggacccugagcgacuccgagggcaaggacacccccgggggcuacugccugacgcgguggaugcucaucgaggccgagcugaagugcuucgggaacaccgccgucgccaagugcaacgagaagcacgacgaggaguucugcgacaugcugcgccucuucgacuucugcaagcaggccauccagcggcugaaggcgccggcccagaugagcauccagcugaucaacaaggccgugaacgcccucaucaacgaccagcugaucaugaagaaccaccuccgcgacaucaugggcauccccuacugcaacuacuccaaguacugcuaccugaaccacaccaccacggggaagaccagccugcccaagugcugccugguguccaacggcagcuaccucaacgagacccacuucuccgacgacaucgagcagcaggccgacaacaugaucaccgagaugcugcagaaggaguacauggagcggcagggcaagacgccgcuggggcuggucgaccucuucguguucagcaccuccuucuaccugaucagcaucuuccugcaccucgugaagauccccacccaccgccacaucgucggcaagcccugccccaagccgcaccggcugaaccacauggggaucugcuccugcggccuguacaagcagcccggggugcccgugaaguggaagcgcugaggacuaguuauaagacugacuagcccgaugggccucccaacgggcccuccuccccuccuugcaccgagauuaaucaaaggcucuuuucagagccaccaaaaaaaaaaaaaaaaaaaaaaaaaaaaaaaaaaaaaaaaaaaaaaaaaaaaaaaaaaaaaaaaaaaaaaaaaaaaaaaaaaaaaaaaaaaaaaaaaaaaa

SEQ ID NO: 34629 - RNA, 1689 nt, Artificial Sequence
  mRNA product Design i-3 (hSL-A100) comprising derived and/or modified sequence from LASV(Josiah;Clade IV)__NP_694870__GPCmut8 (opt4)
aggagaaagcuuaccaugggccagaucgugaccuucuuccaggaggugccccacgugaucgaggaggugaugaacaucgugcugaucgcccugagcgugcuggccgugcugaagggccuguacaacuucgccaccugcggccuggugggccuggugaccuuccugcugcugugcggcagaagcugcaccaccagccuguacaagggcguguacgagcugcagacccuggagcugaacauggagacccugaacaugugcaugccccugagcugcaccaagaacaacagccaccacuacaucauggugggcaacgagaccggccuggagcugacccugaccaacaccagcaucaucaaccacaaguucugcaaccugagcgacgcccacaagaagaaccuguacgaccacgcccugaugagcaucaucagcaccuuccaccugagcauccccaacuucaaccaguacgaggccaugagcugcgacuucaacggcggcaagaucagcgugcaguacaaccugagccacagcuacgccggcgacgccgccaaccacugcggcaccguggccaacggcgugcugcagaccuucaugagaauggccuggggcggcagcuacaucgcccuggacagcggcagaggcaacugggacugcaucaugaccagcuaccaguaccugaucauccagaacaccaccugggaggaccacugccaguucagcagacccagccccaucggcuaccugggccugcugagccagagaaccagagacaucuacaucagcagaagacugcugggcaccuucaccuggacccugagcgacagcgagggcaaggacacccccggcggcuacugccugaccagauggaugcugaucgaggccgagcugaagugcuucggcaacaccgccguggccaagugcaacgagaagcacgacgaggaguucugcgacaugcugagacuguucgacuucugcaagcaggccauccagagacugaaggcccccgcccagaugagcauccagcugaucaacaaggccgugaacgcccugaucaacgaccagcugaucaugaagaaccaccugagagacaucaugggcauccccuacugcaacuacagcaaguacugcuaccugaaccacaccaccaccggcagaaccagccugcccaagugcugccuggugagcaacggcagcuaccugaacgagacccacuucagcgacgacaucgagcagcaggccgacaacaugaucaccgagaugcugcagaaggaguacauggagagacagggcaagaccccccugggccugguggaccuguucguguucagcaccagcuucuaccugaucagcaucuuccugcaccuggugaagauccccacccacagacacaucgugggcaagagcugccccaagccccacagacugaaccacaugggcaucugcagcugcggccuguacaagcagcccggcgugcccgugaaguggaagagaugaggacuaguuauaagacugacuagcccgaugggccucccaacgggcccuccuccccuccuugcaccgagauuaaucaaaggcucuuuucagagccaccaaaaaaaaaaaaaaaaaaaaaaaaaaaaaaaaaaaaaaaaaaaaaaaaaaaaaaaaaaaaaaaaaaaaaaaaaaaaaaaaaaaaaaaaaaaaaaaaaaaaa

SEQ ID NO: 34630 - RNA, 1686 nt, Artificial Sequence
  mRNA product Design i-3 (hSL-A100) comprising derived and/or modified sequence from LASV(LP;Clade I)__AAF86701__GPCmut8 (opt4)
aggagaaagcuuaccaugggccagaucaucaccuucuuccaggaggugccccacgugaucgaggaggugaugaacaucgugcugaucgcccugagccugcuggccauccugaagggccuguacaacaucgccaccugcggcaucaucggccugguggccuuccuguuccugugcggcaagagcugcagccugacccugaagggcggcuacgagcugcagacccuggagcugaacauggagacccugaacaugugcaugccccugagcugcaccaagaacagcagccaccacuacaucagagugggcaacgagaccggccuggagcugacccugaccaacaccagcaucaucaaccacaaguucugcaaccugagcgacgcccacaagaagaaccuguacgaccacgcccugaugagcaucaucagcaccuuccaccugagcauccccaacuucaaccaguacgaggccaugagcugcgacuucaacggcggcaagaucagcgugcaguacaaccugagccacagcuacgccggcgacgccgccgagcacugcggcaccguggccaacggcgugcugcagaccuucaugagaauggccuggggcggcagauacaucgcccuggacagcggcaagggcaacugggacugcaucaugaccagcuaccaguaccugaucauccagaacaccaccugggaggaccacugccaguucagcagacccagccccaucggcuaccugggccugcugagccagagaaccagagacaucuacaucagcagaagacugcugggcaccuucaccuggacccugagcgacagcgagggcaacgagacccccggcggcuacugccugaccagauggaugcugaucgaggccgagcugaagugcuucggcaacaccgccguggccaagugcaacgagaagcacgacgaggaguucugcgacaugcugagacuguucgacuucugcaagcaggccaucagaagacugaaggcccccgcccagaugagcauccagcugaucaacaaggccgugaacgcccugaucaacgaccagcugaucaugaagaaccaccugagagacaucaugggcauccccuacugcaacuacagcaaguacugcuaccugaaccacaccagcagcggcagaaccagccugcccaagugcugccugaucagcaacggcagcuaccugaacgagacccaguucagcgacgacaucgagcagcaggccgacaacaugaucaccgagaugcugcagaaggaguacaucgagagacagggcaagaccccccugggccugguggacaucuucaucuucagcaccagcuucuaccugaucagcaucuuccugcaccugaucaagauccccacccacagacacaucgugggcaagcccugccccaagccccacagacugaaccacaugggcgugugcagcugcggccuguacaagcaccccggcgugcccaccaaguggaagagaugaggacuaguuauaagacugacuagcccgaugggccucccaacgggcccuccuccccuccuugcaccgagauuaaucaaaggcucuuuucagagccaccaaaaaaaaaaaaaaaaaaaaaaaaaaaaaaaaaaaaaaaaaaaaaaaaaaaaaaaaaaaaaaaaaaaaaaaaaaaaaaaaaaaaaaaaaaaaaaaaaaaaa

SEQ ID NO: 34631 - RNA, 1686 nt, Artificial Sequence
  mRNA product Design i-3 (hSL-A100) comprising derived and/or modified sequence from LASV(803213;Clade II)__AAF86703__GPCmut8 (opt4)
aggagaaagcuuaccaugggccagaucaucaccuucuuccaggaggugccccacgugaucgaggaggugaugaacaucgugcugaucgcccugagccugcuggccauccugaagggcaucuacaacguggccaccugcggccuguucggccugaucagcuuccugcugcugugcggcagaagcugcagcgugaccuacaagggcguguacgagcugcagacccuggagcugaacauggccaaccugaacaugugcaugccccugagcugcaccaagaacaacagccaccacuacaucauggugggcaacgagaccggccuggagcugacccugaccaacaccagcaucaucaaccacaaguucugcaaccugagcgacgcccacaagaagaaccuguacgaccacgcccugaugagcaucaucagcaccuuccaccugagcauccccaacuucaaccaguacgaggccaugagcugcgacuucaacggcggcaagaucagcgugcaguacaaccugagccacagcuucgccguggacgccgccaaccacugcggcaccaucgccaacggcgugcugcagaccuucaugagaauggccuggggcggcagcuacaucgcccuggacagcggcaagggcaacugggacugcaucaugaccagcuaccaguaccugaucauccagaacaccaccugggaggaccacugccaguucagcagacccagccccaucggcuaccugggccugcugagccagagaaccagagacaucuacaucagcagaagacugcugggcaccuucaccuggacccugagcgacagcgagggcaacgaggcccccggcggcuacugccugaccagauggaugcugaucgaggccgagcugaagugcuucggcaacaccgccguggccaagugcaacgagaagcacgacgaggaguucugcgacaugcugagacuguucgacuucugcaagcaggccaucaagagacugaagacccccgcccagaugagcauccagcugaucaacaaggccgugaacgcccugaucaacgaccagcugaucaugaagaaccaccugagagacaucaugggcauccccuacugcaacuacagcagauacugcuaccugaaccacaccgugaccggcaagaccagccugcccagaugcugccuggugagcaacggcagcuaccugaacgagacccacuucagcgacgacaucgagcagcaggccgacaacaugaucaccgagaugcugcagaaggaguacauggacagacagggcaagaccccccugggccugguggaccuguucguguucagcaccagcuucuaccugaucagcaucuuccugcaccuggugaagauccccacccacagacacaucgugggcaagcccugccccaagccccacagacugaaccacaugggcaucugcagcugcggccuguacaagcaccccggcgugcccgugaaguggaagagaugaggacuaguuauaagacugacuagcccgaugggccucccaacgggcccuccuccccuccuugcaccgagauuaaucaaaggcucuuuucagagccaccaaaaaaaaaaaaaaaaaaaaaaaaaaaaaaaaaaaaaaaaaaaaaaaaaaaaaaaaaaaaaaaaaaaaaaaaaaaaaaaaaaaaaaaaaaaaaaaaaaaaa

SEQ ID NO: 34632 - RNA, 1686 nt, Artificial Sequence
  mRNA product Design i-3 (hSL-A100) comprising derived and/or modified sequence from LASV(GA391;Clade III)__CAA36645__GPCmut8 (opt4)
aggagaaagcuuaccaugggccagaucgugaccuucuuccaggaggugccccacgugaucgaggaggugaugaacaucgugcugaucgcccugagcauccuggccauccugaagggccuguacaacguggccaccugcggccugaucggccuggugaccuuccugcugcugagcggcagaagcugcagccugaucuacaagggcaccuacgagcugcagacccuggagcugaacauggagacccugaacaugugcaugccccugagcugcaccaagaacaacagccaccacuacaucagagugggcaacgagaccggccuggagcugacccugaccaacaccagcauccugaaccacaaguucugcaaccugagcgacgcccacaagagaaaccuguacgaccacagccugaugagcaucaucagcaccuuccaccugagcauccccaacuucaaccaguacgaggccaugagcugcgacuucaacggcggcaagaucaccgugcaguacaaccugagccacagcuucgccguggacgccgccggccacugcggcacccuggccaacggcgugcugcagaccuucaugagaauggccuggggcggcagcuacaucgcccuggacagcggcagaggcaacugggacugcaucaugaccagcuaccaguaccugaucauccagaacaccaccugggacgaccacugccaguucagcagacccagccccaucggcuaccugggccugcugagccagagaaccagagacaucuacaucagcagaagacugcugggcaccuucaccuggacccugagcgacagcgagggcaacgagacccccggcggcuacugccugaccagauggaugcugaucgaggccgagcugaagugcuucggcaacaccgccguggccaagugcaacgagaagcacgacgaggaguucugcgacaugcugagacuguucgacuucugcaagcaggccaucagaagacugaagacccccgcccagaugagcauccagcugaucaacaaggccgugaacgcccugaucaacgaccagcugaucaugaagaaccaccugagagacaucaugggcauccccuacugcaacuacagcagauacugcuaccugaaccacaccagcaccggcaagaccagccugcccagaugcugccugaucagcaacggcagcuaccugaacgagaccaaguucagcgacgacaucgagcagcaggccgacaacaugaucaccgagaugcugcagaaggaguacaucgacagacagggcaagaccccccugggccugguggaccuguucguguucagcaccagcuucuaccugaucagcaucuuccugcaccuggugaagauccccacccacagacacaucgugggcaagcccugccccaagccccacagacugaaccacaugggcaucugcagcugcggccuguacaagcagcccggcgugcccgugagauggaagagaugaggacuaguuauaagacugacuagcccgaugggccucccaacgggcccuccuccccuccuugcaccgagauuaaucaaaggcucuuuucagagccaccaaaaaaaaaaaaaaaaaaaaaaaaaaaaaaaaaaaaaaaaaaaaaaaaaaaaaaaaaaaaaaaaaaaaaaaaaaaaaaaaaaaaaaaaaaaaaaaaaaaaa

SEQ ID NO: 34633 - RNA, 1689 nt, Artificial Sequence
  mRNA product Design i-3 (hSL-A100) comprising derived and/or modified sequence from LASV(AV;Clade V)__CCA30314__GPCmut8 (opt4)
aggagaaagcuuaccaugggccagaucgugaccuucuuccaggaggugccccacgugaucgaggaggugaugaacaucgugcugaucgcccugagcauccuggccgugcugaagggccuguacaacaucgccaccugcggccugaucggccugaucaccuuccugcugcugugcggcagaagcugcagcagcaaccuguacaagggcguguacgagcugcagagccuggaccugaacauggagacccugaacaugugcaugccccugagcugcaccaagaacaacagccaccacuacaucagagugggcaacgacaccggccuggagcugacccugaccaacaccagcauccugaaccacaaguucugcaaccugagcgacgcccacaagaaggaccuguacgaccacgcccugaugagcaucaucagcaccuuccaccugagcauccccaacuucaaccaguacgaggccaugagcugcgacuucaacggcggcaagaucagcgugcaguacaaccugagccacagcuacgccaucgacgccgccaaccacugcggcaccguggccaacggcauccugcagaccuucaugagaauggccuggggcggcagcuacaucgcccuggacagcggcagaggcaacugggacugcaucaugaccagcuaccaguaccugaucauccagaacaccaccugggagaaccacugccaguucagcagacccagccccaucggcuaccugggccugcugagccagagaaccagagacaucuacaucagcagaagacugcugggcaccuucaccuggacccugagcgacagcgagggcaacgccacccccggcggcuacugccugaccagauggaugcugaucgaggccgagcugaagugcuucggcaacaccgccguggccaagugcaacgagaagcacgacgaggaguucugcgacaugcugagacuguucgacuucugcaagcaggccaucagcagacugaagagccccgcccagaugagcauccagcugaucaacaaggccgugaacgcccugaucaacgaccagcugaucaugaagaaccaccugagagacaucaugggcauccccuacugcaacuacagcaaguacugcuaccugaaccacaccaucaccggcaagaccagccugcccaagugcugccuggugagcaacggcagcuaccugaacgagacccacuucagcgacgacaucgagcagcaggccgacaacaugaucaccgagaugcugcagaaggaguacauggagagacagggcaagaccccccugggccugguggaccuguucguguucagcaccagcuucuaccugaucagcaucuuccugagacuggugaagauccccacccacagacacaucgugggcaagcccugccccaagccccacagacugaaccacaugggcaucugcagcugcggccuguacaagcagcccggcgugcccgugagauggaagagaugaggacuaguuauaagacugacuagcccgaugggccucccaacgggcccuccuccccuccuugcaccgagauuaaucaaaggcucuuuucagagccaccaaaaaaaaaaaaaaaaaaaaaaaaaaaaaaaaaaaaaaaaaaaaaaaaaaaaaaaaaaaaaaaaaaaaaaaaaaaaaaaaaaaaaaaaaaaaaaaaaaaaa

SEQ ID NO: 34634 - RNA, 1686 nt, Artificial Sequence
  mRNA product Design i-3 (hSL-A100) comprising derived and/or modified sequence from LASV(Togo/2016/7082;Clade VI)__AMR44577__GPCmut8 (opt4)
aggagaaagcuuaccaugggccagaucaucaccuucuuccaggaggugccccacgugaucgaggaggugaugaacaucgugcugaucgcccugagccugcuggccauccugaagggcguguacaacguggccaccugcggcaucaucggccuggugaccuuccuguuccugugcggcagaagcugcagccugaucuacaagggcagcuacgagcugcagacccuggagcugaacauggagacccugaacaugugcaugccccugagcugcaccaagaacagcagccaccacuacaucagagugggcaacgagaccggccuggagcugacccugaccaacaccagcaucaucaaccacaaguucugcaaccugagcgacgcccacaagagaaaccuguacgaccacgcccugaugagcauccugagcaccuuccaccugagcauccccaacuucaaccaguacgaggccaugagcugcgacuucaacggcggcaagaucagcgugcaguacaaccugagccacgccuacgccguggacgccgccgagcacugcggcaccguggccaacggcgugcugcagaccuucaugagaauggccuggggcggcagcuacaucgcccuggacagcggcagaggcaacugggacugcaucaugaccagcuaccaguaccugaucauccagaacaccaccugggaggaccacugccaguucagcagacccagccccaucggcuaccugggccugcugagccagagaaccagagacaucuacaucagcagaagacugcugggcaccuucaccuggacccugagcgacagcgagggcaacgagacccccggcggcuacugccugaccagauggaugcugaucgaggccgagcugaagugcuucggcaacaccgccguggccaagugcaacgagaagcacgacgaggaguucugcgacaugcugagacuguucgacuucugcaagcaggccauccagagacugaagagccccgcccagaugagcauccagcugaucaacaaggccgugaacgcccugaucaacgaccagcugaucaugaagaaccaccugagagacaugaugggcauccccuacugcaacuacagcaaguacugcuaccugaaccacaccagcagcggcagaaccagccugcccaagugcugccuggugagcaacggcagcuaccugaacgagacccacuucagcgacgacaucgagcagcaggccgacaacaugaucaccgagaugcugcagaaggaguacaucgacagacagggcaagaccccccugggccugguggaccuguucguguucagcaccagcuucuaccugaucagcaucuuccugcaccugaucaagauccccacccacagacacaucgugggcaagcccugccccaagccccacagacugaaccacaugggcaucugcagcugcggccuguacaagcagcccggcgugcccaccagauggaagagaugaggacuaguuauaagacugacuagcccgaugggccucccaacgggcccuccuccccuccuugcaccgagauuaaucaaaggcucuuuucagagccaccaaaaaaaaaaaaaaaaaaaaaaaaaaaaaaaaaaaaaaaaaaaaaaaaaaaaaaaaaaaaaaaaaaaaaaaaaaaaaaaaaaaaaaaaaaaaaaaaaaaaa

SEQ ID NO: 34635 - RNA, 1686 nt, Artificial Sequence
  mRNA product Design i-3 (hSL-A100) comprising derived and/or modified sequence from LASV(KAK-428;Clade n.d. (VII))__ANH09740__GPCmut8 (opt4)
aggagaaagcuuaccaugggccagaucgugaccuucuuccaggaggugccccacgugaucgaggaggugaugaacaucgugcugaucgcccugagccugcuggccauccugaagggccuguacaacuucgccaccugcggcgugaucggccugaucaccuuccugcugcugugcggcagaagcugcagcgccaccuacaagggccaguacgagcugcagacccuggagcugaacauggagagccugaacaugugcaugccccugagcugcaccaagaacaacagccaccacuacaucagagccggcaacaacaccggccuggagcugacccugaccaacaccagcaucaucagccacaaguucugcaaccugagcgacgcccacaagaagaaccuguacgaccacacccugaugagcaucaucaccaccuuccaccugagcauccccaacuucaaccaguacgaggccaugagcugcgacuucaacggcggcaagaucagcauccaguacaaccugagccacagcuacgccggcgacgccgcccagcacugcggcaccguggccaacggcgugcugcagaccuucaugagaauggccuggggcggcagcuaccuggcccuggacagcggcagaagaggcugggacugcaucaucagcagcuaccaguaccugaucauccagaacaccaccugggacgaccacugccaguucagcagacccagccccaucggcuaccugggcuucgugagccagaagaccagagacaucuacaucagcagaagacugcugggcaccuucaccuggacccugagcgacagcgagggccacgacaugcccggcggcuacugccugaccagauggaugcugaucgaggccgaccugaagugcuucggcaacaccgccguggccaagugcaacgagaagcacgacgaggaguucugcgacauguggagacuguucgacuucugcaagcaggccauccagagacugaaggcccccgcccagaugaacauccagcugaucaacaaggccgugaacgcccugaucaacgaccagcugaugaugaagaaccaccugagagacaucaugggcauccccuacugcaacuacagcaaguucugcuaccugaacaacaccaccaccggcagaaccagccugcccagaugcugccugaucagcaacggcagcuaccugaacgagacccacuucagcgacgacaucgagcagcaggccgacaacaugaucaccgagaugcugcagaaggaguacauggacagacagggcaagaccccccugggccugguggaccuguucguguucagcaccagcuucuaccugaucaccaucuuccugcaccuggugaagauccccacccacagacacaucgugggcaagcccugccccaagccccacagacugaaccacaugggcaucugcagcugcggccuguacaagcagcccggcgugcccgugagauggaagagaugaggacuaguuauaagacugacuagcccgaugggccucccaacgggcccuccuccccuccuugcaccgagauuaaucaaaggcucuuuucagagccaccaaaaaaaaaaaaaaaaaaaaaaaaaaaaaaaaaaaaaaaaaaaaaaaaaaaaaaaaaaaaaaaaaaaaaaaaaaaaaaaaaaaaaaaaaaaaaaaaaaaaa

SEQ ID NO: 34636 - RNA, 1686 nt, Artificial Sequence; identical to SEQ ID NO: 34630
  mRNA product Design i-3 (hSL-A100) comprising derived and/or modified sequence from LASV(Pinneo-NIG-1969;Clade I)__AIT17836__GPCmut8 (opt4)

SEQ ID NO: 34637 - RNA, 1686 nt, Artificial Sequence
  mRNA product Design i-3 (hSL-A100) comprising derived and/or modified sequence from LASV(ISTH0009-NIG-2011;Clade II)__AIT17404__GPCmut8 (opt4)
aggagaaagcuuaccaugggccagaucaucaccuucuuccaggaggugccccacgugaucgaggaggugaugaacaucgugcugaucgcccugagccugcuggccauccugaagggcaucuacaacguggccaccugcggccuguucggccuggugagcuuccugcugcugugcggcagaagcugcagcaccaccuacaagggcguguacgagcugcagacccuggagcuggacauggccagccugaacaugugcaugccccugagcugcaccaagaacaacagccaccacuacaucauggugggcaacgagaccggccuggagcugacccugaccaacaccagcaucaucaaccacaaguucugcaaccugagcgacgcccacaagaagaaccuguacgaccacgcccugaugagcaucaucagcaccuuccaccugagcauccccaacuucaaccaguacgaggccaugagcugcgacuucaacggcggcaagaucagcgugcaguacaaccugagccacgccuacgccguggacgccgccaaccacugcggcaccaucgccaacggcgugcugcagaccuucaugagaauggccuggggcggcagcuacaucgcccuggacagcggcaagggcagcugggacugcaucaugaccagcuaccaguaccugaucauccagaacaccaccugggaggaccacugccaguucagcagacccagccccaucggcuaccugggccugcugagccagagaaccagagacaucuacaucagcagaagacugcugggcaccuucaccuggacccugagcgacagcgagggcaacgagacccccggcggcuacugccugaccagauggaugcugaucgaggccgagcugaagugcuucggcaacaccgccguggccaagugcaacgagaagcacgacgaggaguucugcgacaugcugagacuguucgacuucugcaagcaggccaucagaagacugaagacccccgcccagaugagcauccagcugaucaacaaggccgugaacgcccugaucaacgaccagcugaucaugaagaaccaccugagagacaucaugggcauccccuacugcaacuacagcaaguacugcuaccugaaccacaccgugaccggcaagaccagccugcccagaugcugccuggugagcaacggcagcuaccugaacgagacccacuucagcgacgacaucgagcagcaggccgacaacaugaucaccgagcugcugcagaaggaguacauggacagacagggcaagaccccccugggccugguggaccuguucguguucagcaccagcuucuaccugaucagcaucuuccugcaccugaucaagauccccacccacagacacaucaccggcaagcccugccccaagccccacagacugaaccacaugggcaucugcagcugcggccuguacaagcaccccggcgugcccgugaaguggaagagaugaggacuaguuauaagacugacuagcccgaugggccucccaacgggcccuccuccccuccuugcaccgagauuaaucaaaggcucuuuucagagccaccaaaaaaaaaaaaaaaaaaaaaaaaaaaaaaaaaaaaaaaaaaaaaaaaaaaaaaaaaaaaaaaaaaaaaaaaaaaaaaaaaaaaaaaaaaaaaaaaaaaaa

SEQ ID NO: 34638 - RNA, 1686 nt, Artificial Sequence
  mRNA product Design i-3 (hSL-A100) comprising derived and/or modified sequence from LASV(ISTH2010-NIG-2012;Clade II)__AIT17482__GPCmut8 (opt4)
aggagaaagcuuaccaugggccagaucaucaccuucuuccaggaggugccccacgugaucgaggaggugaugaacaucgugcugaucgcccugagccugcuggccauccugaagggcaucuacaacguggccaccugcggccuguucggccuggugagcuuccugcugcugugcggcagaagcugcagcaccaccuacaagggcguguacgagcugcagacccuggagcuggacauggccagccugaacaugugcaugccccugagcugcaccaagaacaacagccaccacuacaucauggugggcaacgagaccggccuggagcugacccugaccaacaccagcaucaucaaccacaaguucugcaaccugagcgacgcccacaagaagaaccuguacgaccacgcccugaugagcaucaucagcaccuuccaccugagcauccccaacuucaaccaguacgaggccaugagcugcgacuucaacggcggcaagaucagcgugcaguacaaccugagccacgccuacgccguggacgccgccaaccacugcggcaccaucgccaacggcgugcugcagaccuucaugagaauggccuggggcggcagcuacaucgcccuggacagcggcaagggcagcugggacugcaucaugaccagcuaccaguaccugaucauccagaacaucaccugggaggaccacugccaguucagcagacccagccccaucggcuaccugggccugcugagccagagaaccagagacaucuacaucagcagaagacugcugggcaccuucaccuggacccugagcgacagcgagggcaacgagacccccggcggcuacugccugaccagauggaugcugaucgaggccgagcugaagugcuucggcaacaccgccguggccaagugcaacgagaagcacgacgaggaguucugcgacaugcugagacuguucgacuucugcaagcaggccaucagaagacugaagacccccgcccagaugagcauccagcugaucaacaaggccgugaacgcccugaucaacgaccagcugaucaugaagaaccaccugagagacaucaugggcauccccuacugcaacuacagcaaguacugcuaccugaaccacaccgugaccggcaagaccagccugcccagaugcugccuggugagcaacggcagcuaccugaacgagacccacuucagcgacgacaucgagcagcaggccgacaacaugaucaccgagcugcugcagaaggaguacaucgacagacagggcaagaccccccugggccugguggaccuguucguguucagcaccagcuucuaccugaucagcaucuuccugcaccuggugaagauccccacccacagacacguggugggcaagcccugccccaagccccacagacugaaccacaugggcaucugcagcugcggccuguacaagcaccccggcgugcccgugaaguggaagagaugaggacuaguuauaagacugacuagcccgaugggccucccaacgggcccuccuccccuccuugcaccgagauuaaucaaaggcucuuuucagagccaccaaaaaaaaaaaaaaaaaaaaaaaaaaaaaaaaaaaaaaaaaaaaaaaaaaaaaaaaaaaaaaaaaaaaaaaaaaaaaaaaaaaaaaaaaaaaaaaaaaaaa

SEQ ID NO: 34639 - RNA, 1686 nt, Artificial Sequence
  mRNA product Design i-3 (hSL-A100) comprising derived and/or modified sequence from LASV(Lassa virus/H.sapiens-wt/NGA/2015/ISTH_0543;Clade II)__AVO03639__GPCmut8 (opt4)
aggagaaagcuuaccaugggccagaucaucaccuucuuccaggaggugccccacgugaucgaggaggugaugaacaucgugcugaucgcccugagccugcuggccauccugaagggcaucuacaacguggccaccugcggccuguucggccuggugagcuuccugcugcugugcggcagaagcugcagcaccaccuacaagggcguguacgagcugcagacccuggagcuggacauggccaaccugaacaugugcaugccccugagcugcaccaagaacaacagccaccacuacaucauggugggcaacgagaccggccuggagcugacccugaccaacaccagcaucaucaaccacaaguucugcaaccugagcgacgcccacaagaagaaccuguacgaccacgcccugaugagcaucaucagcaccuuccaccugagcauccccaacuucaaccaguacgaggccaugagcugcgacuucaacggcggcaagaucagcgugcaguacaaccugagccacaccuacgccguggacgccgccaaccacugcggcaccaucgccaacggcgugcugcagaccuucaugagaauggccuggggcggcagcuacaucgcccuggacagcggcaagggcagcugggacugcaucaugaccagcuaccaguaccuggugauccagaacaccaccugggaggaccacugccaguucagcagacccagccccaucggcuaccugggccugcugagccagagaaccagagacaucuacaucagcagaagacugcugggcaccuucaccuggacccugagcgacagcgagggcaacgagacccccggcggcuacugccugaccagauggaugcugaucgaggccgagcugaagugcuucggcaacaccgccguggccaagugcaacgagaagcacgacgaggaguucugcgacaugcugagacuguucgacuucugcaagcaggccaucagaagacugaagacccccgcccagaugagcauccagcugaucaacaaggccgugaacgcccugaucaacgaccagcugaucaugaagaaccaccugagagacaucaugggcauccccuacugcaacuacagcaaguacugcuaccugaaccacaccgugaccggcaagaccagccugcccagaugcugccuggugagcaacggcagcuaccugaacgagacccacuucagcgacgacaucgagcagcaggccgacaacaugaucaccgagcugcugcagaaggaguacaucgacagacagggcaagaccccccugggccugguggaccuguucguguucagcaccagcuucuaccugaucagcaucuuccugcaccuggugaagauccccacccacagacacaucaccggcaagcccugccccaagccccacagacugaaccacaugggcaucugcagcugcggccuguacaagcaccccggcgugcccgugaaguggaagagaugaggacuaguuauaagacugacuagcccgaugggccucccaacgggcccuccuccccuccuugcaccgagauuaaucaaaggcucuuuucagagccaccaaaaaaaaaaaaaaaaaaaaaaaaaaaaaaaaaaaaaaaaaaaaaaaaaaaaaaaaaaaaaaaaaaaaaaaaaaaaaaaaaaaaaaaaaaaaaaaaaaaaa

SEQ ID NO: 34640 - RNA, 1686 nt, Artificial Sequence
  mRNA product Design i-3 (hSL-A100) comprising derived and/or modified sequence from LASV(Lassa virus/H.sapiens-wt/NGA/2016/ISTH_0009;Clade II)__AVO03571__GPCmut8 (opt4)
aggagaaagcuuaccaugggccagaucaucaccuucuuccaggaggugccccacgugaucgaggaggugaugaacaucgugcugaucgcccugagccugcuggccauccugaagggcaucuacaacguggccaccugcggccugcugggccuggugagcuuccugcugcugugcggcagaagcugcagcaccaccuacaagggcguguacgagcugcagacccuggagcuggacauggccagccugaacaugugcaugccccugagcugcaccaagaacaacagccaccacuacaucauggugggcaacgagaccggccuggagcugacccugaccaacaccagcaucaucaaccacaaguucugcaaccugagcgacgcccacaagaagaaccuguacgaccacgcccugaugagcaucaucagcaccuuccaccugagcauccccaacuucaaccaguacgaggccaugagcugcgacuucaacggcggcagaaucagcgugcaguacaaccugagccacagcuacgccguggacgccgccaaccacugcggcaccaucgccaacggcgugcugcagaccuucaugagaauggccuggggcggcagcuacaucgcccuggacagcggcaagggcagcugggacugcaucaugaccagcuaccaguaccugaucauccagaacaccaccugggaggaccacugccaguucagcagacccagccccaucggcuaccugggccugcugagccagagaaccagagacaucuacaucagcagaagacugcugggcaccuucaccuggacccugagcgacagcgagggcaacgagacccccggcggcuacugccugaccagauggaugcugaucgaggccgagcugaagugcuucggcaacaccgccguggccaagugcaacgagaagcacgacgaggaguucugcgacaugcugagacuguucgacuucugcaagcaggccaucagaagacugaagacccccgcccagaugagcauccagcugaucaacaaggccgugaacgcccugaucaacgaccagcugaucaugaagaaccaccugagagacaucaugggcauccccuacugcaacuacagcaaguacugcuaccugaaccacaccgugaccggcaagaccagccugcccagaugcugccuggugagcaacggcagcuaccugaacgagacccacuucagcgacgacaucgagcagcaggccgacaacaugaucaccgagcugcugcagaaggaguacaucgacagacagggcaagaccccccugggccugguggaccuguucguguucagcaccagcuucuaccugaucagcaucuuccugcaccuggugaagauccccacccacagacacaucaccggcaagcccugccccaagccccacagacugaaccacaugggcaucugcagcugcggccuguacaaccaccccggcgugcccgugaaguggaagagaugaggacuaguuauaagacugacuagcccgaugggccucccaacgggcccuccuccccuccuugcaccgagauuaaucaaaggcucuuuucagagccaccaaaaaaaaaaaaaaaaaaaaaaaaaaaaaaaaaaaaaaaaaaaaaaaaaaaaaaaaaaaaaaaaaaaaaaaaaaaaaaaaaaaaaaaaaaaaaaaaaaaaa

SEQ ID NO: 34641 - RNA, 1686 nt, Artificial Sequence
  mRNA product Design i-3 (hSL-A100) comprising derived and/or modified sequence from LASV(Lassa virus/H.sapiens-wt/NGA/2016/ISTH_0017;Clade II)__AVO03567__GPCmut8 (opt4)
aggagaaagcuuaccaugggccagaucaucaccuucuuccaggaggugccccacgugaucgaggaggugaugaacaucgugcugaucgcccugagccugcuggccauccugaagggcaucuacaacguggccaccugcggccuguucggccuggugagcuuccugcugcugugcggcagaagcugcagcaccaccuacaagggcguguacgagcugcagacccuggagcuggacauggccagccugaacaugugcaugccccugagcugcaccaagaacaacagccaccacuacaucauggugggcaacgagaccggccuggagcugacccugaccaacaccagcaucaucaaccacaaguucugcaaccugagcgacgcccacaagaagaaccuguacgaccacgcccugaugagcaucaucagcaccuuccaccugagcauccccaacuucaaccaguacgaggccaugagcugcgacuucaacggcggcaagaucagcgugcaguacaaccugagccacaccuacgccaucgacgccgccaaccacugcggcaccaucgccaacggcgugcugcagaccuucaugagaauggccuggggcggcagcuacaucgcccuggacagcggcaagggcagcugggacugcaucaugaccagcuaccaguaccugaucauccagaacaccaccugggaggaccacugccaguucagcagacccagccccaucggcuaccugggccugcugagccagagaaccagagacaucuacaucagcagaagacugcugggcaccuucaccuggacccugagcgacagcgagggcaacgagacccccggcggcuacugccugaccagauggaugcugaucgaggccgagcugaagugcuucggcaacaccgccguggccaagugcaacgagaagcacgacgaggaguucugcgacaugcugagacuguucgacuucugcaagcaggccaucagaagacugaagacccccgcccagaugagcauccagcugaucaacaaggccgugaacgcccugaucaacgaccagcugaucaugaagaaccaccugagagacaucaugggcauccccuacugcaacuacagcaaguacugcuaccugaaccacaccgugaccggcaagaccagccugcccagaugcugccuggugagcaacggcagcuaccugaacgagacccacuucagcgacgacaucgagcagcaggccgacaacaugaucaccgagcugcugcagaaggaguacauggacagacagggcaagaccccccugggccugguggaccuguucguguucagcaccagcuucuaccugaucagcaucuuccugcaccuggugagaauccccacccacagacacgugaucggcaagcccugccccaagccccacagacugaaccacaugggcaucugcagcugcggccuguacaagcaccccggcgugcccgugaaguggaagagaugaggacuaguuauaagacugacuagcccgaugggccucccaacgggcccuccuccccuccuugcaccgagauuaaucaaaggcucuuuucagagccaccaaaaaaaaaaaaaaaaaaaaaaaaaaaaaaaaaaaaaaaaaaaaaaaaaaaaaaaaaaaaaaaaaaaaaaaaaaaaaaaaaaaaaaaaaaaaaaaaaaaaa

SEQ ID NO: 34642 - RNA, 1686 nt, Artificial Sequence
  mRNA product Design i-3 (hSL-A100) comprising derived and/or modified sequence from LASV(Lassa virus/H.sapiens-wt/NGA/2018/ISTH_0959;Clade II)__AVV65099__GPCmut8 (opt4)
aggagaaagcuuaccaugggccagaucaucaccuucuuccaggaggugccccacgugaucgaggaggugaugaacaucgugcugaucgcccugagccugcuggccauccugaagggcaucuacaacguggugaccugcggccuguucggccuggugagcuuccugcugcugugcggcagaagcugcagcaccaccuacaagggcguguacgagcugcagacccuggagcuggacauggccagccugaacaugugcaugccccugagcugcaccaagaacaacagccaccacuacaucauggugggcaacgagaccggccuggagcugacccugaccaacaccagcaucaucaaccacaaguucugcaaccugagcgacgcccacaagaagaaccuguacgaccacgcccugaugagcaucaucagcaccuuccaccugagcauccccaacuucaaccaguacgaggccaugagcugcgacuucaacggcggcaagaucagcgugcaguacaaccugagccacgccuacgccaucgacgccgccaaccacugcggcaccaucgccaacggcgugcugcagaccuucaugagaauggccuggggcggcagcuacaucgcccuggacagcggcaagggcagcugggacugcaucaugaccagcuaccaguaccugaucauccagaacaccaccugggaggaccacugccaguucagcagacccagccccaucggcuaccugggccugcugagccagagaaccagagacaucuacaucagcagaagacugcugggcaccuucaccuggacccugagcgacagcgagggcaacgagacccccggcggcuacugccugaccagauggaugcugaucgaggccgagcugaagugcuucggcaacaccgccguggccaagugcaacgagaagcacgacgaggaguucugcgacaugcugagacuguucgacuucugcaagcaggccaucagaagacugaagacccccgcccagaugagcauccagcugaucaacaaggccgugaacgcccugaucaacgaccagcugaucaugaagaaccaccugagagacaucaugggcauccccuacugcaacuacagcaaguacugcuaccugaaccacaccgugaccggcaagaccagccugcccagaugcugccuggugagcaacggcagcuaccugaacgagacccacuucagcgacgacaucgagcagcaggccgacaacaugaucaccgagcugcugcagaaggaguacaucgacagacagggcaagaccccccugggccugguggaccuguucguguucagcaccagcuucuaccugaucagcaucuuccugcaccuggugaagauccccacccacagacacgugaucggcaagcccugccccaagccccacagacugaaccacaugggcaucugcagcugcggccuguacaagcaccccggcgugcccgugaaguggaagagaugaggacuaguuauaagacugacuagcccgaugggccucccaacgggcccuccuccccuccuugcaccgagauuaaucaaaggcucuuuucagagccaccaaaaaaaaaaaaaaaaaaaaaaaaaaaaaaaaaaaaaaaaaaaaaaaaaaaaaaaaaaaaaaaaaaaaaaaaaaaaaaaaaaaaaaaaaaaaaaaaaaaaa

SEQ ID NO: 34643 - RNA, 1686 nt, Artificial Sequence
  mRNA product Design i-3 (hSL-A100) comprising derived and/or modified sequence from LASV(LASV003-NIG-2008;Clade II)__AIT17580__GPCmut8 (opt4)
aggagaaagcuuaccaugggccagaucaucaccuucuuccaggaggugccccacgugaucgaggaggugaugaacaucgugcugaucgcccugagccugcuggccauccugaagggcaucuacaacguggccaccugcggccuguucggccuggugagcuuccugcugcugugcggcagaagcugcagcaccaccuacaagggcguguacgagcugcagacccuggagcuggacauggccagccugaacaugugcaugccccugagcugcaccaagaacaacagccaccacuacaucauggugggcaacgagaccggccuggagcugacccugaccaacaccagcaucaucaaccacaaguucugcaaccugagcgacgcccacaagaagaaccuguacgaccacgcccugaugagcaucaucagcaccuuccaccugagcauccccaacuucaaccaguacgaggccaugagcugcgacuucaacggcggcaagaucagcgugcaguacaaccugagccacaccuacgccguggacgccgccaaccacugcggcaccaucgccaacggcgugcugcagaccuucaugagaauggccuggggcggcagcuacaucgcccuggacagcggcaagggcagcugggacugcaucaugaccagcuaccaguaccugaucauccagaacaccaccugggaggaccacugccaguucagcagacccagccccaucggcuaccugggccugcugagccagagaaccagagacaucuacaucagcagaagacugcugggcaccuucaccuggacccugagcgacagcgagagcaacgagacccccggcggcuacugccugaccagauggaugcugaucgaggccgagcugaagugcuucggcaacaccgccguggccaagugcaacgagaagcacgacgaggaguucugcgacaugcugagacuguucgacuucugcaagcaggccaucagaagacugaaggcccccgcccagaugagcauccagcugaucaacaaggccgugaacgcccugaucaacgaccagcugaucaugaagaaccaccugagagacaucaugggcauccccuacugcaacuacagcaaguacugcuaccugaaccacaccgugaccggcagaaccagccugcccagaugcugccuggugagcaacggcagcuaccugaacgagacccacuucagcgacgacaucgagcagcaggccgacaacaugaucaccgagcugcugcagaaggaguacauggacagacagggcaagaccccccugggccugguggaccuguucguguucagcaccagcuucuaccugaucagcaucuuccugcaccuggugaagauccccacccacagacacgugaucggcaagcccugccccaagccccacagacugaaccacaugggcaucugcagcugcggccuguacaagcaccccggcgugcccgugaaguggaagagaugaggacuaguuauaagacugacuagcccgaugggccucccaacgggcccuccuccccuccuugcaccgagauuaaucaaaggcucuuuucagagccaccaaaaaaaaaaaaaaaaaaaaaaaaaaaaaaaaaaaaaaaaaaaaaaaaaaaaaaaaaaaaaaaaaaaaaaaaaaaaaaaaaaaaaaaaaaaaaaaaaaaaa

SEQ ID NO: 34644 - RNA, 1686 nt, Artificial Sequence
  mRNA product Design i-3 (hSL-A100) comprising derived and/or modified sequence from LASV(LASV035-NIG-2009;Clade II)__AIT17588__GPCmut8 (opt4)
aggagaaagcuuaccaugggccagaucaucaccuucuuccaggaggugccccacgugaucgaggaggugaugaacaucgugcugaucgcccugagccugcuggccauccugaagggcaucuacaacguggccaccugcggccuguucggccuggugagcuuccugcugcugugcggcagaagcugcagcaccaccuacaagggcguguacgagcugcagacccuggagcuggacauggccagccugaacaugugcaugccccugagcugcaccaagaacaacagccaccacuacaucauggugggcaacgagaccggccuggagcugacccugaccaacaccagcaucaucaaccacaaguucugcaaccugagcgacgcccacaagaagaaccuguacgaccacgcccugaugagcaucaucagcaccuuccaccugagcauccccaacuucaaccaguacgaggccaugagcugcgacuucaacggcggcaagaucagcgugcaguacaaccugagccacgccuacgccguggacgccgccaaccacugcggcaccaucgccaacggcgugcugcagaccuucaugagaauggccuggggcggcagcuacaucgcccuggacagcggcaagggcagcugggacugcaucaugaccagcuaccaguaccugaucauccagaacaccaccugggaggaccacugccaguucagcagacccagccccaucggcuaccugggccugcugagccagagaaccagagacaucuacaucagcagaagacugcugggcaccuucaccuggacccugagcgacagcgagggcaacgagacccccggcggcuacugccugaccagauggaugcugaucgaggccgagcugaagugcuucggcaacaccgccguggccaagugcaacgagaagcacgacgaggaguucugcgacaugcugagacuguucgacuucugcaagcaggccaucagaagacugaaggcccccgcccagaugagcauccagcugaucaacaaggccgugaacgcccugaucaacgaccagcugaucaugaagaaccaccugagagacaucaugggcauccccuacugcaacuacagcaaguacugcuaccugaaccacaccgugaccggcaagaccagccugcccagaugcugccuggugagcaacggcagcuaccugaacgagacccacuucagcgacgacaucgagcagcaggccgacaacaugaucaccgagcugcugcagaaggaguacaucgacagacagggcaagaccccccugggccugguggaccuguucguguucagcaccagcuucuaccugaucagcaucuuccugcaccuggugaagauccccacccacagacacgugaucggcaagcccugccccaagccccacagacugaaccacaugggcaucugcagcugcggccuguacaagcaccccggcgugcccgugaaguggaagagaugaggacuaguuauaagacugacuagcccgaugggccucccaacgggcccuccuccccuccuugcaccgagauuaaucaaaggcucuuuucagagccaccaaaaaaaaaaaaaaaaaaaaaaaaaaaaaaaaaaaaaaaaaaaaaaaaaaaaaaaaaaaaaaaaaaaaaaaaaaaaaaaaaaaaaaaaaaaaaaaaaaaaa

SEQ ID NO: 34645 - RNA, 1686 nt, Artificial Sequence
  mRNA product Design i-3 (hSL-A100) comprising derived and/or modified sequence from LASV(LASV1000-NIG-2009;Clade II)__AIT17782__GPCmut8 (opt4)
aggagaaagcuuaccaugggccagaucaucaccuucuuccaggaggugccccacgugaucgaggaggugaugaacaucgugcugaucgcccugagccugcuggccauccugaagggcaucuacaacguggccaccugcggccuguucggccuggugagcuuccugcugcugugcggcagaagcugcagcaccaccuacaagggcguguacgagcugcagacccuggagcuggacauggccagccugaacaugugcaugccccugagcugcaccaagaacaacagccaccacuacaucauggugggcaacgagaccggccuggagcugacccugaccaacaccagcaucaucaaccacaaguucugcaaccugagcgacgcccacaagaagaaccuguacgaccacgcccugaugagcaucaucagcaccuuccaccugagcauccccaacuucaaccaguacgaggccaugagcugcgacuucaacggcggcaagaucagcgugcaguacaaccugagccacaccuacgccguggacgccgccaaccacugcggcaccaucgccaacggcgugcugcagaccuucaugagaauggccuggggcggcagcuacaucgcccuggacagcggcaagggcagcugggacugcaucaugaccagcuaccaguaccugaucauccagaacaccaccugggaggaccacugccaguucagcagacccagccccaucggcuaccugggccugcugagccagagaaccagagacaucuacaucagcagaagacugcugggcaccuucaccuggacccugagcgacagcgagggcaacgagacccccggcggcuacugccugaccagauggaugcugaucgaggccgagcugaagugcuucggcaacaccgccguggccaagugcaacgagaagcacgacgaggaguucugcgacaugcugagacuguucgacuucugcaagcaggccaucaagagacugaagacccccgcccagaugagcauccagcugaucaacaaggccgugaacgcccugaucaacgaccagcugaucaugaagaaccaccugagagacaucaugggcauccccuacugcaacuacagcaaguacugcuaccugaaccacaccgugaccggcaagaccagccugcccagaugcugccuggugagcaacggcagcuaccugaacgagacccacuucagcgacgacaucgagcagcaggccgacaacaugaucaccgagcugcugcagaaggaguacaucgacagacagggcaagaccccccugggccugguggaccuguucguguucagcaccagcuucuaccugaucagcaucuuccugcaccuggugaagauccccacccacagacacguggugggcaagcccugccccaagccccacagacugaaccacaugggcaucugcagcugcggccuguacaagcaccccggcgugcccgugaaguggaagagaugaggacuaguuauaagacugacuagcccgaugggccucccaacgggcccuccuccccuccuugcaccgagauuaaucaaaggcucuuuucagagccaccaaaaaaaaaaaaaaaaaaaaaaaaaaaaaaaaaaaaaaaaaaaaaaaaaaaaaaaaaaaaaaaaaaaaaaaaaaaaaaaaaaaaaaaaaaaaaaaaaaaaa

SEQ ID NO: 34646 - RNA, 1686 nt, Artificial Sequence
  mRNA product Design i-3 (hSL-A100) comprising derived and/or modified sequence from LASV(LASV221-NIG-2010;Clade II)__AIT17624__GPCmut8 (opt4)
aggagaaagcuuaccaugggccagaucaucaccuucuuccaggaggugccccacgugaucgaggaggugaugaacaucgugcugaucgcccugagccugcuggccauccugaagggcaucuacaacguggccaccugcggccuguucggccuggugagcuuccugcugcugugcggcagaagcugcagcaccaccuacaagggcguguacgagcugcagacccuggagcuggacauggccagccugaacaugugcaugccccugagcugcaccaagaacaacagccaccacuacaucauggugggcaacgagaccggccuggagcugacccugaccaacaccagcaucaucaaccacaaguucugcaaccugagcgacgcccacaagaagaaccuguacgaccacgcccugaugagcaucaucagcaccuuccaccugagcauccccaacuucaaccaguacgaggccaugagcugcgacuucaacggcggcaagaucagcgugcaguacaaccugagccacaccuacgccaucgacgccgccaaccacugcggcaccaucgccaacggcgugcugcagaccuucaugagaauggccuggggcggcagcuacaucgcccuggacagcggcaagggcagcugggacugcaucaugaccagcuaccaguaccugaucauccagaacaccaccugggaggaccacugccaguucagcagacccagccccaucggcuaccugggccugcugagccagagaaccagagacaucuacaucagcagaagacugcugggcaccuucaccuggacccugagcgacagcgagggcaacgagacccccggcggcuacugccugaccagauggaugcugaucgaggccgagcugaagugcuucggcaacaccgccguggccaagugcaacgagaagcacgacgaggaguucugcgacaugcugagacuguucgacuucugcaagcaggccaucagaagacugaagacccccgcccagaugagcauccagcugaucaacaaggccgugaacgcccugaucaacgaccagcugaucaugaagaaccaccugagagacaucaugggcauccccuacugcaacuacagcaaguacugcuaccugaaccacaccgugaccggcaagaccagccugcccagaugcugccuggugagcaacggcagcuaccugaacgagacccacuucagcgacgacaucgagcagcaggccgacaacaugaucaccgagaugcugcagaaggaguacauggacagacagggcaagaccccccugggccugguggaccuguucguguucagcaccagcuucuaccugaucagcaucuuccugcaccuggugaagauccccacccacagacacgugaucggcaagcccugccccaagccccacagacugaaccacaugggcaucugcagcugcggccuguacaagcaccccggcgugcccgugaaguggaagagaugaggacuaguuauaagacugacuagcccgaugggccucccaacgggcccuccuccccuccuugcaccgagauuaaucaaaggcucuuuucagagccaccaaaaaaaaaaaaaaaaaaaaaaaaaaaaaaaaaaaaaaaaaaaaaaaaaaaaaaaaaaaaaaaaaaaaaaaaaaaaaaaaaaaaaaaaaaaaaaaaaaaaa

SEQ ID NO: 34647 - RNA, 1686 nt, Artificial Sequence
  mRNA product Design i-3 (hSL-A100) comprising derived and/or modified sequence from LASV(LASV237-NIG-2010;Clade II)__AIT17638__GPCmut8 (opt4)
aggagaaagcuuaccaugggccagaucaucaccuucuuccaggaggugccccacgugaucgaggaggugaugaacaucgugcugaucgcccugagccugcuggccauccugaagggcaucuacaacguggccaccugcggccuguucggccuggugagcuuccugcugcugugcggcagaagcugcagcaccaccuacaagggcguguacgagcugcagacccuggagcuggacauggccagccugaacaugugcaugccccugagcugcaccaagaacaacagccaccacuacaucauggugggcaacgagaccggccuggagcugacccugaccaacaccagcaucaucaaccacaaguucugcaaccugagcgacgcccacaagaaggaccuguacgaccacgcccugaugagcaucaucagcaccuuccaccugagcauccccaacuucaaccaguacgaggccaugagcugcgacuucaacggcggcaagaucagcgugcaguacaaccugagccacaccuacgccguggacgccgccaaccacugcggcaccaucgccaacggcgugcugcagaccuucaugagaauggccuggggcggcagcuacaucgcccuggacagcggcaagggcagcugggacugcaucaugaccagcuaccaguaccugaucauccagaacaccaccugggaggaccacugccaguucagcagacccagccccaucggcuaccugggccugcugagccagagaaccagagacaucuacaucagcagaagacugcugggcaccuucaccuggacccugagcgacagcgagggcaacgagacccccggcggcuacugccugaccagauggaugcugaucgaggccgagcugaagugcuucggcaacaccgccguggccaagugcaacgagaagcacgacgaggaguucugcgacaugcugagacuguucgacuucugcaagcaggccaucagaagacugaagacccccgcccagaugagcauccagcugaucaacaaggccgugaacgcccugaucaacgaccagcugaucaugaagaaccaccugagagacaucaugggcauccccuacugcaacuacagcaaguacugcuaccugaaccacaccgugaccggcaagaccagccugcccagaugcugccuggugagcaacggcagcuaccugaacgagacccacuucagcgacgacaucgagcagcaggccgacaacaugaucaccgagcugcugcagaaggaguacauggacagacagggcaagaccccccugggccugguggaccuguucguguucagcaccagcuucuaccugaucagcaucuuccugcaccugaucaagauccccacccacagacacaucaccggcaagcccugccccaagccccacagacugaaccacaugggcaucugcagcugcggccuguacaagcaccccggcgugcccgugaaguggaagagaugaggacuaguuauaagacugacuagcccgaugggccucccaacgggcccuccuccccuccuugcaccgagauuaaucaaaggcucuuuucagagccaccaaaaaaaaaaaaaaaaaaaaaaaaaaaaaaaaaaaaaaaaaaaaaaaaaaaaaaaaaaaaaaaaaaaaaaaaaaaaaaaaaaaaaaaaaaaaaaaaaaaaa

SEQ ID NO: 34648 - RNA, 1686 nt, Artificial Sequence
  mRNA product Design i-3 (hSL-A100) comprising derived and/or modified sequence from LASV(LASV253-NIG-2011;Clade II)__AIT17670__GPCmut8 (opt4)
aggagaaagcuuaccaugggccagaucaucaccuucuuccaggaggugccccacgugaucgaggaggugaugaacaucgugcugaucgcccugagccugcuggccauccugaagggcaucuacaacguggccaccugcggccuguucggccuggugagcuuccugcugcugugcggcagaagcugcagcaccaccuacaagggcguguacgagcugcagacccuggagcuggacauggccagccugaacaugugcaugccccugagcugcaccaagaacaacagccaccacuacaucauggugggcaacgagaccggccuggagcugacccugaccaacaccagcaucaucaaccacaaguucugcaaccugagcgacgcccacaagaagaaccuguacgaccacgcccugaugagcaucaucagcaccuuccaccugagcauccccaacuucaaccaguacgaggccaugagcugcgacuucaacggcggcaagaucagcgugcaguacaaccugagccacaccuacgccguggacgccgccaaccacugcggcaccaucgccaacggcgugcugcagaccuucaugagaauggccuggggcggcagcuacaucgcccuggacagcggcaagggcagcugggacugcaucaugaccagcuaccaguaccugaucauccagaacaccaccugggaggaccacugccaguucagcagacccagccccaucggcuaccugggccugcugagccagagaaccagagacaucuacaucagcagaagacugcugggcaccuucaccuggacccugagcgacagcgagggcaacgagacccccggcggcuacugccugaccagauggaugcugaucgaggccgagcugaagugcuucggcaacaccgccguggccaagugcaacgagaagcacgacgaggaguucugcgacaugcugagacuguucgacuucugcaagcaggccaucagaagacugaaggcccccgcccagaugagcauccagcugaucaacaaggccgugaacgcccugaucaacgaccagcugaucaugaagaaccaccugagagacaucaugggcauccccuacugcaacuacagcaaguacugcuaccugaaccacaccgugaccggcagaaccagccugcccagaugcugccuggugagcaacggcagcuaccugaacgagacccacuucagcgacgacaucgagcagcaggccgacaacaugaucaccgagcugcugcagaaggaguacaucgacagacagggcaagaccccccugggccugguggaccuguucguguucagcaccagcuucuaccugaucagcaucuuccugcaccuggugaagauccccacccacagacacaucaucggcaagcccugccccaagccccacagacugaaccacaugggcaucugcagcugcggccuguacaagcaccccggcgugcccgugaaguggaagagaugaggacuaguuauaagacugacuagcccgaugggccucccaacgggcccuccuccccuccuugcaccgagauuaaucaaaggcucuuuucagagccaccaaaaaaaaaaaaaaaaaaaaaaaaaaaaaaaaaaaaaaaaaaaaaaaaaaaaaaaaaaaaaaaaaaaaaaaaaaaaaaaaaaaaaaaaaaaaaaaaaaaaa

SEQ ID NO: 34649 - RNA, 1686 nt, Artificial Sequence
  mRNA product Design i-3 (hSL-A100) comprising derived and/or modified sequence from LASV(LASV254-NIG-2011;Clade II)__AIT17674__GPCmut8 (opt4)
aggagaaagcuuaccaugggccagaucaucaccuucuuccaggaggugccccacgugaucgaggaggugaugaacaucgugcugaucgcccugagccugcuggccauccugaagggcaucuacaacguggccaccugcggccuguucggccuggugagcuuccugcugcugugcggcagaagcugcagcaccaccuacaagggcguguacgagcugcagacccuggagcuggacaugaccaaccugaacaugugcaugccccugagcugcaccaagaacaacagccaccacuacaucauggugggcaacgagaccggccuggagcugacccugaccaacaccagcaucaucaaccacaaguucugcaaccugagcgacgcccacaagaagaaccuguacaaccacgcccugaugagcaucaucagcaccuuccaccugagcauccccaacuucaaccaguacgaggccaugagcugcgacuucaacggcggcaagaucagcgugcaguacaaccugagccacagcuacgccguggacgccgccaaccacugcggcaccaucgccaacggcgugcugcagaccuucaugagaauggccuggggcggcagcuacaucgcccuggacagcggcaagggcaacugggacugcaucaugaccagcuaccaguaccugaucauccagaacaccaccugggaggaccacugccaguucagcagacccagccccaucggcuaccugggccugcugagccagagaaccagagacaucuacaucagcagaagacugcugggcaccuucaccuggacccugagcgacagcgagggcaacgagacccccggcggcuacugccugaccagauggaugcugaucgaggccgagcugaagugcuucggcaacaccgccguggccaagugcaacgagaagcacgacgaggaguucugcgacaugcugagacuguucgacuucugcaagcaggccaucagaagacugaagacccccgcccaggccaacauccagcugaucaacaaggccgugaacgcccugaucaacgaccagcugaucaugaagaaccaccugagagacaucaugggcauccccuacugcaacuacagcaaguacugcuaccugaaccacaccgugaccggcaagaccagccugcccagaugcugccuggugagcaacggcagcuaccugaacgagacccacuucagcgacgacaucgagcagcaggccgacaacaugaucaccgagcugcugcagaaggaguacauggacagacagggcaagaccccccugggccugguggaccuguucguguucagcaccagcuucuaccugaucagcaucuuccugcaccuggugaagauccccacccacagacacgugaucggcaagcccugccccaagccccacagacugaaccacaugggcaucugcagcugcggccuguacaagcaccccggcgugcccgugaaguggaagagaugaggacuaguuauaagacugacuagcccgaugggccucccaacgggcccuccuccccuccuugcaccgagauuaaucaaaggcucuuuucagagccaccaaaaaaaaaaaaaaaaaaaaaaaaaaaaaaaaaaaaaaaaaaaaaaaaaaaaaaaaaaaaaaaaaaaaaaaaaaaaaaaaaaaaaaaaaaaaaaaaaaaaa

SEQ ID NO: 34650 - RNA, 1686 nt, Artificial Sequence
  mRNA product Design i-3 (hSL-A100) comprising derived and/or modified sequence from LASV(Nig08-A19;Clade III)__ADU56618__GPCmut8 (opt4)
aggagaaagcuuaccaugggccagaucgugaccuucuuccaggaggugccccacgugaucgaggaggugaugaacaucgugcugaucgcccugagcauccuggccauccugaagggccuguacaacaucgccaccugcggccugaucggccuggugaccuuccugcugcugagcggcagaagcugcagcaugaccuacaagggcguguacgagcugcagacccuggagcugaacaugaacacccugaacaugugcaugccccugagcugcaccaagaacaacagccaccacuacaucauggugggcaacgagaccggccuggagcugacccugaccaacaccagccugcugcaccacaaguucugcaaccugagcgacgcccacaagaagaaccuguacgaccacacccugaugagcaucaucagcaccuuccaccugagcauccccaacuucaaccaguacgaggccaugagcugcgacuucaacggcggcaagaucaccgugcaguacaaccugagccacagcuacgccaucgacgccgccaaccacugcggcaccguggccaacggcgugcugcagaccuucaugagaauggccuggggcggcagcuacaucgcccuggacagcggcagaggcaagugggacugcaucaugaccagcuaccaguaccugaucauccagaacaccaccugggaggaccacugccaguucagcagacccagccccaucggcuaccugggccugcugagccagagaaccagagacaucuacaucagcagaagacugcugggcaccuucaccuggacccugagcgacagcgagggcaacgagacccccggcggcuacugccugaccagauggaugcugaucgaggccgagcugaagugcuucggcaacaccgccguggccaagugcaacgagaagcacgacgaggaguucugcgacaugcugagacuguucgacuucugcaagcaggccaucagaagacugaaggcccccgcccagaugagcauccagcugaucaacaaggccgugaacgcccugaucaacgaccagcugaucaugaagaaccaccugagagacaucaugggcauccccuacugcaacuacagcaaguacugcuaccugaaccacaccagcaccggcagaaccagccugcccagaugcugccuggugagcaacggcagcuaccugaacgagacccacuucagcgacgacaucgagcagcaggccgacaacaugaucaccgagaugcugcagaaggaguaccuggacagacagggcaagaccccccugggccugguggaccuguucguguucagcaccagcuucuaccugaucagcaucuuccugcaccuggugaagauccccacccacagacacaucgugggcaagcccugccccaagccccacagacugaaccacaugggcaucugcagcugcggccuguacaagcagcccggcgugcccgugagauggaagagaugaggacuaguuauaagacugacuagcccgaugggccucccaacgggcccuccuccccuccuugcaccgagauuaaucaaaggcucuuuucagagccaccaaaaaaaaaaaaaaaaaaaaaaaaaaaaaaaaaaaaaaaaaaaaaaaaaaaaaaaaaaaaaaaaaaaaaaaaaaaaaaaaaaaaaaaaaaaaaaaaaaaaa

SEQ ID NO: 34651 - RNA, 1689 nt, Artificial Sequence
  mRNA product Design i-3 (hSL-A100) comprising derived and/or modified sequence from LASV(G1180-SLE-2010;Clade IV)__AIT17168__GPCmut8 (opt4)
aggagaaagcuuaccaugggccagaucgugaccuucuuccaggaggugccccacgugaucgaggaggugaugaacaucgugcugaucgcccugagcauccuggccgugcugaagggccuguacaacuucgccaccugcggccuggugggccugcugaccuuccugcugcugugcggcagaagcugcaccgccagcagauacaagggcguguacgagcugcagacccuggagcugaacauggagacccugaacaugugcaugccccugagcugcaccaagaacaacagccaccacuacaucauggugggcaacgagaccggccuggagcugacccugaccaacaccagcaucaucaaccacaaguucugcaaccugagcgacgcccacaagaagaaccuguacgaccacgcccugaugagcaucaucagcaccuuccaccugagcauccccaacuucaaccaguacgaggccaugagcugcgacuucaacggcggcaagaucagcgugcaguacaaccugagccacagcuacgccggcgacgccgccaaccacugcggcaccguggccaacggcgugcugcagaccuucaugagaauggccuggggcggcagcuacaucgcccuggacagcggccacggcagcugggacugcaucaugaccagcuaccaguaccugaucauccagaacaccaccugggaggaccacugccaguucagcagacccagccccaucggcuaccugggccugcugagccagagaaccagagacaucuacaucagcagaagacugcugggcaccuucaccuggacccugagcgacagcgagggcaaggacacccccggcggcuacugccugaccagauggaugcugaucgaggccgagcugaagugcuucggcaacaccgccguggccaagugcaacgagaagcacgacgaggaguucugcgacaugcugagacuguucgacuucugcaagcaggccauccagagacugaaggcccccgcccagaugagcauccagcugaucaacaaggccgugaacgcccugaucaacgaccagcugaucaugaagaaccaccugagagacaucaugggcauccccuacugcaacuacagcaaguacugcuaccugaaccacaccaccaccggcaagaccagccugcccaagugcugccuggugagcaacggcagcuaccugaacgagacccacuucagcgacgacaucgagcagcaggccgacaacaugaucaccgagaugcugcagaaggaguacauggagagacagggcaagaccccccugggccugguggaccuguucguguucagcaccagcuucuaccugaucagcaucuuccugcaccuggugaagauccccacccacagacacaucgugggcaagagcugccccaagccccacagacugaaccacaugggcaucugcagcugcggccuguacaagcagcccggcgugcccgugaaguggaagagaugaggacuaguuauaagacugacuagcccgaugggccucccaacgggcccuccuccccuccuugcaccgagauuaaucaaaggcucuuuucagagccaccaaaaaaaaaaaaaaaaaaaaaaaaaaaaaaaaaaaaaaaaaaaaaaaaaaaaaaaaaaaaaaaaaaaaaaaaaaaaaaaaaaaaaaaaaaaaaaaaaaaaa

SEQ ID NO: 34652 - RNA, 1689 nt, Artificial Sequence
  mRNA product Design i-3 (hSL-A100) comprising derived and/or modified sequence from LASV(G1442-SLE-2011;Clade IV)__AIT17180__GPCmut8 (opt4)
aggagaaagcuuaccaugggccagaucgugaccuucuuccaggaggugccccacgugaucgaggaggugaugaacaucgugcugaucgcccugagcauccuggccgugcugaagggccuguacaacguggccaccugcggccugaucggccuggugaccuuccugcugcugugcggcagaagcugcaccaccacccuguacaagggcguguacgagcugcagacccuggagcugaacauggagacccugaacaugugcaugccccugagcugcaccaagaacaacagccaccacuacaucagagugggcaacgagaccggccuggagcugacccugaccaacaccagcaucaucaaccacaaguucugcaaccugagcgacgcccacaagaagaaccuguacgaccacgcccugaugagcaucaucagcaccuuccaccugagcauccccaacuucaaccaguacgaggccaugagcugcgacuucaacggcggcaagaucagcgugcaguacaaccugagccacagcuacgccggcgacgccgccaaccacugcggcaccguggccaacggcgugcugcagaccuucaugagaauggccuggggcggcagcuacaucgcccuggacagcggcagaggcaacugggacugcaucaugaccagcuaccaguaccugaucauccagaacaccaccugggacgaccacugccaguucagcagacccagccccaucggcuaccugggccugcugagccagagaaccagagacguguacaucagcagaagacugcugggcaccuucaccuggacccugagcgacagcgagggcaaggacacccccggcggcuacugccugaccagauggaugcugaucgaggccgagcugaagugcuucggcaacaccgccguggccaagugcaacgagaagcacgacgaggaguucugcgacaugcugagacuguucgacuucugcaagcaggccauccagagacugaaggcccccgcccagaugagcauccagcugaucaacaaggccgugaacgcccugaucaacgaccagcugaucaugaagaaccaccugagagacaucaugggcauccccuacugcaacuacagcaaguacugcuaccugaacaacaccgccaccggcaagaccagccugcccaagugcugccugaucagcaacggcagcuaccugaacgagacccacuucagcgacgacaucgagcaggaggccgacaacaugaucaccgagaugcugcagaaggaguacauggagagacagggcaagaccccccugggccugguggaccuguucguguucagcaccagcuucuaccugaucagcaucuuccugcaccuggugaagauccccacccacagacacaucgugggcaagagcugccccaagccccacagacugaaccacaugggcaucugcagcugcggccuguacaagcagcccggcgugcccgugagauggaagagaugaggacuaguuauaagacugacuagcccgaugggccucccaacgggcccuccuccccuccuugcaccgagauuaaucaaaggcucuuuucagagccaccaaaaaaaaaaaaaaaaaaaaaaaaaaaaaaaaaaaaaaaaaaaaaaaaaaaaaaaaaaaaaaaaaaaaaaaaaaaaaaaaaaaaaaaaaaaaaaaaaaaaa

SEQ ID NO: 34653 - RNA, 1689 nt, Artificial Sequence
  mRNA product Design i-3 (hSL-A100) comprising derived and/or modified sequence from LASV(G3010-SLE-2013;Clade IV)__AIT17344__GPCmut8 (opt4)
aggagaaagcuuaccaugggccagaucgugaccuucuuccaggaggugccccacgugaucgaggaggugaugaacaucgugcugaucgcccugagcauccuggccgugcugaagggccuguacaacuucgccaccugcggccuggugggccuggugaccuuccugcugcugugcggcagaagcugcaccaccagccuguacaagggcguguacgagcugcagacccuggagcugaacauggagacccugaacaugugcaugccccugagcugcaccaagaacaacagccaccacuacaucauggugggcaacgagaccggccuggagcugacccugaccaacaccagcaucaucaaccacaaguucugcaaccugagcgacgcccacaagaagaaccuguacaaccacgcccugaugagcaucaucagcaccuuccaccugagcauccccaacuucaaccaguacgaggccaugagcugcgacuucaacggcggcaagaucagcgugcaguacaaccugagccacagcuacgccggcgacgccgccagccacugcggcaccguggccaacggcgugcugcagaccuucaugagaauggccuggggcggcagcuacaucgcccuggacagcggcuacggcaagugggacugcaucaugaccagcuaccaguaccugaucauccagaacaccaccugggaggaccacugccaguucagcagacccagccccaucggcuaccugggccugcugagccagagaaccagagacaucuacaucagcagaagacugcugggcaccuucaccuggacccugagcgacagcgagggcaaggacacccccggcggcuacugccugaccagauggaugcugaucgaggccgagcugaagugcuucggcaacaccgccguggccaagugcaacgagaagcacgacgaggaguucugcgacaugcugagacuguucgacuucugcaagcaggccauccagagacugaagacccccgcccagaugagcauccagcugaucaacaaggccgugaacgcccugaucaacgaccagcugaucaugaagaaccaccugagagacaucaugggcauccccuacugcaacuacagcaaguacugcuaccugaaccacaccaccaccggcaagaccagccugcccaagugcugccuggugagcaacggcagcuaccugaacgagacccacuucagcgacgacaucgagcagcaggccgacaacaugaucaccgagaugcugcagaaggaguacauggagagacagggcaagaccccccugggccugguggaccuguucguguucagcaccagcuucuaccugaucagcaucuuccugcaccuggugaagauccccacccacagacacaucgugggcaagagcugccccaagccccacagacugaaccacaugggcaucugcagcugcggccuguacaagcagcccggcgugcccgugagauggaagagaugaggacuaguuauaagacugacuagcccgaugggccucccaacgggcccuccuccccuccuugcaccgagauuaaucaaaggcucuuuucagagccaccaaaaaaaaaaaaaaaaaaaaaaaaaaaaaaaaaaaaaaaaaaaaaaaaaaaaaaaaaaaaaaaaaaaaaaaaaaaaaaaaaaaaaaaaaaaaaaaaaaaaa

SEQ ID NO: 34654 - RNA, 1689 nt, Artificial Sequence
  mRNA product Design i-3 (hSL-A100) comprising derived and/or modified sequence from LASV(G502-SLE-2009;Clade IV)__AIT17126__GPCmut8 (opt4)
aggagaaagcuuaccaugggccagaucgugaccuucuuccaggaggugccccacgugaucgaggaggugaugaacaucgugcugaucgcccugagcauccuggccgugcugaagggccuguacaacuucgccaccugcggccuggugggccugcugaccuuccugcugcugugcggcagaagcugcaccaccggccuguacaagggcguguacgagcugcagacccuggagcugaacauggagacccugaacaugugcaugccccugagcugcaccaagaacaacagccaccacuacaucauggugggcaacgagaccggccuggagcugacccugaccaacaccagcaucaucaaccacaaguucugcaaccugagcgacgcccacaagaagaaccuguacgaccacgcccugaugagcaucaucagcaccuuccaccugagcauccccaacuucaaccaguacgaggccaugagcugcgacuucaacggcggcaagaucagcgugcaguacaaccugagccacagcuacgccggcgacgccgccgaccacugcggcaccguggccaacggcgugcugcagaccuucaugagaauggccuggggcggcagcuacaucgcccuggacagcggcagaggcagaugggacugcaucaugaccagcuaccaguaccugaucauccagaacaccaccugggaggaccacugccaguucagcagacccagccccaucggcuaccugggccugcugagccagagaaccagagacaucuacaucagcagaagacugcugggcaccuucaccuggacccugagcgacagcgagggcaaggacacccccggcggcuacugccugaccagauggaugcugaucgaggccgagcugaagugcuucggcaacaccgccguggccaagugcaacgagaagcacgacgaggaguucugcgacaugcugagacuguucgacuucugcaagcaggccauccagagacugaaggcccccgcccagaugagcauccagcugaucaacaaggccgugaacgcccugaucaacgaccagcuggugaugaagaaccaccugagagacaucaugggcauccccuacugcaacuacagcagauacugcuaccugaaccacaccaccaccggcagaaccagccugcccaagugcugccuggugagcaacggcagcuaccugaacgagacccacuucagcgacgacaucgagcagcaggccgacaacaugaucaccgagaugcugcagaaggaguacauggagagacagggcaagaccccccugggccugguggaccuguucguguucagcaccagcuucuaccugaucagcaucuuccugcaccuggugaagauccccacccacagacacaucgugggcaagagcugccccaagccccacagacugaaccacaugggcaucugcagcugcggccuguacaagcagcccggcgugcccgugaaguggaagagaugaggacuaguuauaagacugacuagcccgaugggccucccaacgggcccuccuccccuccuugcaccgagauuaaucaaaggcucuuuucagagccaccaaaaaaaaaaaaaaaaaaaaaaaaaaaaaaaaaaaaaaaaaaaaaaaaaaaaaaaaaaaaaaaaaaaaaaaaaaaaaaaaaaaaaaaaaaaaaaaaaaaaa

SEQ ID NO: 34655 - RNA, 1689 nt, Artificial Sequence
  mRNA product Design i-3 (hSL-A100) comprising derived and/or modified sequence from LASV(G733-SLE-2010;Clade IV)__AIT17154__GPCmut8 (opt4)
aggagaaagcuuaccaugggccagaucgugaccuucuuccaggaggugccccacgugaucgaggaggugaugaacaucgugcugaucgcccugagcauccuggccgugcugaagggccuguacaacuucgccaccugcggcaucgugggccuggugagcuuccugcugcugugcggcagaagcugcaccaccagccuguacaagggcguguacgagcugcagacccuggagcugaacauggagacccugaacaugugcaugccccugagcugcaccaagaacaacagccaccacuacaucauggugggcaacgagaccggccuggagcugacccugaccaacaccagcaucaucaaccacaaguucugcaaccugagcgacgcccacaagaagaaccuguacgaccacgcccugaugagcaucaucagcaccuuccaccugagcauccccaacuucaaccaguacgaggccaugagcugcgacuucaacggcggcaagaucagcgugcaguacaaccugagccacagcuacgccggcgacgccgccaaccacugcggcaccaucgccaacggcgugcugcagaccuucaugagaauggccuggggcggcagcuacaucgcccuggacagcggcagagacagaugggacugcaucaugaccagcuaccaguaccugaucauccagaacaccaccugggaggaccacugccaguucagcagacccagccccaucggcuaccugggccugcugagccagagaaccagagacaucuacaucagcagaagacugcugggcaccuucaccuggacccugagcgacagcgagggcaaggacacccccggcggcuacugccugaccagauggaugcugaucgaggccgagcugaagugcuucggcaacaccgccguggccaagugcaacgagaagcacgacgaggaguucugcgacaugcugagacuguucgacuucugcaagcaggccauccagagacugaaggcccccgcccagaugagcauccagcugaucaacaaggccgugaacgcccugaucaacgaccagcugaucaugaagaaccaccugagagacaucaugggcauccccuacugcaacuacagcaaguacugcuaccugaaccacaccaccaccggcaagaccagccugcccaagugcugccuggugagcaacggcagcuaccugaacgagacccacuucagcgacgacaucgagcagcaggccgacaacaugaucaccgagaugcugcagaaggaguacauggagagacagggcaagaccccccugggccugguggaccuguucguguucagcaccagcuucuaccugaucagcaucuuccugcaccuggugaagauccccacccacagacacguggugggcaagagcugccccaagccccacagacugaaccacaugggcaucugcagcugcggccuguacggccagcccggcgugcccgugaaguggaagagaugaggacuaguuauaagacugacuagcccgaugggccucccaacgggcccuccuccccuccuugcaccgagauuaaucaaaggcucuuuucagagccaccaaaaaaaaaaaaaaaaaaaaaaaaaaaaaaaaaaaaaaaaaaaaaaaaaaaaaaaaaaaaaaaaaaaaaaaaaaaaaaaaaaaaaaaaaaaaaaaaaaaaa

SEQ ID NO: 34656 - RNA, 1689 nt, Artificial Sequence
  mRNA product Design i-3 (hSL-A100) comprising derived and/or modified sequence from MOPV/LASV reassortant(IGS-1;Clade IV)__AFY05576__GPCmut8 (opt4)
aggagaaagcuuaccaugggccagaucgugaccuucuuccaggaggugccccacgugaucgaggaggugaugaacaucgugcugaucgcccugagcgugcuggccgugcugaagggccuguacaacuucgccaccugcggccuggugggccuggugaccuuccugcugcugugcggcagaagcugcaccaccagccuguacaagggcguguacgagcugcagacccuggagcugaacauggagacccugaacaugugcaugccccugagcugcaccaagaacaacagccaccacuacaucauggugggcaacgagaccggccuggagcugacccugaccaacaccagcaucaucaaccacaaguucugcaaccugagcgacgcccacaagaagaaccuguacgaccacgcccugaugagcaucaucagcaccuuccaccugagcauccccaacuucaaccaguacgaggccaugagcugcgacuucaacggcggcaagaucagcgugcaguacaaccugagccacagcuacgccggcgacgccgccaaccacugcggcaccguggccaacggcgugcugcagaccuucaugagaauggccuggggcggcagcuacaucgcccuggacagcggcagaggcaacugggacugcaucaugaccagcuaccaguaccugaucauccagaacaccaccugggaggaccacugccaguucagcagacccagccccaucggcuaccugggccugcugagccagagaaccagagacaucuacaucagcagaagacugcugggcaccuucaccuggacccugagcgacagcgagggcgaggacacccccggcggcuacugccugaccagauggaugcugaucgaggccgagcugaagugcuucggcaacaccgccguggccaagugcaacgagaagcacgacgaggaguucugcgacaugcugagacuguucgacuucugcaagcaggccauccagagacugaaggcccccgcccagaugagcauccagcugaucaacaaggccgugaacgcccugaucaacgaccagcugaucaugaagaaccaccugagagacaucaugggcauccccuacugcaacuacagcaaguacugcuaccugaaccacaccaccaccggcagaaccagccugcccaagugcugccuggugagcaacggcagcuaccugaacgagacccacuucagcgacgacaucgagcagcaggccgacaacaugaucaccgagaugcugcagaaggaguacauggagagacagggcaagaccccccugggccugguggaccuguucguguucagcaccagcuucuaccugaucagcaucuuccugcaccuggugaagauccccacccacagacacaucgugggcaagagcugccccaagccccacagacugaaccacaugggcaucugcagcugcggccuguacaagcagcccggcgugcccgugaaguggaagagaugaggacuaguuauaagacugacuagcccgaugggccucccaacgggcccuccuccccuccuugcaccgagauuaaucaaaggcucuuuucagagccaccaaaaaaaaaaaaaaaaaaaaaaaaaaaaaaaaaaaaaaaaaaaaaaaaaaaaaaaaaaaaaaaaaaaaaaaaaaaaaaaaaaaaaaaaaaaaaaaaaaaaa

SEQ ID NO: 34657 - RNA, 1689 nt, Artificial Sequence
  mRNA product Design i-3 (hSL-A100) comprising derived and/or modified sequence from LASV(LM765-SLE-2012;Clade IV)__AIT17814__GPCmut8 (opt4)
aggagaaagcuuaccaugggccagaucgugaccuucuuccaggaggugccccacgugaucgaggaggugaugaacaucgugcugaucgcccugagcauccuggccgugcugaagggccuguacaacuucgccaccugcggccuggugggccuggugaccuuccugcugcugugcggcagaagcugcaccaccagccuguacaagggcguguacgagcugcagacccuggagcugaacauggagacccugaacaugugcaugccccugagcugcaccaagaacaacagccaccacuacaucauggugggcaacgagaccggccuggagcugacccugaccaacaccagcaucaucgaccacaaguucugcaaccugagcgacgcccacagaaagaaccuguacgaccacgcccugaugagcaucaucagcaccuuccaccugagcauccccaacuucaaccaguacgaggccaugagcugcgacuucaacggcggcaagaucagcgugcaguacaaccugagccacagcuacgccaaggacgccgccgaccacugcggcaccguggccaacggcgugcugcagaccuucaugagaauggccuggggcggcagcuacaucgcccuggacagcggcagaggcagaugggacugcaucaugaccagcuaccaguaccugaucauccagaacaccaccugggaggaccacugccaguucagcagacccagccccaucggcuaccugggccugcugagccagagaaccagagacaucuacaucagcagaagacugcugggcaccuucaccuggacccugagcgacagcgagggcaaggacacccccggcggcuacugccugaccagauggaugcugaucgaggccgagcugaagugcuucggcaacaccgccguggccaagugcaacgagaagcacgacgaggaguucugcgacaugcugagacuguucgacuucugcaagcaggccauccagagacugaaggcccccgcccagaugagcauccagcugaucaacaaggccgugaacgcccugaucaacgaccagcugaucaugaagaaccaccugagagacaucaugggcauccccuacugcaacuacagcaaguacugcuaccugaaccacaccaccaccggcaagaccagccugcccaagugcugccuggugagcaacggcagcuaccugaacgagacccacuucagcgacgacaucgagcagcaggccgacaacaugaucaccgagaugcugcagaaggaguacauggagagacagggcaagaccccccugggccugguggaccuguucguguucagcaccagcuucuaccugaucagcaucuuccugcaccuggugaagauccccacccacagacacaucgugggcaagcccugccccaagccccacagacugaaccacaugggcaucugcagcugcggccuguacaagcagcccggcgugcccgugaaguggaagagaugaggacuaguuauaagacugacuagcccgaugggccucccaacgggcccuccuccccuccuugcaccgagauuaaucaaaggcucuuuucagagccaccaaaaaaaaaaaaaaaaaaaaaaaaaaaaaaaaaaaaaaaaaaaaaaaaaaaaaaaaaaaaaaaaaaaaaaaaaaaaaaaaaaaaaaaaaaaaaaaaaaaaa

SEQ ID NO: 34658 - RNA, 1689 nt, Artificial Sequence
  mRNA product Design i-3 (hSL-A100) comprising derived and/or modified sequence from LASV(LM776-SLE-2012;Clade IV)__AIT17824__GPCmut8 (opt4)
aggagaaagcuuaccaugggccagaucgugaccuucuuccaggaggugccccacgugaucgaggaggugaugaacaucgugcugaucgcccugagcauccuggccgugcugaagggccuguacaacuucgccaccugcggccuggugggccuggugaccuuccugcugcugugcggcagaagcugcaccaccagcguguacaagggcguguacgagcugcagacccuggagcugaacauggagacccugaacaugugcaugccccugagcugcaccaagaacaacagccaccacuacaucauggugggcaacgagaccggccuggagcugacccugaccaacaccagcaucaucaaccacaaguucugcaaccugagcgacgcccacaagaagaaccuguacgaccacgcccugaugagcaucaucagcaccuuccaccugagcauccccaacuucaaccaguacgaggccaugagcugcgacuucaacggcggcaagaucagcgugcaguacaaccugagccacagcuacgccggcgacgccgccaaccacugcggcaccguggccaacggcgugcugcagaccuucaugagaauggccuggggcggcagcuacaucgcccuggacagcggccacggcaagugggacugcaucaugaccagcuaccaguaccugaucauccagaacaccaccugggaggaccacugccaguucagcagacccagccccaucggcuaccugggccugcugagccagagaaccagagacaucuacaucagcagaagacugcugggcaccuucaccuggacccugagcgacagcgagggcaaggacacccccggcggcuacugccugaccagauggaugcugaucgaggccgagcugaagugcuucggcaacaccgccguggccaagugcaacgagaagcacgacgaggaguucugcgacaugcugagacuguucgacuucugcaagcaggccauccagagacugaaggcccccgcccagaugagcauccagcugaucaacaaggccgugaacgcccugaucaacgaccagcugaucaugaagaaccaccugagagacaucaugggcauccccuacugcaacuacagcaaguacugcuaccugaaccacaccaccaccggcaagaccagccugcccaagugcugccuggugagcaacggcagcuaccugaacgagacccacuucagcgacgacaucgagcagcaggccgacaacaugaucaccgagaugcugcagaaggaguacauggagagacagggcaagaccccccugggccugguggaccuguucguguucagcaccagcuucuaccugaucagcaucuuccugcaccuggugaagauccccacccacagacacaucgugggcaagagcugccccaagccccacagacugaaccacaugggcaucugcagcugcggccuguacaagcagcccggcgugcccgugagauggaagagaugaggacuaguuauaagacugacuagcccgaugggccucccaacgggcccuccuccccuccuugcaccgagauuaaucaaaggcucuuuucagagccaccaaaaaaaaaaaaaaaaaaaaaaaaaaaaaaaaaaaaaaaaaaaaaaaaaaaaaaaaaaaaaaaaaaaaaaaaaaaaaaaaaaaaaaaaaaaaaaaaaaaaa

SEQ ID NO: 34659 - RNA, 1689 nt, Artificial Sequence
  mRNA product Design i-3 (hSL-A100) comprising derived and/or modified sequence from LASV(Mad39;Clade IV)__ANH09722__GPCmut8 (opt4)
aggagaaagcuuaccaugggccagaucgugaccuucuuccaggaggugccccacgugaucgaggaggugaugaacaucgugcugaucgcccugagcauccuggccgugcugaagggccuguacaacguggccaccugcggccugaucggccuggugaccuuccugcugcugugcggcagaagcugcaccaccacccuguacaagggcguguacgagcugcaggcccuggagcugaacauggagacccugaacaugugcaugccccugagcugcaccaagaacaacagccaccacuacaucagagugggcaacgagaccggccuggagcugacccugaccaacaccagccugaucaaccacaaguucugcaaccugagcgacgcccacaagaagaaccuguacgaccacgcccugaugagcaucaucagcaccuuccaccugagcauccccaacuucaaccaguacgaggccaugagcugcgacuucaacgacggcaagaucagcgugcaguacaaccugagccacaccuacgccggcgacaccgccaaccacugcggcaccguggccaacggcgugcugcagaccuucaugagaauggccuggggcggcagcuacaucgcccuggacagcggcagaggcggcugggacugcaucaugaccagcuaccaguaccugaucauccagaacaccaccugggaggaccacugccaguucagcagacccagccccaucggcuaccugggccugcugagccagagaaccagagacaucuacaucagcagaagacugcugggcaccuucaccuggacccugagcgacagcgagggcaaggacacccccggcggcuacugccugaccagauggaugcugaucgaggccgagcugaagugcuucggcaacaccgccguggccaagugcaacgagaagcacgacgaggaguucugcgacaugcugagacuguucgacuucugcaagcaggccauccagagacugaaggcccccgcccagaugagcauccagcugaucaacaaggccgugaacgcccugaucaacgaccagcugaucaugaagaaccaccugagagacaucaugggcauccccuacugcaacuacagcaaguacugcuaccugaaccacaccgugaccggcaagaccagccugcccaagugcugccuggugagcaacggcagcuaccugaacgagacccacuucagcgacgacaucgagcagcaggccgacaacaugaucaccgagaugcugcagaaggaguacauggagagacagggcaagaccccccugggccugguggaccuguucguguucagcaccagcuucuaccugaucagcaucuuccugcaccuggugaagauccccacccacagacacguggugggcaagcccugccccaagccccacagacugaaccacaugggcaucugcagcugcggcuucuacaagcagcccggcgugcccgugagauggaagagaugaggacuaguuauaagacugacuagcccgaugggccucccaacgggcccuccuccccuccuugcaccgagauuaaucaaaggcucuuuucagagccaccaaaaaaaaaaaaaaaaaaaaaaaaaaaaaaaaaaaaaaaaaaaaaaaaaaaaaaaaaaaaaaaaaaaaaaaaaaaaaaaaaaaaaaaaaaaaaaaaaaaaa

SEQ ID NO: 34660 - RNA, 1689 nt, Artificial Sequence
  mRNA product Design i-3 (hSL-A100) comprising derived and/or modified sequence from LASV(Z0947-SLE-2011;Clade IV)__AIT17840__GPCmut8 (opt4)
aggagaaagcuuaccaugggccagaucgugaccuucuuccaggaggugccccacgugaucgaggaggugaugaacaucgugcugaucgcccugagcauccuggccgugcugaagggccuguacaacuucgccaccugcggccuggugggccuggugaccuuccugcugcugugcggcagaagcugcaccaucagccuguacaagggcguguacgagcugcagacccuggagcugaacauggagacccugaacaugugcaugccccugagcugcaccaagaacaacagccaccacuacaucauggugggcaacgagaccggccuggagcugacccugaccaacaccagcaucaucaaccacaaguucugcaaccugagcgacgcccacaagaagaaccuguacgaccacgcccugaugagcaucaucagcaccuuccaccugagcauccccaacuucaaccaguacgaggccaugagcugcgacuucaacggcggcaagaucagcgugcaguacaaccugagccacagcuacgccggcgacgccgccaaccacugcggcaccguggccaacggcgugcugcagaccuucaugagaauggccuggggcggcagcuacaucgcccuggacagcggcagagacagaugggacugcaucaugaccagcuaccaguaccugaucauccagaacaccaccugggaggaccacugccaguucagcagacccagccccaucggcuaccugggccugcugagccagagaaccagagacaucuacaucagcagaagacugcugggcaccuucaccuggacccugagcgacagcgagggcaaggacacccccggcggcuacugccugaccagauggaugcugaucgaggccgagcugaagugcuucggcaacaccgccguggccaagugcaacgagaagcacgacgaggaguucugcgacaugcugagacuguucgacuucugcaagcaggccauccagagacugaaggcccccgcccagaugagcauccagcugaucaacaaggccgugaacgcccugaucaacgaccagcugaucaugaagaaccaccugagagacaucaugggcauccccuacugcaacuacagcaaguacugcuaccugaaccacaccaccaccggcaagaccagccugcccaagugcugccuggugagcaacggcagcuaccugaacgagacccacuucagcgacgacaucgagcagcaggccgacaacaugaucaccgagaugcugcagaaggaguacauggagagacagggcaagaccccccugggccugguggaccuguucguguucagcaccagcuucuaccugaucagcaucuuccugcaccuggugaagauccccacccacagacacaucgugggcaagcccugccccaagccccacagacugaaccacaugggcaucugcagcugcggccuguacaagcagcccggcgugcccgugaaguggaagagaugaggacuaguuauaagacugacuagcccgaugggccucccaacgggcccuccuccccuccuugcaccgagauuaaucaaaggcucuuuucagagccaccaaaaaaaaaaaaaaaaaaaaaaaaaaaaaaaaaaaaaaaaaaaaaaaaaaaaaaaaaaaaaaaaaaaaaaaaaaaaaaaaaaaaaaaaaaaaaaaaaaaaa

SEQ ID NO: 34661 - RNA, 1689 nt, Artificial Sequence
  mRNA product Design i-3 (hSL-A100) comprising derived and/or modified sequence from LASV(Josiah;Clade IV)__NP_694870__GPCmut8 (opt5)
aggagaaagcuuaccaugggccagaucgugaccuucuuucaagaggucccccacguuauugaagaggugaugaacaucgugcugauugcccucagcguccuggcugugcuuaaggggcuguacaauuucgccacaugcggacucguuggccuggugacguuucuucugcucugugggagauccugcaccacaucucuguauaaaggagucuacgaacugcagacccucgagcugaacauggaaacacuuaauauguguaugccucugagcugcaccaagaacaauucccaucacuauaucauggugggcaacgagacagggcucgagcugacccuuacgaauaccucuauuaucaaccauaaauucuguaaucugagcgacgcgcacaagaaaaaccucuacgaucaugcucugauguccaucauuucuacauuucaccugagcaucccgaauuucaaccaguaugaagccauguccugcgacuuuaauggaggcaagauuagcguucaguacaaccucucucacuccuaugccggcgaugcugccaaucauugugggaccguggcuaacggaguccugcaaacauucaugcggauggccuggggcgggagcuacaucgcgcuugacucuggacgcggcaacugggauugcauuaugaccuccuaccaguaucugaucauucagaauacgacaugggaggaccacugucaguuuagcagacccucuccuaucggguaccucggacugcuuucccaacggacccgcgauaucuauauuagcagacggcugcucggcacauucaccuggacccuguccgacucugaaggcaaggauacacccgggggauacugccugacgcgcuggaugcucaucgaggccgagcugaaauguuuuggcaacaccgcuguggccaagugcaaugaaaaacaugacgaggaguucugcgauaugcuuagacuguuugacuucuguaagcaggcuauucagcggcucaaagccccugcgcagaugagcauccaacugauuaacaaggccgugaaugcucuuaucaacgaucagcugaucaugaagaaucaccuccgcgacauuauggggauccccuauugcaacuacuccaaauauuguuaccugaaucacacaaccacaggaagaaccagccugccuaagugcugucucgucucuaacggcuccuaccugaaugaaacgcauuucagcgacgauauugaacagcaagccgacaacaugaucacagagaugcuucagaaagaguauauggaacggcaggggaagaccccgcugggacucguugaucuguuuguguucucuaccagcuuuuaccugauuuccaucuuccuucaccucgugaaaauccccacacaucgccacauugucggcaagucuugcccuaaaccccauagacugaaucacaugggcaucuguagcugcgggcuguauaagcagccuggagugcccguuaaguggaaacggugaggacuaguuauaagacugacuagcccgaugggccucccaacgggcccuccuccccuccuugcaccgagauuaaucaaaggcucuuuucagagccaccaaaaaaaaaaaaaaaaaaaaaaaaaaaaaaaaaaaaaaaaaaaaaaaaaaaaaaaaaaaaaaaaaaaaaaaaaaaaaaaaaaaaaaaaaaaaaaaaaaaaa

SEQ ID NO: 34662 - RNA, 1686 nt, Artificial Sequence
  mRNA product Design i-3 (hSL-A100) comprising derived and/or modified sequence from LASV(LP;Clade I)__AAF86701__GPCmut8 (opt5)
aggagaaagcuuaccaugggccagaucauuaccuucuuucaagaggugccccacgucaucgaagagguuaugaacauugugcugaucgcccucagccugcuugcuauucugaaggggcucuacaauaucgccacaugcggaaucauuggccugguggcguuccuuuuucugugugggaaauccugcucucucacgcugaagggaggcuaugaacugcagacccucgagcugaacauggaaacacuuaauauguguaugccucugagcugcaccaaaaacuccucucaucacuacaucagagucgggaaugagacaggacucgagcugacccuuacaaacaccagcauuaucaaucauaaguucuguaaccuguccgacgcucacaaaaagaaucucuaugaucaugcccugaugucuauuaucagcacguuucaccuguccauuccgaacuucaaucaguacgaagccaugagcugcgacuuuaacggcggcaagaucucugugcaguauaaucucucccacagcuacgcuggggaugccgcugagcauuguggaaccguugccaacggcgugcugcaaacauucaugcggauggcguggggagggcgcuauaucgcccuugacucuggcaaagggaauugggauugcauuaugaccuccuaccaguaccugaucauucagaacacaaccugggaagaccacugucaguuuagcagacccucuccuaucggauaucucggccugcuuucccaacggacgcgcgauauuuacaucagcagacggcugcucggcacauucaccuggacacuguccgacucugaggggaacgagacccccggaggcuauugccugacccgcuggaugcucaucgaagcugagcugaaguguuuugggaauacagccgucgcuaaaugcaacgaaaagcaugaugaggaguucugcgacaugcuuagacuguuugauuucuguaaacaggccauucggcgccucaaggcgccugcccagaugagcauccagcugauuaauaaggcugugaacgcccuuaucaaugaccaacugauuaugaaaaaccaccucagagauaucaugggaauccccuacugcaauuauuccaaguacuguuaucugaaccacacgagcucuggccggaccucccugccuaaaugcugucucauuagcaaugggucuuaccugaacgaaacacaguucagcgacgacaucgagcagcaagcugauaauaugauuaccgaaaugcuucagaaggaguacaucgaacgccagggaaaaacaccgcugggccucguugacauuuuuaucuucuccaccucuuuuuaucugauuagcaucuuccugcaucuuaucaagauucccacgcacagacauaucgugggcaaaccuugccccaagccucaccggcucaaccauaugggggucuguuccugcggacuguacaagcaccccggcgugccgacaaaauggaagcgcugaggacuaguuauaagacugacuagcccgaugggccucccaacgggcccuccuccccuccuugcaccgagauuaaucaaaggcucuuuucagagccaccaaaaaaaaaaaaaaaaaaaaaaaaaaaaaaaaaaaaaaaaaaaaaaaaaaaaaaaaaaaaaaaaaaaaaaaaaaaaaaaaaaaaaaaaaaaaaaaaaaaaa

SEQ ID NO: 34663 - RNA, 1686 nt, Artificial Sequence
  mRNA product Design i-3 (hSL-A100) comprising derived and/or modified sequence from LASV(803213;Clade II)__AAF86703__GPCmut8 (opt5)
aggagaaagcuuaccaugggccagaucauuaccuucuuucaagaggugccccacgucaucgaagagguuaugaacauugugcugaucgcccucagccugcuugcuauucugaaggggaucuacaauguggccacaugcggacucuucggccugaucuccuuucuucugcucugugggagaucuugcagcgucacguauaaaggaguguacgaacugcagacccuggagcucaacauggcgaaucugaacauguguaugccucuuuccugcacaaagaauaacucucaucacuauauuaugguuggcaaugaaaccgggcuggagcucacacugaccaacacaagcaucauuaaucauaaauucuguaaccuuuccgacgcucacaagaaaaaucuguacgaucaugcccucaugucuaucauuagcaccuuucaccuguccaucccgaacuucaaucaguaugaggccaugagcugcgacuuuaacggaggcaagauuucugugcaguacaaucugucccacagcuucgcugucgaugccgcuaaccauuguggcacgaucgccaacggggugcuccaaaccuuuaugcggauggcguggggaggcucuuauaucgcccuggacuccgggaagggaaauugggauugcauuaugacaagcuaccaguaccuuaucauucagaacaccacaugggaagaccacugucaguucucucgccccuccccuaucggcuaucuggggcuccugagccaaagaacccgggauauuuacaucucccgcagacuucugggaacguuuacauggacccucucugacagcgagggcaaugaagcucccggcggguauugccugacacgguggaugcugaucgaggccgagcucaaauguuucggaaacaccgcuguugccaagugcaaugaaaaacaugaugaggaauuuugcgacaugcugcgccuuuucgauuucuguaagcaggcgauuaaaagacugaagaccccugcccagauguccauccagcucauuaacaaggcugugaaugcccugaucaacgaccaacuuauuaugaaaaaucaucugcgggauaucaugggcauccccuacugcaacuauagccgcuacuguuaucucaaucacacagucacggggaagaccucucugccuagaugcugucugguguccaacggaagcuaccucaaugagacacacuuuucugacgacauugaacagcaggcugauaacaugaucaccgagaugcugcaaaaagaguacauggaccggcagggcaagacaccgcuugggcugguggaucucuucgucuuuagcaccuccuucuaucugauuucuaucuuucugcaccuuguuaaaauucccacgcaucgccacaucgugggaaagccuugccccaaaccucauagacucaaucacaugggcauuuguagcugcggccuguacaagcaccccggggugccggucaaguggaaacggugaggacuaguuauaagacugacuagcccgaugggccucccaacgggcccuccuccccuccuugcaccgagauuaaucaaaggcucuuuucagagccaccaaaaaaaaaaaaaaaaaaaaaaaaaaaaaaaaaaaaaaaaaaaaaaaaaaaaaaaaaaaaaaaaaaaaaaaaaaaaaaaaaaaaaaaaaaaaaaaaaaaaa

SEQ ID NO: 34664 - RNA, 1686 nt, Artificial Sequence
  mRNA product Design i-3 (hSL-A100) comprising derived and/or modified sequence from LASV(GA391;Clade III)__CAA36645__GPCmut8 (opt5)
aggagaaagcuuaccaugggccagaucgugaccuucuuucaagaggucccccacguuauugaagaggugaugaacaucgugcugauugcccucagcauccuggcuauucuuaaggggcuguacaaugucgccacaugcggacucaucggccuggugacguuccuucugcucuccgggagaucuuguagccugaucuauaaaggaaccuacgaacugcagacacucgagcugaacauggaaacccuuaauaugugcaugccucuguccuguacaaagaacaauucucaucacuauauucggguuggcaacgagaccgggcucgagcugacacuuaccaauacgagcauccugaaccauaaauuuugcaaucucuccgacgcgcacaagcgcaaccuguacgaucauucucugaugagcauuaucuccaccuuccaccucagcauuccgaauuuuaaccaguaugaagcuaugucuugugacuucaauggaggcaaaaucacagugcaguacaaccugucccacagcuuugccgucgaugccgcuggccauugcgggacccuugccaauggagugcugcaaacauucaugagaauggcuuggggcgggucuuauauugcccucgacuccggacggggcaacugggauuguaucaugaccagcuaccaguaccugaucauucagaacacgacaugggacgaucacugccaguuuucucgccccuccccuaucggguaucuuggacugcucagccaaagaacccgggacauuuacaucucccgcagacugcugggcacauucaccuggacccucucugauagcgagggcaaugaaacacccgggggauauugucugacgcgguggaugcuuauugaggcggagcugaagugcuuuggcaacaccgccguugcuaaguguaaugaaaaacaugacgaggaguucugcgauaugcuccgccuguuugacuucugcaagcaggccaucagacggcuuaaaaccccugcucagauguccauccagcugauuaacaaggccgugaaugcgcucaucaacgaucaacugauuaugaaaaaucaucugcgcgacaucauggggauucccuacuguaacuauagcagauacugcuaucucaaucacacaucuacaggaaagaccucccugccucgguguugccuuaucagcaacggcucuuaccugaaugaaacgaaguucagcgacgauaucgaacagcaggccgacaacaugauuacagagaugcuccaaaaagaguacaucgaucgccaggggaagaccccgcugggacuggucgaccuuuuuguguucuccaccucuuuuuaucucauuagcaucuuccugcaccuggugaaaauucccacacacagacauaucgucggcaagccuugucccaaaccucaccggcucaaucauaugggcauuugcuccugugggcuguacaagcagcccggaguuccggugagauggaaacgcugaggacuaguuauaagacugacuagcccgaugggccucccaacgggcccuccuccccuccuugcaccgagauuaaucaaaggcucuuuucagagccaccaaaaaaaaaaaaaaaaaaaaaaaaaaaaaaaaaaaaaaaaaaaaaaaaaaaaaaaaaaaaaaaaaaaaaaaaaaaaaaaaaaaaaaaaaaaaaaaaaaaaa

SEQ ID NO: 34665 - RNA, 1689 nt, Artificial Sequence
  mRNA product Design i-3 (hSL-A100) comprising derived and/or modified sequence from LASV(AV;Clade V)__CCA30314__GPCmut8 (opt5)
aggagaaagcuuaccaugggccagaucgugaccuucuuucaagaggucccccacguuauugaagaggugaugaacaucgugcugauugcccucagcauccuggcuguccuuaaggggcuguacaauauugccacaugcggacucaucggccugaucacguuccuucugcucugugggagauccugcucuagcaaccuguauaaaggaguguacgaacugcagucccucgaccugaauauggagacccuuaacauguguaugccucugucuugcacaaagaauaacagccaucacuauauucggguuggcaaugauaccgggcucgaacugacacuuaccaacacauccauccugaaucauaaauuuuguaaccucucugacgcgcacaagaaagaucuguacgaccaugcucugaugagcauuaucuccaccuuccaccucagcauuccgaauuuuaaccaguaugaggccaugucuugcgauuucaauggaggcaagaucuccgugcaguacaaccugagccacucuuaugccauugacgcugccaaucauuguggcacggucgcuaacgggauccuucaaaccuuuaugcgcauggccuggggaggcuccuacaucgcgcuggauagcgggagaggaaacugggacugcauuaugacaucuuaccaguaucucaucauucagaauaccacaugggagaaccacugucaguucucccggcccagcccuaucggcuaccuggggcuucugucccaacgcaccagagauauuuauaucucucggcgccuccugggaacguuuacauggacccugagcgacuccgaaggcaaugccacacccggcggguacugccucaccagauggaugcugaucgaggcugaacuuaaguguuucggaaacaccgccguggcuaaaugcaaugagaagcaugaugaggaauuuugcgacaugcugcgccucuucgauuuuuguaaacaggccauuagccggcugaagucuccugcgcagauguccauccagcuuauuaacaaagccguuaaugcucugaucaacgaccaacucauuaugaagaaucaccugagagacaucaugggcauccccuauugcaacuacagcaaguauuguuaccugaaucacacaauuacggggaaaaccucucucccuaagugcugucuggugagcaacggauccuaccuuaaugagacacauuucucugaugacaucgaacagcaggccgauaacaugauuaccgagaugcugcaaaaagaauauauggagcggcagggcaagacaccgcucgggcuggucgaccuguucguguuuagcaccuccuucuaccuuaucagcauuuuucuccgccuggugaaaauccccacgcacagacauauugucggaaagccuugccccaaaccucaccggcugaaucauaugggcaucuguucuugcggccucuauaagcagcccgggguuccggugcgcuggaagagaugaggacuaguuauaagacugacuagcccgaugggccucccaacgggcccuccuccccuccuugcaccgagauuaaucaaaggcucuuuucagagccaccaaaaaaaaaaaaaaaaaaaaaaaaaaaaaaaaaaaaaaaaaaaaaaaaaaaaaaaaaaaaaaaaaaaaaaaaaaaaaaaaaaaaaaaaaaaaaaaaaaaaa

SEQ ID NO: 34666 - RNA, 1686 nt, Artificial Sequence
  mRNA product Design i-3 (hSL-A100) comprising derived and/or modified sequence from LASV(Togo/2016/7082;Clade VI)__AMR44577__GPCmut8 (opt5)
aggagaaagcuuaccaugggccagaucauuaccuucuuucaagaggugccccacgucaucgaagagguuaugaacauugugcugaucgcccucagccugcuugcuauucugaaggggguguacaaugucgccacaugcggaaucaucggccucgugacguuccuguuucuuugugggagauccugcucucugauuuauaaaggaagcuacgaacuccagacccuggagcugaacauggaaacacucaauauguguaugccucuguccugcaccaagaacucuagccaucacuauauccggguuggcaaugagacagggcuugagcugacccucacaaacaccuccauuaucaaucauaaauucuguaaccugucugacgcgcacaagcgcaaucuuuacgaucaugcucugaugagcauucucuccacguuucaccugagcaucccgaacuucaaucaguaugaagccaugucuugcgacuuuaacggaggcaaaauuuccgugcaguacaaucugagccacgccuaugcugucgaugccgcugagcauuguggcaccguggccaacgggguucuccaaacauucaugagaauggcguggggaggcucuuacaucgcccuggacuccgggcggggaaauugggauugcaucaugaccagcuaccaguaucuuauuauccagaacacaaccugggaagaccacugucaguuuucucgccccuccccuauuggcuaccuggggcuccugagccaaagaacgcgggauaucuauauuucccgcagacuucugggaacauucaccuggacacucucugacagcgagggcaacgagacccccggcggguacugccugacccgguggaugcugaucgaagcugagcucaaguguuuuggaaauacagccguggcuaagugcaacgaaaaacaugaugaggaguucugcgacaugcugcgccuuuuugauuucuguaagcaggccauccagagacugaaauccccugcgcagaugagcauucaacucaucaauaaggccgucaacgcucugauuaaugaccagcuuaucaugaaaaaccaucugcgggauaugaugggcauucccuauugcaauuacucuaaguauuguuaccucaaccacacguccagcgggcgcaccucucugccuaagugcugucuggugagcaauggauccuaccucaacgaaacacacuucucugacgacaucgagcagcaagccgauaauaugaucaccgaaaugcugcagaaagaguauauugacagacagggcaagacaccgcuugggcugguggaucucuuugucuucagcaccuccuuuuaccugaucagcauuuuccugcaccuuaucaaaauucccacgcaucggcacaucguuggaaagccuugccccaaaccucaucgccucaaccacaugggcauuuguucuugcggccuguauaagcagcccggggugccgacaagauggaaacggugaggacuaguuauaagacugacuagcccgaugggccucccaacgggcccuccuccccuccuugcaccgagauuaaucaaaggcucuuuucagagccaccaaaaaaaaaaaaaaaaaaaaaaaaaaaaaaaaaaaaaaaaaaaaaaaaaaaaaaaaaaaaaaaaaaaaaaaaaaaaaaaaaaaaaaaaaaaaaaaaaaaaa

SEQ ID NO: 34667 - RNA, 1686 nt, Artificial Sequence
  mRNA product Design i-3 (hSL-A100) comprising derived and/or modified sequence from LASV(KAK-428;Clade n.d. (VII))__ANH09740__GPCmut8 (opt5)
aggagaaagcuuaccaugggccagaucgugaccuucuuucaagaggucccccacguuauugaagaggugaugaacaucgugcugauugcccucagccugcuugcuauccugaaggggcucuacaauuucgccacaugcggagucauuggccugaucacguuucuucugcucugugggagauccugcucugcgaccuauaaaggacaguacgaacugcagacacuggagcucaacauggaaagccugaauauguguaugccucuuuccugcaccaagaacaauucucaucacuauauccgggcuggcaacaauacagggcuggagcucacccugacaaacaccagcauuaucucccauaaauucuguaaucuuucugacgcccacaagaaaaaccuguacgaucauacgcucaugagcauuaucaccacauuucaccuguccauuccgaauuucaaccaguaugaggccaugagcugcgacuuuaauggaggcaagaucucuauucaauacaaccugucccacagcuaugcuggcgaugccgcucagcauugugggaccguggccaauggaguucuccagacauucaugcgcauggcguggggcgggucuuaccuggcccuugacuccggaagacggggcugggauugcaucaucagcucuuaccaguaucugauuauccaaaacaccacgugggacgaucacugucaguuuucccgccccagcccuauuggguaccucggauucgugucccagaagacaagagacaucuauauuucucggcgccugcuuggcaccuuuacauggacccugagcgauuccgaaggccaugacaugcccgggggauacugccucaccagauggaugcugaucgaggcugaucugaaauguuucggcaacacagccgucgcuaagugcaaugaaaaacacgacgaggaguuuugcgauauguggcgccucuucgacuucuguaagcaggccauccaacggcugaaagcgccugcccagaugaacauucagcuuaucaauaaggcugugaacgcccugauuaaugaccaacucaugaugaagaaccaccugagagauaucauggggauucccuauugcaauuacagcaaauuuuguuaucuuaacaauacgaccacaggacggaccucucugccucgcugcugucucaucuccaacggcagcuaccugaaugaaacacauuucucugacgauaucgagcagcaggcugacaacaugauuaccgaaaugcugcagaaggaguacauggauagacaagggaaaacgccgcucggacugguugaccuuuuuguguucagcacauccuuuuaucugaucaccauuuuccuccaccuggucaagauccccacccaucggcacauugugggcaaaccuugccccaagccucaucgccugaaucacaugggcaucuguucuugcgggcuuuacaaacagcccggagugccggucagauggaagcggugaggacuaguuauaagacugacuagcccgaugggccucccaacgggcccuccuccccuccuugcaccgagauuaaucaaaggcucuuuucagagccaccaaaaaaaaaaaaaaaaaaaaaaaaaaaaaaaaaaaaaaaaaaaaaaaaaaaaaaaaaaaaaaaaaaaaaaaaaaaaaaaaaaaaaaaaaaaaaaaaaaaaa

SEQ ID NO: 34668 - RNA, 1686 nt, Artificial Sequence; identical to SEQ ID NO: 34662
  mRNA product Design i-3 (hSL-A100) comprising derived and/or modified sequence from LASV(Pinneo-NIG-1969;Clade I)__AIT17836__GPCmut8 (opt5)

SEQ ID NO: 34669 - RNA, 1686 nt, Artificial Sequence
  mRNA product Design i-3 (hSL-A100) comprising derived and/or modified sequence from LASV(ISTH0009-NIG-2011;Clade II)__AIT17404__GPCmut8 (opt5)
aggagaaagcuuaccaugggccagaucauuaccuucuuucaagaggugccccacgucaucgaagagguuaugaacauugugcugaucgcccucagccugcuugcuauucugaaggggaucuacaauguggccacaugcggacucuucggccuggucuccuuucuucugcucugugggagaucuugcagcacgaccuauaaaggaguguacgaacugcagacacuggagcucgacauggcgucccugaacauguguaugccucuuucuugcaccaagaauaacagccaucacuauaucaugguuggcaaugaaacagggcuggagcucacccugacaaacaccuccauuaucaaucauaaauucuguaaccuuucugaugcucacaagaaaaaucuguacgaccaugcccucaugagcauuaucuccacguuucaccugagcauuccgaacuucaaucaguaugaggccaugucuugcgauuuuaacggaggcaagaucuccgugcaguacaaucugagccacgcuuaugccgucgacgcugccaaccauuguggcaccauugcgaauggggugcuccaaacauucaugcggauggccuggggaggcucuuacaucgcucuggauuccgggaagggaagcugggacugcaucaugaccucuuaccaguaucuuauuauccagaacacaaccugggaagaucacugucaguuuucccgccccagcccuauuggcuaccuggggcuccugucccaaagaacgcgggacaucuauauuucucgcagacuucugggaacauucaccuggacacucagcgauuccgagggcaacgaaacccccggcggguacugccugacccgguggaugcugaucgaggccgagcucaaauguuuuggaaauacagcuguugccaagugcaacgaaaaacaugacgaggaguucugcgauaugcugcgccuuuuugacuucuguaagcaggcgaucagacggcugaaaacgccugcccagaugagcauucagcucaucaauaaggcugugaacgcccugauuaaugaucaacuuaucaugaagaaccaucugcgcgacauuaugggcauccccuauugcaauuacucuaaauauuguuaccucaaccacaccgucacagggaagaccucccugccuagaugcugucuggugagcaauggaucuuaccucaacgaaacacacuucagcgacgauaucgaacagcaggcugacaauaugauuaccgagcugcuucaaaaagaguauauggaucggcagggcaagacgccgcuggggcucguggaccuguuugucuucuccacaucuuuuuaccugaucagcauuuuccuucaccucaucaaaauucccacccaucgccacaucaccggaaagccuugccccaaaccucauagacugaaccacaugggcauuuguuccugcggccuguauaagcaccccgggguuccggugaaguggaaacggugaggacuaguuauaagacugacuagcccgaugggccucccaacgggcccuccuccccuccuugcaccgagauuaaucaaaggcucuuuucagagccaccaaaaaaaaaaaaaaaaaaaaaaaaaaaaaaaaaaaaaaaaaaaaaaaaaaaaaaaaaaaaaaaaaaaaaaaaaaaaaaaaaaaaaaaaaaaaaaaaaaaaa

SEQ ID NO: 34670 - RNA, 1686 nt, Artificial Sequence
  mRNA product Design i-3 (hSL-A100) comprising derived and/or modified sequence from LASV(ISTH2010-NIG-2012;Clade II)__AIT17482__GPCmut8 (opt5)
aggagaaagcuuaccaugggccagaucauuaccuucuuucaagaggugccccacgucaucgaagagguuaugaacauugugcugaucgcccucagccugcuugcuauucugaaggggaucuacaauguggccacaugcggacucuucggccuggucuccuuucuucugcucugugggagaucuugcagcacgaccuauaaaggaguguacgaacugcagacacuggagcucgacauggcgucccugaacauguguaugccucuuucuugcaccaagaauaacagccaucacuauaucaugguuggcaaugaaacagggcuggagcucacccugacaaacaccuccauuaucaaucauaaauucuguaaccuuucugaugcucacaagaaaaaucuguacgaccaugcccucaugagcauuaucuccacguuucaccugagcauuccgaacuucaaucaguaugaggccaugucuugcgauuuuaacggaggcaagaucuccgugcaguacaaucugagccacgcuuaugccgucgacgcugccaaccauuguggcaccauugcgaauggggugcuccaaacauucaugcggauggccuggggaggcucuuacaucgcucuggauuccgggaagggaagcugggacugcaucaugaccucuuaccaguaucuuauuauccagaacauuacaugggaagaucacugucaguuuucccgccccagcccuaucggcuaccuggggcuccugucccaaagaacccgggacauuuauaucucucgcagacuucugggaacguucacauggacccucagcgauuccgagggcaacgaaacacccggcggguacugccugacccgguggaugcugaucgaggccgagcucaaauguuuuggaaauaccgcuguugccaagugcaacgaaaaacaugacgaggaguucugcgauaugcugcgccuuuuugacuucuguaagcaggcgauuagacggcugaaaacgccugcccagaugagcauccagcucauuaauaaggcugugaacgcccugaucaaugaucaacuuauuaugaagaaccaucugcgcgacaucaugggcauccccuauugcaauuacucuaaauauuguuaccucaaccacacagucaccgggaagacaucccugccuagaugcugucuggugagcaauggaucuuaccucaacgaaacccacuucagcgacgauauugaacagcaggcugacaauaugaucacagagcugcuucaaaaagaguauauugaucggcagggcaagaccccgcuggggcucguggaccuguuugucuucuccacgucuuuuuaccugaucagcauuuuccuucaccucguuaaaauccccacacaucgccacguggugggaaagccuugccccaaaccucauagacugaaccacaugggcauuuguuccugcggccuguauaagcaccccggggucccggugaaguggaaacggugaggacuaguuauaagacugacuagcccgaugggccucccaacgggcccuccuccccuccuugcaccgagauuaaucaaaggcucuuuucagagccaccaaaaaaaaaaaaaaaaaaaaaaaaaaaaaaaaaaaaaaaaaaaaaaaaaaaaaaaaaaaaaaaaaaaaaaaaaaaaaaaaaaaaaaaaaaaaaaaaaaaaa

SEQ ID NO: 34671 - RNA, 1686 nt, Artificial Sequence
  mRNA product Design i-3 (hSL-A100) comprising derived and/or modified sequence from LASV(Lassa virus/H.sapiens-wt/NGA/2015/ISTH_0543;Clade II)__AVO03639__GPCmut8 (opt5)
aggagaaagcuuaccaugggccagaucauuaccuucuuucaagaggugccccacgucaucgaagagguuaugaacauugugcugaucgcccucagccugcuugcuauucugaaggggaucuacaauguggccacaugcggacucuucggccuggucuccuuucuucugcucugugggagaucuugcagcacgaccuauaaaggaguguacgaacugcagacacuggagcucgacauggcgaaccugaauauguguaugccucuuuccugcaccaagaacaauucucaucacuauaucaugguuggcaacgaaacagggcuggagcucacccugacaaauaccagcauuaucaaccauaaauucuguaaucuuuccgaugcucacaagaaaaaccuguacgaccaugcccucaugucuauuaucagcacguuucaccuguccauuccgaauuucaaccaguaugaggccaugagcugcgauuuuaauggaggcaagaucucugugcaguacaaccugucccacaccuaugcugucgacgccgcuaaucauuguggcacaauugccaacggggugcuccaaaccuucaugcggauggcguggggaggcagcuacaucgcccuggauucugggaagggauccugggacugcaucaugacaagcuaccaguaucuuguuauucagaacaccacgugggaagaucacugucaguuuucucgccccuccccuaucggcuaccuggggcuccugagccaaagaacacgggacauuuauaucucccgcagacuucugggaaccuucacauggacccucucugauagcgagggcaaugaaacccccggcggguacugccugacacgguggaugcugauugaggcugagcucaaauguuuuggaaacacggccguggcuaagugcaaugaaaaacaugacgaggaguucugcgauaugcugcgccuuuuugacuucuguaagcaggccaucagacggcugaaaaccccugcgcagauguccauccagcucauuaacaaggccgucaaugcucugaucaacgaucaacuuauuaugaagaaucaucugcgcgacaucaugggcauucccuauugcaacuacagcaaauauuguuaccucaaucacacagugaccgggaagacaucucugccuagaugcugucugguguccaacggaagcuaccucaaugaaacccacuucucugacgauaucgaacagcaggccgacaacaugaucacggagcugcuucaaaaagaguauauugaucggcagggcaagacaccgcuggggcucgucgaccuguuuguuuucagcaccuccuuuuaccugaucucuauuuuccuucaccucgugaaaauccccacccaucgccacauuacaggaaagccuugccccaaaccucauagacugaaucacaugggcaucuguagcugcggccuguauaagcaccccggggugccggucaaguggaaacggugaggacuaguuauaagacugacuagcccgaugggccucccaacgggcccuccuccccuccuugcaccgagauuaaucaaaggcucuuuucagagccaccaaaaaaaaaaaaaaaaaaaaaaaaaaaaaaaaaaaaaaaaaaaaaaaaaaaaaaaaaaaaaaaaaaaaaaaaaaaaaaaaaaaaaaaaaaaaaaaaaaaaa

SEQ ID NO: 34672 - RNA, 1686 nt, Artificial Sequence
  mRNA product Design i-3 (hSL-A100) comprising derived and/or modified sequence from LASV(Lassa virus/H.sapiens-wt/NGA/2016/ISTH_0009;Clade II)__AVO03571__GPCmut8 (opt5)
aggagaaagcuuaccaugggccagaucauuaccuucuuucaagaggugccccacgucaucgaagagguuaugaacauugugcugaucgcccucagccugcuugcuauucugaaggggaucuacaauguggccacaugcggacuccugggccuugucuccuuccugcuccugugugggagaucuugcagcacgaccuauaaaggaguguacgaacugcagacacucgagcuggacauggcgucccuuaacauguguaugccucugucuugcaccaagaauaacagccaucacuauaucaugguuggcaaugaaacagggcucgagcugacccuuacaaacaccuccauuaucaaucauaaauuuuguaaccugucugaugcucacaagaaaaaucucuacgaccaugcccugaugagcauuaucuccacguuccaccugagcauuccgaacuuuaaucaguaugaggccaugucuugcgauuucaacggaggccggaucuccgugcaguacaaucucagccacucuuaugcugucgacgccgcuaaccauuguggcaccauugccaauggggugcugcaaacauuuaugcgcauggcguggggaggcuccuacaucgcccuugauagcgggaagggaucuugggacugcaucaugaccuccuaccaguaucugauuauccagaacacaaccugggaagaucacugucaguucagcagacccuccccuauuggcuaccucgggcugcuuucucaacggacgcgcgacaucuauauuagcagacggcugcucggaacauuuaccuggacacuguccgauagcgagggcaacgaaacccccggcggguacugccugacccgcuggaugcucaucgaggcugagcugaaguguuucggaaauacagccguugcuaaaugcaacgaaaagcaugacgaggaauuuugcgauaugcuuagacuguucgacuuuuguaaacaggccauccggcgccucaagacgccugcgcagaugucuauucagcugaucaauaaagccgugaacgcucuuauuaaugaucaacugaucaugaagaaccaccucagagacauuaugggcauccccuauugcaauuacuccaaguauuguuaccugaaccacaccgucacagggaaaaccagccugccucggugcugucucgugucuaauggaagcuaccugaacgagacacauuucuccgacgauaucgaacagcaggccgacaauaugauuaccgagcuucugcaaaaggaguauaucgaucgccagggcaaaacgccgcucgggcugguggaccuguucgucuuuucuaccagcuucuaccuuauuuccaucuuucuccaccugguuaagauucccacacauagacacaucaccggaaaaccuugccccaagccucaucggcugaaccacaugggcauuuguagcugcggccucuauaaucaccccggggugccggugaaauggaagcgcugaggacuaguuauaagacugacuagcccgaugggccucccaacgggcccuccuccccuccuugcaccgagauuaaucaaaggcucuuuucagagccaccaaaaaaaaaaaaaaaaaaaaaaaaaaaaaaaaaaaaaaaaaaaaaaaaaaaaaaaaaaaaaaaaaaaaaaaaaaaaaaaaaaaaaaaaaaaaaaaaaaaaa

SEQ ID NO: 34673 - RNA, 1686 nt, Artificial Sequence
  mRNA product Design i-3 (hSL-A100) comprising derived and/or modified sequence from LASV(Lassa virus/H.sapiens-wt/NGA/2016/ISTH_0017;Clade II)__AVO03567__GPCmut8 (opt5)
aggagaaagcuuaccaugggccagaucauuaccuucuuucaagaggugccccacgucaucgaagagguuaugaacauugugcugaucgcccucagccugcuugcuauucugaaggggaucuacaauguggccacaugcggacucuucggccuggucuccuuucuucugcucugugggagaucuugcagcacgaccuauaaaggaguguacgaacugcagacacuggagcucgacauggcgucccugaacauguguaugccucuuucuugcaccaagaauaacagccaucacuauaucaugguuggcaaugaaacagggcuggagcucacccugacaaacaccuccauuaucaaucauaaauucuguaaccuuucugaugcucacaagaaaaaucuguacgaccaugcccucaugagcauuaucuccacguuucaccugagcauuccgaacuucaaucaguaugaggccaugucuugcgauuuuaacggaggcaagaucuccgugcaguacaaucugagccacaccuaugcuauugacgccgcuaaccauuguggcacaaucgccaaugggguccuccaaaccuucaugcggauggcguggggaggcucuuacaucgcccuggauuccgggaagggaagcugggacugcauuaugacaucuuaccaguaucuuaucauucagaacaccacgugggaagaucacugucaguuuucccgccccagcccuaucggcuaccuggggcuccugucccaaagaacacgggacauuuauaucucucgcagacuucugggaaccuucacauggacccucagcgauuccgagggcaacgaaacccccggcggguacugccugacacgguggaugcugaucgaggcugagcucaaauguuuuggaaauacggccguggcuaagugcaacgaaaaacaugacgaggaguucugcgauaugcugcgccuuuuugacuucuguaagcaggccauuagacggcugaaaaccccugcgcagaugagcauccagcucauuaauaaggccguuaacgcucugaucaaugaucaacuuauuaugaagaaccaucugcgcgacaucaugggcauccccuauugcaauuacucuaaauauuguuaccucaaccacacagugaccgggaagacaucccugccuagaugcugucuggucagcaauggaucuuaccucaacgaaacccacuucagcgacgauauugaacagcaggccgacaauaugaucacggagcugcuucaaaaagaguauauggaucggcagggcaagacaccgcuggggcucguggaccuguuuguguucuccaccucuuuuuaccugauuagcaucuuccuucaccucguccgcauucccacccauagacacguuaucggaaaaccuugccccaagccucaucggcugaaccacaugggcauuuguuccugcggccuguauaaacaccccggggugccggugaaguggaagcgcugaggacuaguuauaagacugacuagcccgaugggccucccaacgggcccuccuccccuccuugcaccgagauuaaucaaaggcucuuuucagagccaccaaaaaaaaaaaaaaaaaaaaaaaaaaaaaaaaaaaaaaaaaaaaaaaaaaaaaaaaaaaaaaaaaaaaaaaaaaaaaaaaaaaaaaaaaaaaaaaaaaaaa

SEQ ID NO: 34674 - RNA, 1686 nt, Artificial Sequence
  mRNA product Design i-3 (hSL-A100) comprising derived and/or modified sequence from LASV(Lassa virus/H.sapiens-wt/NGA/2018/ISTH_0959;Clade II)__AVV65099__GPCmut8 (opt5)
aggagaaagcuuaccaugggccagaucauuaccuucuuucaagaggugccccacgucaucgaagagguuaugaacauugugcugaucgcccucagccugcuugcuauucugaaggggaucuacaauguggucacaugcggacucuucggccugguguccuuucuucugcucugugggagaucuugcagcacgaccuauaaaggaguuuacgaacugcagacacuggagcucgacauggccucccugaacauguguaugccucuuucuugcaccaagaauaacagccaucacuauaucauggugggcaaugaaacagggcuggagcucacccugacaaacaccuccauuaucaaucauaaauucuguaaccuuucugaugcgcacaagaaaaaucuguacgaccaugcucucaugagcauuaucuccacguuucaccugagcauuccgaacuucaaucaguaugaggccaugucuugcgauuuuaacggaggcaagaucuccguccaguacaaucugagccacgccuaugcuauugacgccgcuaaccauuguggcaccaucgccaauggggugcuccaaacauucaugcggauggcguggggaggcucuuacaucgcccuggauuccgggaagggaagcugggacugcauuaugaccucuuaccaguaucuuaucauucagaacacaaccugggaagaucacugucaguuuucccgccccagcccuaucggcuaccuggggcuccugucccaaagaacgcgggacauuuauaucucucgcagacuucugggaacauucaccuggacacucagcgauuccgagggcaacgaaacccccggcggguacugccugacccgguggaugcugaucgaggcugagcucaaauguuuuggaaauacagccguugcuaagugcaacgaaaaacaugacgaggaguucugcgauaugcugcgccuuuuugacuucuguaagcaggccauuagacggcugaaaacgccugcgcagaugagcauccagcucauuaauaaggccgugaacgcucugaucaaugaucaacuuauuaugaagaaccaucugcgcgacaucaugggcauccccuauugcaauuacucuaaauauuguuaccucaaccacaccgucacagggaagaccucccugccuagaugcugucuggugagcaauggaucuuaccucaacgaaacacacuucagcgacgauauugaacagcaggccgacaauaugaucaccgagcugcuucaaaaagaguauauugaucggcagggcaagacgccgcuggggcucguggaccuguuugucuucuccacaucuuuuuaccugaucagcauuuuccuucaccucguuaaaauccccacccaucgccacgugauuggaaagccuugccccaaaccucauagacugaaccacaugggcaucuguuccugcggccuguauaagcaccccggggugccggucaaguggaaacggugaggacuaguuauaagacugacuagcccgaugggccucccaacgggcccuccuccccuccuugcaccgagauuaaucaaaggcucuuuucagagccaccaaaaaaaaaaaaaaaaaaaaaaaaaaaaaaaaaaaaaaaaaaaaaaaaaaaaaaaaaaaaaaaaaaaaaaaaaaaaaaaaaaaaaaaaaaaaaaaaaaaaa

SEQ ID NO: 34675 - RNA, 1686 nt, Artificial Sequence
  mRNA product Design i-3 (hSL-A100) comprising derived and/or modified sequence from LASV(LASV003-NIG-2008;Clade II)__AIT17580__GPCmut8 (opt5)
aggagaaagcuuaccaugggccagaucauuaccuucuuucaagaggugccccacgucaucgaagagguuaugaacauugugcugaucgcccucagccugcuugcuauucugaaggggaucuacaauguggccacaugcggacucuucggccuggucuccuuucuucugcucugugggagaucuugcagcacgaccuauaaaggaguguacgaacugcagacacuggagcucgacauggcgucccugaacauguguaugccucuuucuugcaccaagaauaacagccaucacuauaucaugguuggcaaugaaacagggcuggagcucacccugacaaacaccuccauuaucaaucauaaauucuguaaccuuucugaugcucacaagaaaaaucuguacgaccaugcccucaugagcauuaucuccacguuucaccugagcauuccgaacuucaaucaguaugaggccaugucuugcgauuuuaacggaggcaagaucuccgugcaguacaaucugagccacaccuaugcugucgacgccgcuaaccauuguggcacaauugccaauggggugcuccaaaccuucaugcggauggcguggggaggcucuuacaucgcccuggauuccgggaagggaagcugggacugcaucaugacaucuuaccaguaucuuauuauccagaacaccacgugggaagaucacugucaguuuucccgccccagcccuauuggcuaccuggggcuccugucccaaagaacacgggacaucuauauuucucgcagacuucugggaaccuucacauggacccucagcgauuccgagagcaacgaaacccccggcggcuacugccugacacgguggaugcugaucgaggcugagcucaaauguuuugggaauacggccguugcuaagugcaacgaaaaacaugacgaggaguucugcgauaugcugcgccuuuuugacuucuguaagcaggccaucagacggcugaaagcgccugcccagaugucuauucagcucaucaauaaggcugugaacgcccugauuaaugaucaacuuaucaugaagaaccaucugcgcgacauuaugggaauccccuauugcaauuacuccaaauauuguuaccucaaccacaccgucacaggcagaaccagccugccucggugcugucuggugucuaaugggagcuaccucaacgaaacacacuucuccgacgauaucgaacagcaggcugacaauaugauuaccgagcugcuucaaaaggaguauauggaucgccagggaaaaacgccgcugggccucguggaccuguuugucuucucuaccagcuuuuaccugaucuccauuuuccuucaccucguuaagauccccacacauagacacgugauugggaaaccuugccccaagccucaucggcugaaccacaugggaaucuguagcugcggccuguauaaacaccccggcgugccggucaaguggaagcgcugaggacuaguuauaagacugacuagcccgaugggccucccaacgggcccuccuccccuccuugcaccgagauuaaucaaaggcucuuuucagagccaccaaaaaaaaaaaaaaaaaaaaaaaaaaaaaaaaaaaaaaaaaaaaaaaaaaaaaaaaaaaaaaaaaaaaaaaaaaaaaaaaaaaaaaaaaaaaaaaaaaaaa

SEQ ID NO: 34676 - RNA, 1686 nt, Artificial Sequence
  mRNA product Design i-3 (hSL-A100) comprising derived and/or modified sequence from LASV(LASV035-NIG-2009;Clade II)__AIT17588__GPCmut8 (opt5)
aggagaaagcuuaccaugggccagaucauuaccuucuuucaagaggugccccacgucaucgaagagguuaugaacauugugcugaucgcccucagccugcuugcuauucugaaggggaucuacaauguggccacaugcggacucuucggccuggucuccuuucuucugcucugugggagaucuugcagcacgaccuauaaaggaguguacgaacugcagacacuggagcucgacauggcgucccugaacauguguaugccucuuucuugcaccaagaauaacagccaucacuauaucaugguuggcaaugaaacagggcuggagcucacccugacaaacaccuccauuaucaaucauaaauucuguaaccuuucugaugcucacaagaaaaaucuguacgaccaugcccucaugagcauuaucuccacguuucaccugagcauuccgaacuucaaucaguaugaggccaugucuugcgauuuuaacggaggcaagaucuccgugcaguacaaucugagccacgcuuaugccgucgacgcugccaaccauuguggcaccauugcgaauggggugcuccaaacauucaugcggauggccuggggaggcucuuacaucgcucuggauuccgggaagggaagcugggacugcaucaugaccucuuaccaguaucuuauuauccagaacacaaccugggaagaucacugucaguuuucccgccccagcccuauuggcuaccuggggcuccugucccaaagaacgcgggacaucuauauuucucgcagacuucugggaacauucaccuggacacucagcgauuccgagggcaacgaaacccccggcggguacugccugacccgguggaugcugaucgaggccgagcucaaauguuuuggaaauacagcuguugccaagugcaacgaaaaacaugacgaggaguucugcgauaugcugcgccuuuuugacuucuguaagcaggcgaucagacggcugaaagccccugcucagaugagcauucagcucaucaauaaggccgugaacgcucugauuaaugaucaacuuaucaugaagaaccaucugcgcgacauuaugggcauccccuauugcaauuacucuaaauauuguuaccucaaccacacggucaccgggaagacaucccugccuagaugcugucuggugagcaauggaucuuaccucaacgaaacccacuucagcgacgauaucgaacagcaggccgacaauaugauuacagagcugcuucaaaaagaguauaucgaucggcagggcaagaccccgcuggggcucguggaccuguuugucuucuccacgucuuuuuaccugauuagcaucuuccuucaccucguuaaaauucccacacaucgccacgugaucggaaagccuugccccaaaccucauagacugaaccacaugggcauuuguuccugcggccuguauaagcaccccggggugccggucaaguggaaacggugaggacuaguuauaagacugacuagcccgaugggccucccaacgggcccuccuccccuccuugcaccgagauuaaucaaaggcucuuuucagagccaccaaaaaaaaaaaaaaaaaaaaaaaaaaaaaaaaaaaaaaaaaaaaaaaaaaaaaaaaaaaaaaaaaaaaaaaaaaaaaaaaaaaaaaaaaaaaaaaaaaaaa

SEQ ID NO: 34677 - RNA, 1686 nt, Artificial Sequence
  mRNA product Design i-3 (hSL-A100) comprising derived and/or modified sequence from LASV(LASV1000-NIG-2009;Clade II)__AIT17782__GPCmut8 (opt5)
aggagaaagcuuaccaugggccagaucauuaccuucuuucaagaggugccccacgucaucgaagagguuaugaacauugugcugaucgcccucagccugcuugcuauucugaaggggaucuacaauguggccacaugcggacucuucggccuggucuccuuucuucugcucugugggagaucuugcagcacgaccuauaaaggaguguacgaacugcagacacuggagcucgacauggcgucccugaacauguguaugccucuuucuugcaccaagaauaacagccaucacuauaucaugguuggcaaugaaacagggcuggagcucacccugacaaacaccuccauuaucaaucauaaauucuguaaccuuucugaugcucacaagaaaaaucuguacgaccaugcccucaugagcauuaucuccacguuucaccugagcauuccgaacuucaaucaguaugaggccaugucuugcgauuuuaacggaggcaagaucuccgugcaguacaaucugagccacaccuaugcugucgacgccgcuaaccauuguggcacaauugccaauggggugcuccaaaccuucaugcggauggcguggggaggcucuuacaucgcccuggauuccgggaagggaagcugggacugcaucaugacaucuuaccaguaucuuauuauccagaacaccacgugggaagaucacugucaguuuucccgccccagcccuauuggcuaccuggggcuccugucccaaagaacacgggacaucuauauuucucgcagacuucugggaaccuucacauggacccucagcgauuccgagggcaacgaaacccccggcggguacugccugacacgguggaugcugaucgaggcugagcucaaauguuuuggaaauacggccguugcuaagugcaacgaaaaacaugacgaggaguucugcgauaugcugcgccuuuuugacuucuguaagcaggccaucaaaagacugaagaccccugcgcagaugagcauucagcucaucaauaaggccgugaacgcucugauuaaugaucaacuuaucaugaaaaaccaucugcgggacauuaugggcauccccuauugcaauuacucuaaguauuguuaccucaaccacacagucaccgggaaaacaucccugccucgcugcugucuggugagcaauggaucuuaccucaacgaaacccacuucagcgacgauaucgaacagcaggccgacaauaugauuacggagcugcuucaaaaggaguauaucgauagacagggcaaaacaccgcuggggcucguggaccuguuugucuucuccaccucuuuuuaccugauuagcaucuuccuucaccucguuaagauucccacccaucggcacguggugggaaaaccuugccccaagccucaucgccugaaccacaugggcaucuguuccugcggccuguauaagcaccccggggucccggugaaauggaagagaugaggacuaguuauaagacugacuagcccgaugggccucccaacgggcccuccuccccuccuugcaccgagauuaaucaaaggcucuuuucagagccaccaaaaaaaaaaaaaaaaaaaaaaaaaaaaaaaaaaaaaaaaaaaaaaaaaaaaaaaaaaaaaaaaaaaaaaaaaaaaaaaaaaaaaaaaaaaaaaaaaaaaa

SEQ ID NO: 34678 - RNA, 1686 nt, Artificial Sequence
  mRNA product Design i-3 (hSL-A100) comprising derived and/or modified sequence from LASV(LASV221-NIG-2010;Clade II)__AIT17624__GPCmut8 (opt5)
aggagaaagcuuaccaugggccagaucauuaccuucuuucaagaggugccccacgucaucgaagagguuaugaacauugugcugaucgcccucagccugcuugcuauucugaaggggaucuacaauguggccacaugcggacucuucggccuggucuccuuucuucugcucugugggagaucuugcagcacgaccuauaaaggaguguacgaacugcagacacuggagcucgacauggcgucccugaacauguguaugccucuuucuugcaccaagaauaacagccaucacuauaucaugguuggcaaugaaacagggcuggagcucacccugacaaacaccuccauuaucaaucauaaauucuguaaccuuucugaugcucacaagaaaaaucuguacgaccaugcccucaugagcauuaucuccacguuucaccugagcauuccgaacuucaaucaguaugaggccaugucuugcgauuuuaacggaggcaagaucuccgugcaguacaaucugagccacaccuaugcuauugacgccgcuaaccauuguggcacaaucgccaaugggguccuccaaaccuucaugcggauggcguggggaggcucuuacaucgcccuggauuccgggaagggaagcugggacugcauuaugacaucuuaccaguaucuuaucauucagaacaccacgugggaagaucacugucaguuuucccgccccagcccuaucggcuaccuggggcuccugucccaaagaacacgggacauuuauaucucucgcagacuucugggaaccuucacauggacccucagcgauuccgagggcaacgaaacccccggcggguacugccugacacgguggaugcugaucgaggcugagcucaaauguuuuggaaauacggccguggcuaagugcaacgaaaaacaugacgaggaguucugcgauaugcugcgccuuuuugacuucuguaagcaggccauuagacggcugaaaaccccugcgcagaugagcauccagcucauuaauaaggccguuaacgcucugaucaaugaucaacuuauuaugaagaaccaucugcgcgacaucaugggcauccccuauugcaauuacucuaaauauuguuaccucaaccacacagugaccgggaagacaucccugccuagaugcugucuggucagcaauggaucuuaccucaacgaaacccacuucagcgacgauauugaacagcaggccgacaauaugaucacggagaugcugcaaaaagaguauauggaucggcagggcaagacaccgcuugggcugguggaccucuuuguguucuccaccucuuuuuaccugauuagcaucuuccugcaccuugucaaaauucccacccaucgccacguuaucggaaagccuugccccaaaccucauagacucaaccacaugggcauuuguuccugcggccuguauaagcaccccggggugccggugaaguggaaacggugaggacuaguuauaagacugacuagcccgaugggccucccaacgggcccuccuccccuccuugcaccgagauuaaucaaaggcucuuuucagagccaccaaaaaaaaaaaaaaaaaaaaaaaaaaaaaaaaaaaaaaaaaaaaaaaaaaaaaaaaaaaaaaaaaaaaaaaaaaaaaaaaaaaaaaaaaaaaaaaaaaaaa

SEQ ID NO: 34679 - RNA, 1686 nt, Artificial Sequence
  mRNA product Design i-3 (hSL-A100) comprising derived and/or modified sequence from LASV(LASV237-NIG-2010;Clade II)__AIT17638__GPCmut8 (opt5)
aggagaaagcuuaccaugggccagaucauuaccuucuuucaagaggugccccacgucaucgaagagguuaugaacauugugcugaucgcccucagccugcuugcuauucugaaggggaucuacaauguggccacaugcggacucuucggccuggucuccuuucuucugcucugugggagaucuugcagcacgaccuauaaaggaguguacgaacugcagacacuggagcucgacauggcgucccugaacauguguaugccucuuucuugcaccaagaauaacagccaucacuauaucaugguuggcaaugaaacagggcuggagcucacccugacaaacaccuccauuaucaaucauaaauucuguaaccuuucugaugcucacaagaaagaccuguacgaucaugcccucaugagcauuaucuccacguuucaccugagcauuccgaauuucaaccaguaugaggccaugucuugcgacuuuaauggaggcaagaucuccgugcaguacaaccugagccacaccuaugcugucgaugccgcuaaucauuguggcacaauugccaacggggugcuccaaaccuucaugcggauggcguggggaggcucuuacaucgcccuggacuccgggaagggaagcugggauugcaucaugacaucuuaccaguaucuuauuauccagaauaccacgugggaagaccacugucaguuuucccgccccagcccuauuggcuaccuggggcuccugucccaaagaacacgggauaucuauauuucucgcagacuucugggaaccuucacauggacccucagcgacuccgagggcaacgaaacccccggcggguacugccugacacgguggaugcugaucgaggcugagcucaaauguuuuggaaacacggccguugcuaagugcaaugaaaaacaugaugaggaguucugcgacaugcugcgccuuuuugauuucuguaagcaggccaucagacggcugaaaaccccugcgcagaugagcauucagcucaucaacaaggccgugaaugcucugauuaacgaccaacuuaucaugaagaaucaucugcgcgacauuaugggcauccccuauugcaacuacucuaaauauuguuaccucaaucacacagucaccgggaagacaucccugccuagaugcugucuggugagcaacggaucuuaccucaaugaaacccacuucagcgaugacaucgaacagcaggccgauaacaugauuacggagcugcuucaaaaagaguauauggaccggcagggcaagacaccgcuggggcucguggaucuguuugucuucuccaccucuuuuuaccugaucagcauuuuccuucaccucaucaaaauucccacccaucgccacaucacaggaaagccuugccccaaaccucauagacugaaucacaugggcauuuguuccugcggccuguauaagcaccccgggguuccggugaaguggaaacggugaggacuaguuauaagacugacuagcccgaugggccucccaacgggcccuccuccccuccuugcaccgagauuaaucaaaggcucuuuucagagccaccaaaaaaaaaaaaaaaaaaaaaaaaaaaaaaaaaaaaaaaaaaaaaaaaaaaaaaaaaaaaaaaaaaaaaaaaaaaaaaaaaaaaaaaaaaaaaaaaaaaaa

SEQ ID NO: 34680 - RNA, 1686 nt, Artificial Sequence
  mRNA product Design i-3 (hSL-A100) comprising derived and/or modified sequence from LASV(LASV253-NIG-2011;Clade II)__AIT17670__GPCmut8 (opt5)
aggagaaagcuuaccaugggccagaucauuaccuucuuucaagaggugccccacgucaucgaagagguuaugaacauugugcugaucgcccucagccugcuugcuauucugaaggggaucuacaauguggccacaugcggacucuucggccuggucuccuuucuucugcucugugggagaucuugcagcacgaccuauaaaggaguguacgaacugcagacacuggagcucgacauggcgucccugaacauguguaugccucuuucuugcaccaagaauaacagccaucacuauaucaugguuggcaaugaaacagggcuggagcucacccugacaaacaccuccauuaucaaucauaaauucuguaaccuuucugaugcucacaagaaaaaucuguacgaccaugcccucaugagcauuaucuccacguuucaccugagcauuccgaacuucaaucaguaugaggccaugucuugcgauuuuaacggaggcaagaucuccgugcaguacaaucugagccacaccuaugcugucgacgccgcuaaccauuguggcacaauugccaauggggugcuccaaaccuucaugcggauggcguggggaggcucuuacaucgcccuggauuccgggaagggaagcugggacugcaucaugacaucuuaccaguaucuuauuauccagaacaccacgugggaagaucacugucaguuuucccgccccagcccuauuggcuaccuggggcuccugucccaaagaacacgggacaucuauauuucucgcagacuucugggaaccuucacauggacccucagcgauuccgagggcaacgaaacccccggcggguacugccugacacgguggaugcugaucgaggcugagcucaaauguuuuggaaauacggccguugcuaagugcaacgaaaaacaugacgaggaguucugcgauaugcugcgccuuuuugacuucuguaagcaggccaucagacggcugaaagcgccugcccagaugagcauucagcucaucaauaaggcugugaacgcccugauuaaugaucaacuuaucaugaagaaccaucugcgcgacauuaugggcauccccuauugcaauuacucuaaauauuguuaccucaaccacaccgucacagggagaaccucccugccucggugcugucuggugagcaauggaucuuaccucaacgaaacacacuucagcgacgauaucgaacagcaggcugacaauaugauuaccgagcugcuucaaaaggaguauaucgaucgccagggcaaaacgccgcuggggcucguggaccuguuugucuucuccacaucuuuuuaccugauuagcaucuuccuucaccucguuaagauucccacccauagacacaucauuggaaaaccuugccccaagccucaucggcugaaccacaugggcaucuguuccugcggccuguauaaacaccccggggugccggugaaguggaagcgcugaggacuaguuauaagacugacuagcccgaugggccucccaacgggcccuccuccccuccuugcaccgagauuaaucaaaggcucuuuucagagccaccaaaaaaaaaaaaaaaaaaaaaaaaaaaaaaaaaaaaaaaaaaaaaaaaaaaaaaaaaaaaaaaaaaaaaaaaaaaaaaaaaaaaaaaaaaaaaaaaaaaaa

SEQ ID NO: 34681 - RNA, 1686 nt, Artificial Sequence
  mRNA product Design i-3 (hSL-A100) comprising derived and/or modified sequence from LASV(LASV254-NIG-2011;Clade II)__AIT17674__GPCmut8 (opt5)
aggagaaagcuuaccaugggccagaucauuaccuucuuucaagaggugccccacgucaucgaagagguuaugaacauugugcugaucgcccucagccugcuugcuauucugaaggggaucuacaauguggccacaugcggacucuucggccuggucuccuuucuucugcucugugggagaucuugcagcacgaccuauaaaggaguguacgaacugcagacacuggagcucgacaugaccaaccugaauauguguaugccucuuuccugcacaaagaacaauucucaucacuauaucaugguuggcaacgaaaccgggcuggagcucacacugaccaauacgagcauuaucaaccauaaauucuguaaucuuuccgaugcgcacaagaaaaaccuguacaaucaugcucucaugucuauuaucagcaccuuucaccuguccauuccgaacuucaaucaguaugaggccaugagcugcgacuuuaacggaggcaagaucucugugcaguacaaucugucccacagcuaugccgucgaugcugccaaccauuguggcacaauugcuaacggggugcuccaaaccuucaugcggauggccuggggaggcucuuacaucgcgcuggacuccgggaagggaaauugggauugcaucaugacaagcuaccaguaucuuauuauccagaacaccacgugggaagaccacugucaguuuucucgccccuccccuauuggcuaccuggggcuccugagccaaagaacacgggauaucuauauuucccgcagacuucugggaaccuucacauggacccucucugacagcgagggcaaugaaacccccggcggguacugccugacacgguggaugcugaucgaggccgagcucaaauguuuuggaaacacggcuguugccaagugcaaugaaaaacaugaugaggaguucugcgacaugcugcgccuuuuugauuucuguaagcaggcuaucagacggcugaaaaccccugcccaggcgaacauucagcucaucaauaaggccgugaacgcucugauuaaugaccaacuuaucaugaagaaccaucugcgcgauauuaugggcauccccuauugcaauuacuccaaauauuguuaccucaaccacacagucaccgggaagacaagccugccuagaugcugucuggugucuaauggauccuaccucaacgaaacccacuucagcgacgacaucgaacagcaggccgauaauaugauuacggagcugcuucaaaaagaguauauggaccggcagggcaagacaccgcuggggcucguggaucuguuugucuucucuaccagcuuuuaccugaucuccauuuuccuucaccucguuaaaauccccacccaucgccacgugauuggaaagccuugccccaaaccucauagacugaaccacaugggcaucuguucuugcggccuguauaagcaccccggggugccggucaaguggaaacggugaggacuaguuauaagacugacuagcccgaugggccucccaacgggcccuccuccccuccuugcaccgagauuaaucaaaggcucuuuucagagccaccaaaaaaaaaaaaaaaaaaaaaaaaaaaaaaaaaaaaaaaaaaaaaaaaaaaaaaaaaaaaaaaaaaaaaaaaaaaaaaaaaaaaaaaaaaaaaaaaaaaaa

SEQ ID NO: 34682 - RNA, 1686 nt, Artificial Sequence
  mRNA product Design i-3 (hSL-A100) comprising derived and/or modified sequence from LASV(Nig08-A19;Clade III)__ADU56618__GPCmut8 (opt5)
aggagaaagcuuaccaugggccagaucgugaccuucuuucaagaggucccccacguuauugaagaggugaugaacaucgugcugauugcccucagcauccuggcuauucuuaaggggcuguacaauaucgccacaugcggacucaucggccuggucacguuccuucugcucuccgggagaucuuguagcaugaccuauaaaggaguguacgaacugcagacacuggagcucaacaugaauacccugaacaugugcaugccucuuuccuguacaaagaauaacucucaucacuauauuaugguuggcaaugaaaccgggcuggagcucacacugaccaacacgagccuucugcaucacaaauuuugcaaucucuccgacgcgcauaagaaaaaccuguacgaucacacccugaugucuaucauuagcacauuccaccucuccaucccgaauuuuaaccaguaugaggcuaugagcugugacuucaauggaggcaagauuaccgugcaguacaaccugucucauuccuaugccaucgaugccgcuaaucacugcggcacagucgccaacggggugcuucaaaccuuuaugcggauggcuuggggaggcagcuacauugcccuggacucugggcgcggaaagugggauuguaucaugacguccuaccaguaucucaucauucagaacacaaccugggaagaccauugccaguucagcagacccucuccuaucggcuaccuggggcuucugucccaacggacacgcgauauuuauaucagcagacggcuccugggaaccuuuaccuggacacuguccgacucugagggcaaugaaacgcccggcggguacugucucacccgcuggaugcugauugaggcggagcuuaaaugcuucggaaacacagccguugcuaaguguaaugaaaaacacgaugaggaauuuugcgacaugcugagacucuucgauuuuugcaagcaggccauccggcgccugaaagcuccugcccagaugagcauccagcuuauuaacaaggcggugaaugcccugaucaacgaccaacucauuaugaagaaucaccugagagauaucaugggcauucccuauuguaacuacuccaaauauugcuaccugaaucauaccagcacagggcggaccucucucccucgcuguugccuggucuccaacggaagcuaccuuaaugagacgcacuucucugacgacaucgaacagcaggcugauaacaugaucacagagaugcugcaaaaggaguaucucgacagacagggcaaaaccccgcuggggcugguggaucuuuucguguuuagcaccuccuucuaccucauuucuaucuuucugcaucuggucaagauucccacacaccggcauaucguuggaaaaccuugucccaagccucaccgccucaaucacaugggcauuugcagcuguggccuguauaaacagcccggggugccggugagauggaagcggugaggacuaguuauaagacugacuagcccgaugggccucccaacgggcccuccuccccuccuugcaccgagauuaaucaaaggcucuuuucagagccaccaaaaaaaaaaaaaaaaaaaaaaaaaaaaaaaaaaaaaaaaaaaaaaaaaaaaaaaaaaaaaaaaaaaaaaaaaaaaaaaaaaaaaaaaaaaaaaaaaaaaa

SEQ ID NO: 34683 - RNA, 1689 nt, Artificial Sequence
  mRNA product Design i-3 (hSL-A100) comprising derived and/or modified sequence from LASV(G1180-SLE-2010;Clade IV)__AIT17168__GPCmut8 (opt5)
aggagaaagcuuaccaugggccagaucgugaccuucuuucaagaggucccccacguuauugaagaggugaugaacaucgugcugauugcccucagcauccuggcuguccuuaaggggcuguacaauuucgccacaugcggacucgugggccugcuuacguuucugcuccugugugggagauccugcaccgcgucucgguauaaaggaguuuacgaacugcagacacucgagcugaacauggaaacccuuaauauguguaugccucugagcugcacaaagaacaauucccaucacuauauuauggugggcaacgagaccgggcucgagcugacacuuaccaauacgucuaucaucaaccauaaauucuguaaucugagcgacgcucacaagaaaaaccucuacgaucaugcccugauguccauuaucucuaccuuucaccugagcauuccgaauuucaaccaguaugaagccauguccugcgacuuuaauggaggcaagaucagcguccaguacaaccucucucacuccuaugcuggcgaugccgcuaaucauugugggacaguggccaacggaguucugcaaaccuucaugcgcauggcguggggcgggagcuacauugcccuugacucuggacacggcuccugggauugcaucaugacaagcuaccaguaucugauuauccagaacaccacgugggaggaccauugucaguuuucuagacccuccccuaucggguaccucggacugcuuagccaacggacacgcgauauuuauaucuccagacggcugcucggcaccuucacauggacccugucugacagcgaaggcaaggauacccccgggggauacugccugacacgcuggaugcucauugaggcugagcugaaauguuuuggcaauacggccguggcuaagugcaacgaaaaacacgacgaggaguucugcgauaugcuuagacuguuugacuucuguaagcaggccauccagcggcucaaagcgccugcccagauguccauucaacugaucaauaaggcugucaacgcccuuaucaaugaucagcugauuaugaagaaccaccuccgcgacaucauggggauucccuauugcaauuacagcaaauauuguuaccugaaccauaccacaaccggaaagacaucucugccuaaaugcugucucguguccaauggcagcuaccugaacgaaacccacuucucugacgauaucgaacagcaagcugacaauaugauuacggagaugcuucagaaggaguauauggaaagacaggggaaaacaccgcugggacucguggaucuguuugucuucagcaccuccuuuuaccugaucucuaucuuccuucaucucguuaagauucccacccaccggcauaucgugggcaaaagcugcccuaagccccaccgccugaaccacaugggcauuuguuccugcgggcuguauaagcagccuggagugcccgucaaauggaagagaugaggacuaguuauaagacugacuagcccgaugggccucccaacgggcccuccuccccuccuugcaccgagauuaaucaaaggcucuuuucagagccaccaaaaaaaaaaaaaaaaaaaaaaaaaaaaaaaaaaaaaaaaaaaaaaaaaaaaaaaaaaaaaaaaaaaaaaaaaaaaaaaaaaaaaaaaaaaaaaaaaaaaa

SEQ ID NO: 34684 - RNA, 1689 nt, Artificial Sequence
  mRNA product Design i-3 (hSL-A100) comprising derived and/or modified sequence from LASV(G1442-SLE-2011;Clade IV)__AIT17180__GPCmut8 (opt5)
aggagaaagcuuaccaugggccagaucgugaccuucuuucaagaggucccccacguuauugaagaggugaugaacaucgugcugauugcccucagcauccuggcuguccuuaaggggcuguacaauguggccacaugcggacucauuggccugguuacguuccuucugcucugugggagauccugcaccacaacccuguauaaaggaguguacgaacugcagacacucgagcugaacauggaaacccuuaauauguguaugccucugucuugcacaaagaacaauagccaucacuauauccgggucggcaacgagaccgggcucgagcugacgcuuaccaauacauccaucauuaaccauaaauuuuguaaucugucugacgcgcacaagaaaaaccucuacgaucaugcucugaugagcaucauuuccaccuuccaccugucuaucccgaauuuuaaccaguaugaagccaugagcugcgacuucaauggaggcaagauuuccgugcaguacaaccucagccacucuuaugccggcgaugcugccaaucauugugggacaguugcuaacggagugcugcaaaccuuuaugcgcauggccuggggcggguccuacaucgcgcuugacagcggaagaggcaacugggauugcauuaugacgucuuaccaguaucugaucauccagaauacaaccugggacgaucacugucaguucucccggcccagcccuauuggguaccucggacugcuuucucaacgcacaagagacgucuauaucucccggcgccugcucggcaccuuuaccuggacacugagcgauuccgagggcaaggacacgcccgggggauacugccugaccagauggaugcucauugaagccgagcugaaauguuucggcaacacagcuguggccaagugcaaugagaaacaugaugaagaguuuugcgacaugcuucggcuguucgauuuuuguaagcaggcuauccagcgccucaaagccccugcgcagaugucuauucaacugaucaacaaggccgugaaugcucuuaucaacgaccagcugauuaugaagaaucaccucagagacaucauggggauucccuauugcaacuacagcaaauauuguuaccugaauaacaccgccacaggaaagaccucccugccuaaaugcugucucaucagcaauggcucuuaccugaacgaaacgcacuucuccgaugacauugagcaggaagcugauaauaugaucacagagaugcuucaaaaggaguauauggaacggcaggggaaaaccccgcugggacucgucgaccuguucguuuuuagcaccucuuucuaccugaucagcauuuuucuucaucucgugaagauccccacacaccgccauauugugggcaaauccugcccuaagccccacagacugaaccauaugggcaucuguucuugcgggcuguauaagcagccuggaguccccgugcgguggaaacgcugaggacuaguuauaagacugacuagcccgaugggccucccaacgggcccuccuccccuccuugcaccgagauuaaucaaaggcucuuuucagagccaccaaaaaaaaaaaaaaaaaaaaaaaaaaaaaaaaaaaaaaaaaaaaaaaaaaaaaaaaaaaaaaaaaaaaaaaaaaaaaaaaaaaaaaaaaaaaaaaaaaaaa

SEQ ID NO: 34685 - RNA, 1689 nt, Artificial Sequence
  mRNA product Design i-3 (hSL-A100) comprising derived and/or modified sequence from LASV(G3010-SLE-2013;Clade IV)__AIT17344__GPCmut8 (opt5)
aggagaaagcuuaccaugggccagaucgugaccuucuuucaagaggucccccacguuauugaagaggugaugaacaucgugcugauugcccucagcauccuggcuguccuuaaggggcuguacaauuucgccacaugcggacucgugggccugguuacguuucuucugcucugugggagauccugcaccacaucucuguauaaaggaguguacgaacugcagacccucgagcugaacauggaaacacuuaauauguguaugccucugagcugcaccaagaacaauucccaucacuauauuauggucggcaacgagacagggcucgagcugacccuuacgaauaccucuaucaucaaccauaaauucuguaaucugagcgacgcgcacaagaaaaaccucuacaaucaugcucugauguccauuaucucuacauuucaccugagcauuccgaacuucaaucaguaugaagccauguccugcgauuuuaacggaggcaagaucagcgugcaguacaaucucucucacuccuaugccggcgacgcugccagccauugugggaccguugcuaacggagugcugcaaacauucaugcggauggccuggggcgggucuuacauugcgcuugauuccggauacggcaagugggacugcaucaugaccagcuaucaguaccugauuauccagaacacgacaugggaggaucacugucaguuuucucgccccuccccuaucggguaucucggacugcuuagccaaagaacccgggacauuuacaucucccgcagacugcucggcacauucaccuggacccugucugauagcgaaggcaaagacacacccgggggauauugccugacgcgguggaugcucauugaggccgagcugaaguguuuuggcaauaccgcugucgccaaaugcaacgaaaagcaugaugaggaguucugcgacaugcuucgccuguuugauuucuguaaacaggcuauccagagacucaagaccccugcccagauguccauucaacugaucaauaaggcggugaacgcccuuaucaaugaccagcugauuaugaaaaaccaccuccgggauaucauggggauucccuacugcaauuauagcaaguacuguuaccugaaccacacaacaaccggaaaaacgucucugccuaagugcugucucguguccaauggcagcuaucugaacgaaacacauuucucugacgacaucgaacagcaagcugauaauaugauuaccgagaugcuucagaaagaguacauggaacgccaggggaagaccccgcugggacucgucgaccuguuuguuuucagcacauccuuuuaucugaucucuaucuuccuucaccucgugaaaauucccacccauagacacaucgugggcaagagcugcccuaagccccaucggcugaaccacaugggcauuuguuccugcgggcuguacaaacagccuggaguccccgugcgcuggaagagaugaggacuaguuauaagacugacuagcccgaugggccucccaacgggcccuccuccccuccuugcaccgagauuaaucaaaggcucuuuucagagccaccaaaaaaaaaaaaaaaaaaaaaaaaaaaaaaaaaaaaaaaaaaaaaaaaaaaaaaaaaaaaaaaaaaaaaaaaaaaaaaaaaaaaaaaaaaaaaaaaaaaaa

SEQ ID NO: 34686 - RNA, 1689 nt, Artificial Sequence
  mRNA product Design i-3 (hSL-A100) comprising derived and/or modified sequence from LASV(G502-SLE-2009;Clade IV)__AIT17126__GPCmut8 (opt5)
aggagaaagcuuaccaugggccagaucgugaccuucuuucaagaggucccccacguuauugaagaggugaugaacaucgugcugauugcccucagcauccuggcuguccuuaaggggcuguacaauuucgccacaugcggacucgugggccugcuuacguuucugcuccugugugggagauccugcaccacaggacuguauaaaggcguuuacgaacuccagacccuggagcuuaacauggaaacacugaauauguguaugccucucucuugcaccaagaacaauagccaucacuauauuaugguggggaacgagacaggacuggagcuuacccugacgaauaccuccaucaucaaccauaaauucuguaaucucucugacgcgcacaagaaaaaccuguacgaucaugcucugaugagcauuaucuccacauuucaccucucuauuccgaauuucaaccaguaugaagccaugagcugcgacuuuaauggcggcaagaucuccguccaguacaaccugagccacucuuaugccggggaugcugccgaccauuguggaaccguggcuaauggcguucuucaaacauucaugcggauggccuggggaggguccuacauugcgcuggauagcggccgcgggagaugggacugcaucaugaccucuuaccaguaucucauuauccagaacacgacaugggaggaucacugucaguuuucccggcccagcccuaucggauaccugggccuucugucucaacgcaccagagacauuuauaucucccggcgccuccugggcacauucaccuggacccugagcgauuccgaagggaaggacacacccggaggcuacugccucacgagauggaugcugauugaggccgagcuuaaauguuuugggaacaccgcuguggccaagugcaaugaaaaacaugaugaggaguucugcgacaugcugcggcucuuugauuucuguaagcaggcuauccagcgccugaaagccccugcgcagaugucuauucaacuuaucaacaaggccgucaaugcucugaucaacgaccagcucgugaugaagaaucaccugagagacauuaugggaauccccuauugcaacuacagccgguauuguuaccugaaucacacaaccacaggccgcaccucccucccuaaaugcugucuggugagcaacgggucuuaccuuaaugaaacgcauuucuccgaugacauugaacagcaagccgauaacaugaucacagagaugcugcagaaggaguauauggaaagacagggaaaaaccccgcucggccuggucgaccuguuuguuuucagcaccucuuuuuaccuuauuagcaucuuccuccaccuggugaagauccccacacaucggcacauugugggcaaauccugcccuaagccccaucgccugaaucacauggggaucuguucuugcggacucuauaaacagccuggcguccccgugaaguggaagagaugaggacuaguuauaagacugacuagcccgaugggccucccaacgggcccuccuccccuccuugcaccgagauuaaucaaaggcucuuuucagagccaccaaaaaaaaaaaaaaaaaaaaaaaaaaaaaaaaaaaaaaaaaaaaaaaaaaaaaaaaaaaaaaaaaaaaaaaaaaaaaaaaaaaaaaaaaaaaaaaaaaaaa

SEQ ID NO: 34687 - RNA, 1689 nt, Artificial Sequence
  mRNA product Design i-3 (hSL-A100) comprising derived and/or modified sequence from LASV(G733-SLE-2010;Clade IV)__AIT17154__GPCmut8 (opt5)
aggagaaagcuuaccaugggccagaucgugaccuucuuucaagaggucccccacguuauugaagaggugaugaacaucgugcugauugcccucagcauccuggcuguccuuaaggggcuguacaauuucgccacaugcggaauugugggccucguuuccuuucugcuucugugugggagaucuugcacgaccagccucuauaaaggaguguacgaacugcagacacuggagcucaacauggaaacccugaauauguguaugccucuuuccugcacaaagaacaauucucaucacuauaucauggucggcaacgagaccgggcuggagcucacacugaccaauacgagcaucauuaaccauaaauucuguaaucuuuccgacgcgcacaagaaaaaccuguacgaucaugcucucaugucuaucauuagcaccuuucaccuguccaucccgaauuucaaccaguaugaagccaugagcugcgacuuuaauggaggcaagauuucugugcaguacaaccugucccacagcuaugccggcgaugcugccaaucauugugggacaaucgcuaacggaguucuccaaaccuucaugcggauggccuggggcgggucuuacauugcgcuggacuccggacgcgauagaugggacugcaucaugacaagcuaccaguaucuuaucauucagaacaccacgugggaggaucacugucaguuuucucggcccuccccuaucggcuaccuggggcuccugagccaacgcacaagagacauuuauaucucccggcgccuucugggaaccuucacauggacccucucugauagcgaaggcaaggacacccccggcggguacugccugacaagauggaugcugauugaggccgagcucaaauguuuuggaaauacggcuguggccaagugcaacgaaaaacaugaugaggaguucugcgacaugcugcggcuuuuugauuucuguaagcaggcuauccagcgccugaaagccccugcgcagauguccauccaacucauuaauaaggccgucaacgcucugaucaaugaccagcuuauuaugaagaaccaccugagagacaucaugggcauucccuauugcaauuacagcaaauauuguuaccucaaccacaccacaaccgggaagacaucucugccuaaaugcugucugguguccaauggaagcuaccucaacgaaacccauuucucugaugacaucgaacagcaagccgauaauaugaucacggagaugcugcagaaggaguauauggaacggcagggcaaaacaccgcuugggcugguggaccucuuugucuucagcaccuccuuuuaccugauuucuaucuuccugcaccuuguuaagauucccacccaucgccacguggugggaaaaagcugcccuaagccccauagacucaaccacaugggcaucuguuccugcggccuguaugggcagccuggaguccccgugaaguggaaacggugaggacuaguuauaagacugacuagcccgaugggccucccaacgggcccuccuccccuccuugcaccgagauuaaucaaaggcucuuuucagagccaccaaaaaaaaaaaaaaaaaaaaaaaaaaaaaaaaaaaaaaaaaaaaaaaaaaaaaaaaaaaaaaaaaaaaaaaaaaaaaaaaaaaaaaaaaaaaaaaaaaaaa

SEQ ID NO: 34688 - RNA, 1689 nt, Artificial Sequence
  mRNA product Design i-3 (hSL-A100) comprising derived and/or modified sequence from MOPV/LASV reassortant(IGS-1;Clade IV)__AFY05576__GPCmut8 (opt5)
aggagaaagcuuaccaugggccagaucgugaccuucuuucaagaggucccccacguuauugaagaggugaugaacaucgugcugauugcccucagcguccuggcugugcuuaaggggcuguacaauuucgccacaugcggacucguuggccuggugacguuucuucugcucugugggagauccugcaccacaucucuguauaaaggagucuacgaacugcagacccucgagcugaacauggaaacacuuaauauguguaugccucugagcugcaccaagaacaauucccaucacuauaucauggugggcaacgagacagggcucgagcugacccuuacgaauaccucuauuaucaaccauaaauucuguaaucugagcgacgcgcacaagaaaaaccucuacgaucaugcucugauguccaucauuucuacauuucaccugagcaucccgaauuucaaccaguaugaagccauguccugcgacuuuaauggaggcaagauuagcguucaguacaaccucucucacuccuaugccggcgaugcugccaaucauugugggaccguggcuaacggaguccugcaaacauucaugcggauggccuggggcgggagcuacaucgcgcuugacucuggacgcggcaacugggauugcauuaugaccuccuaccaguaucugaucauucagaauacgacaugggaggaccacugucaguuuagcagacccucuccuaucggguaccucggacugcuuucccaacggacccgcgauaucuauauuagcagacggcugcucggcacauucaccuggacccuguccgacucugaaggcgaggauacacccgggggauacugccugacgcgcuggaugcucaucgaggccgaacugaaguguuuuggcaacaccgcuguggccaaaugcaaugagaagcaugacgaagaguucugcgauaugcuuagacuguuugacuucuguaaacaggcuauucagcggcucaaggccccugcgcagaugagcauccaacugauuaacaaagccgugaaugcucuuaucaacgaucagcugaucaugaagaaucaccuccgcgacauuauggggauccccuauugcaacuacuccaaguauuguuaccugaaucacacaaccacaggaagaaccagccugccuaaaugcugucucgucucuaacggcuccuaccugaaugaaacgcauuucagcgacgauauugagcagcaagccgacaacaugaucacagagaugcuucagaaggaauauauggagcggcaggggaaaaccccgcugggacucguugaucuguuuguguucucuaccagcuuuuaccugauuuccaucuuccuucaccucgugaagauccccacacaucgccacauugucggcaaaucuugcccuaagccccauagacugaaucacaugggcaucuguagcugcgggcuguauaaacagccuggagugcccguuaaguggaagcggugaggacuaguuauaagacugacuagcccgaugggccucccaacgggcccuccuccccuccuugcaccgagauuaaucaaaggcucuuuucagagccaccaaaaaaaaaaaaaaaaaaaaaaaaaaaaaaaaaaaaaaaaaaaaaaaaaaaaaaaaaaaaaaaaaaaaaaaaaaaaaaaaaaaaaaaaaaaaaaaaaaaaa

SEQ ID NO: 34689 - RNA, 1689 nt, Artificial Sequence
  mRNA product Design i-3 (hSL-A100) comprising derived and/or modified sequence from LASV(LM765-SLE-2012;Clade IV)__AIT17814__GPCmut8 (opt5)
aggagaaagcuuaccaugggccagaucgugaccuucuuucaagaggucccccacguuauugaagaggugaugaacaucgugcugauugcccucagcauccuggcuguccuuaaggggcuguacaauuucgccacaugcggacucgugggccugguuacguuucuucugcucugugggagauccugcaccacaucucuguauaaaggaguguacgaacugcagacccucgagcugaacauggaaacacuuaauauguguaugccucugagcugcaccaagaacaauucccaucacuauauuauggucggcaacgagacagggcucgagcugacccuuacgaauaccucuaucaucgaccauaaauucuguaaccugagcgaugcgcaccggaagaaucucuacgaccaugcucugauguccauuaucucuacauuucaccugagcauuccgaacuucaaucaguaugaagccauguccugcgauuuuaacggaggcaaaaucagcgugcaguacaaucucucucacuccuaugccaaggacgcugccgaucauuguggcaccguugcuaacggggugcugcaaacauucaugcgcauggccuggggaggcagcuacauugcgcuugacucugggagaggacggugggauugcaucaugaccuccuaccaguaucugauuauccagaauacgacaugggaggaccacugucaguuuagccgccccucuccuaucggcuaccucgggcugcuuucccaaagaacccgggauauuuauaucagccgcagacugcucggaacauucaccuggacccuguccgacucugaaggcaaggauacacccggcggguacugccugacgcgguggaugcucauugaggccgagcugaaauguuuuggaaacaccgcugucgccaagugcaacgaaaaacaugacgaggaguucugcgauaugcuucgccuguuugacuucuguaagcaggcuauccagagacucaaagccccugcgcagaugagcauucaacugaucaauaaggccgugaacgcucuuaucaaugaccagcugauuaugaagaaccaccuccgggauaucaugggcauucccuauugcaauuacuccaaauauuguuaccugaaccacacaaccacagggaagaccagccugccuaaaugcugucucgugucuaauggauccuaccugaacgaaacgcauuucagcgacgauaucgaacagcaagccgacaauaugauuacagagaugcuucagaaggaguauauggaacgccagggcaaaaccccgcuggggcucgucgaucuguuuguuuucucuaccagcuuuuaccugaucuccaucuuccuucaccucgugaagauucccacacauagacacaucgugggaaaaccuugccccaagccucaucggcugaaccacaugggcauuuguucuugcggccuguauaagcagcccggggucccggugaaauggaagcgcugaggacuaguuauaagacugacuagcccgaugggccucccaacgggcccuccuccccuccuugcaccgagauuaaucaaaggcucuuuucagagccaccaaaaaaaaaaaaaaaaaaaaaaaaaaaaaaaaaaaaaaaaaaaaaaaaaaaaaaaaaaaaaaaaaaaaaaaaaaaaaaaaaaaaaaaaaaaaaaaaaaaaa

SEQ ID NO: 34690 - RNA, 1689 nt, Artificial Sequence
  mRNA product Design i-3 (hSL-A100) comprising derived and/or modified sequence from LASV(LM776-SLE-2012;Clade IV)__AIT17824__GPCmut8 (opt5)
aggagaaagcuuaccaugggccagaucgugaccuucuuucaagaggucccccacguuauugaagaggugaugaacaucgugcugauugcccucagcauccuggcuguccuuaaggggcuguacaauuucgccacaugcggacucgugggccugguuacguuucuucugcucugugggagauccugcaccacaucuguguauaaaggagucuacgaacugcagacccuggagcucaacauggaaacacugaauauguguaugccucuuagcugcaccaagaacaauucccaucacuauauuauggugggcaacgagacagggcuggagcucacccugacgaauaccucuaucaucaaccauaaauucuguaaucuuagcgacgcgcacaagaaaaaccuguacgaucaugcucucauguccauuaucucuacauuucaccugagcauuccgaauuucaaccaguaugaagccauguccugcgacuuuaauggaggcaagaucagcguucaguacaaccugucucacuccuaugccggcgaugcugccaaucauugugggaccguggcuaacggaguccuccaaacauucaugcggauggccuggggcgggagcuacauugcgcuggacucuggacacggcaagugggauugcaucaugaccuccuaccaguaucuuauuauccagaacacgacaugggaggaccauugucaguuuagccgccccucuccuaucggguaccugggacuccugucccaaagaacccgggauauuuauaucagccgcagacuucugggcacauucaccuggacccucuccgacucugaaggcaaagauacacccgggggauacugccugacgcgguggaugcugauugaggccgagcucaaguguuuuggcaauaccgcuguggccaaaugcaacgaaaagcacgacgaggaguucugcgauaugcugcgccuuuuugacuucuguaaacaggcuauccagagacugaaggccccugcgcagaugagcauucaacucaucaauaaggccgugaacgcucugaucaaugaucagcuuauuaugaaaaaccaucugcgggacaucauggggauucccuauugcaauuacuccaaguauuguuaccucaaccacacaaccacaggaaaaaccagccugccuaagugcugucuggucucuaauggcuccuaccucaacgaaacgcacuucagcgacgauaucgaacagcaagccgacaauaugauuacagagaugcugcagaaagaguauauggaacgccaggggaagaccccgcuuggacugguugaucucuuuguguucucuaccagcuuuuaccugaucuccaucuuccugcaucuugugaaaauucccacacacagacauaucgucggcaagucuugcccuaagccccaccggcucaaccacaugggcauuuguagcugcgggcuguauaaacagccuggagugcccguucgcuggaagagaugaggacuaguuauaagacugacuagcccgaugggccucccaacgggcccuccuccccuccuugcaccgagauuaaucaaaggcucuuuucagagccaccaaaaaaaaaaaaaaaaaaaaaaaaaaaaaaaaaaaaaaaaaaaaaaaaaaaaaaaaaaaaaaaaaaaaaaaaaaaaaaaaaaaaaaaaaaaaaaaaaaaaa

SEQ ID NO: 34691 - RNA, 1689 nt, Artificial Sequence
  mRNA product Design i-3 (hSL-A100) comprising derived and/or modified sequence from LASV(Mad39;Clade IV)__ANH09722__GPCmut8 (opt5)
aggagaaagcuuaccaugggccagaucgugaccuucuuucaagaggucccccacguuauugaagaggugaugaacaucgugcugauugcccucagcauccuggcuguccuuaaggggcuguacaauguggccacaugcggacucauuggccugguuacguuccuucugcucugugggagauccugcaccacaacccuguauaaaggaguguacgaacugcaggcgcucgagcugaacauggaaacacuuaauauguguaugccucugucuugcaccaagaacaauagccaucacuauauccgggucggcaacgagacagggcucgagcugacccuuacgaauaccucccugaucaaccauaaauuuuguaaucucucugacgcucacaagaaaaaccuguacgaucaugcccugaugagcauuaucuccacauuccaccucucuauuccgaauuuuaaccaguaugaagccaugagcugcgacuucaaugauggaaagaucuccgugcaguacaaccugagccacaccuaugcuggcgacacagccaaucauuguggcaccguugcuaacggggugcuucaaacguuuaugcgcauggccuggggaggcucuuacauugcgcuggauuccgggagaggaggcugggacugcaucaugacaagcuaccaguaucucauuauccagaacaccacaugggaggaucacugucaguucucucggcccuccccuaucggguaccugggacuucugagccaacgcaccagagacauuuauaucucucggcgccuccugggcaccuuuacauggacgcuguccgauagcgaaggcaaggacacccccgggggauacugccucacaagauggaugcugauugaggccgagcuuaaauguuucggcaauaccgcugucgccaagugcaacgaaaaacaugaugaggaauuuugcgacaugcugcgccucuucgauuuuuguaagcaggcuauccagcggcugaaagccccugcgcagauguccauucaacuuaucaauaaggccgugaacgcucugaucaaugaccagcucauuaugaagaaccaccugagagacaucauggggauucccuauugcaauuacucuaaauauuguuaccugaaccacacagugaccggaaagacgagccucccuaaaugcugucuggucuccaauggcagcuaccuuaacgagacacauuucucugaugacaucgaacagcaagccgauaauaugauuaccgagaugcugcagaaggaguauauggaacggcaggggaaaaccccgcucggacugguugaccuguucguguuuuccaccagcuucuaccuuaucucuaucuuucuccaccuggugaagauucccacacaucgccacgucgugggcaaaccuugccccaagccucauagacugaaccacaugggcaucuguagcugcggguucuauaagcagcccggaguuccggugcgguggaaacgcugaggacuaguuauaagacugacuagcccgaugggccucccaacgggcccuccuccccuccuugcaccgagauuaaucaaaggcucuuuucagagccaccaaaaaaaaaaaaaaaaaaaaaaaaaaaaaaaaaaaaaaaaaaaaaaaaaaaaaaaaaaaaaaaaaaaaaaaaaaaaaaaaaaaaaaaaaaaaaaaaaaaaa

SEQ ID NO: 34692 - RNA, 1689 nt, Artificial Sequence
  mRNA product Design i-3 (hSL-A100) comprising derived and/or modified sequence from LASV(Z0947-SLE-2011;Clade IV)__AIT17840__GPCmut8 (opt5)
aggagaaagcuuaccaugggccagaucgugaccuucuuucaagaggucccccacguuauugaagaggugaugaacaucgugcugauugcccucagcauccuggcuguccuuaaggggcuguacaauuucgccacaugcggacucgugggccugguuacguuucuucugcucugugggagauccugcaccauuucucuguauaaaggaguguacgaacugcagacacucgagcugaacauggaaacccuuaauauguguaugccucugagcugcacaaagaacaauucccaucacuauaucauggucggcaacgagaccgggcucgagcugacacuuaccaauacgucuaucauuaaccauaaauucuguaaucugagcgacgcgcacaagaaaaaccucuacgaucaugcucugauguccaucauuucuaccuuucaccugagcaucccgaauuucaaccaguaugaagccauguccugcgacuuuaauggaggcaagauuagcgugcaguacaaccucucucacuccuaugccggcgaugcugccaaucauugugggacaguugcuaacggagugcugcaaaccuucaugcggauggccuggggcgggagcuacaucgcgcuugacucuggacgcgauagaugggacugcauuaugacauccuaccaguaucugaucauccagaacaccacgugggaggaucacugucaguuuagccggcccucuccuauuggcuaccucgggcugcuuucccaacgcacaagagacaucuauauuagccggcgccugcucggaaccuucacauggacccuguccgauucugaaggcaaggacacccccggcggguacugccugacaagauggaugcucaucgaggccgagcugaaauguuuuggaaauacggcugucgccaagugcaacgaaaaacaugaugaggaguucugcgacaugcuucggcuguuugauuucuguaagcaggcuauucagcgccucaaagccccugcgcagaugagcauccaacugaucaauaaggccgugaacgcucuuauuaaugaccagcugaucaugaagaaccaccucagagacauuaugggcauccccuauugcaauuacuccaaauauuguuaccugaaccacaccacaaccgggaagacaagccugccuaaaugcugucucgugucuaauggauccuaccugaacgaaacccauuucagcgaugacauugaacagcaagccgauaauaugaucacggagaugcuucagaaggaguauauggaacggcagggcaaaacaccgcuggggcucgucgaccuguuuguuuucucuaccagcuuuuaccugaucuccauuuuccuucaccucgugaagauccccacccaucgccacauugugggaaaaccuugccccaagccucauagacugaaccacaugggcaucuguucuugcggccuguauaagcagcccggggucccggugaaauggaagcggugaggacuaguuauaagacugacuagcccgaugggccucccaacgggcccuccuccccuccuugcaccgagauuaaucaaaggcucuuuucagagccaccaaaaaaaaaaaaaaaaaaaaaaaaaaaaaaaaaaaaaaaaaaaaaaaaaaaaaaaaaaaaaaaaaaaaaaaaaaaaaaaaaaaaaaaaaaaaaaaaaaaaa

SEQ ID NO: 34693 - RNA, 1665 nt, Artificial Sequence
  mRNA product Design i-3 (A100) comprising derived and/or modified sequence from LASV(Josiah;Clade IV)__NP_694870__GPCmut8 (opt1)
aggagaaagcuuaccaugggccagaucgugaccuucuuccaggaggucccccacgugaucgaggaggugaugaacaucguccugaucgcccucagcgugcuggccgugcugaaggggcucuacaacuucgcgaccugcggccuggucgggcuggugacguuccuccugcugugcggccgcuccugcaccaccagccucuacaaggggguguacgagcugcagacccuggagcucaacauggagacgcugaacaugugcaugccgcuguccugcaccaagaacaacagccaccacuacaucauggucggcaacgagaccggccucgagcugacgcugaccaacaccuccaucaucaaccacaaguucugcaaccucagcgacgcccacaagaagaaccuguacgaccacgcccugauguccaucaucagcaccuuccaccucuccauccccaacuucaaccaguacgaggccaugagcugcgacuucaacgggggcaagaucuccgugcaguacaaccugagccacuccuacgccggggacgcggccaaccacugcggcacgguggccaacgggguccugcagaccuucaugcggauggccuggggcggcagcuacaucgcgcucgacuccgggcgcggcaacugggacugcaucaugaccagcuaccaguaccugaucauccagaacaccacgugggaggaccacugccaguucucccggcccagccccaucggguaccugggccuccugucccagcgcacccgggacaucuacaucagccgccggcugcucggcaccuucaccuggacgcugagcgacuccgaggggaaggacaccccgggcggguacugccugacccgcuggaugcucaucgaggccgagcugaagugcuucggcaacaccgccguggccaagugcaacgagaagcacgacgaggaguucugcgacaugcugcggcuguucgacuucugcaagcaggccauccagcgccugaaggcgcccgcccagaugagcauccagcugaucaacaaggccgugaacgcccucaucaacgaccagcugaucaugaagaaccaccuccgggacaucauggggauccccuacugcaacuacuccaaguacugcuaccucaaccacacgaccaccggccgcaccagccugcccaagugcugccuggucuccaacggcagcuaccucaacgagacgcacuucuccgacgacaucgagcagcaggccgacaacaugaucaccgagaugcugcagaaggaguacauggagcggcaggggaagacgccccugggccucguggaccuguucguguucagcaccuccuucuaccugaucagcaucuuccugcaccucgucaagaucccgacccaccgccacaucguggggaaguccugccccaagccccaccggcugaaccacaugggcaucugcagcugcgggcuguacaagcagcccggcgugccggucaaguggaagcgcugaggacuaguuauaagacugacuagcccgaugggccucccaacgggcccuccuccccuccuugcaccgagauuaauaaaaaaaaaaaaaaaaaaaaaaaaaaaaaaaaaaaaaaaaaaaaaaaaaaaaaaaaaaaaaaaaaaaaaaaaaaaaaaaaaaaaaaaaaaaaaaaaaaaa

SEQ ID NO: 34694 - RNA, 1662 nt, Artificial Sequence
  mRNA product Design i-3 (A100) comprising derived and/or modified sequence from LASV(LP;Clade I)__AAF86701__GPCmut8 (opt1)
aggagaaagcuuaccaugggccagaucaucaccuucuuccaggaggugccccacgucaucgaggaggugaugaacaucgugcugaucgcccucagccugcuggccauccucaaggggcuguacaacaucgcgaccugcggcaucaucgggcuggucgccuuccucuuccugugcggcaaguccugcagccugacgcucaagggcggguacgagcugcagacccuggagcucaacauggagacccugaacaugugcaugccgcuguccugcacgaagaacagcucccaccacuacauccgcgugggcaacgagaccgggcucgagcugacccugaccaacacgagcaucaucaaccacaaguucugcaaccucuccgacgcccacaagaagaaccuguacgaccacgcccugaugagcaucaucuccaccuuccaccucagcauccccaacuucaaccaguacgaggccauguccugcgacuucaacggcgggaagaucagcgugcaguacaaccugucccacagcuacgcgggcgacgccgccgagcacugcgggaccgucgccaacggcgugcugcagaccuucaugcggauggcguggggcgggcgcuacaucgcccucgacuccggcaaggggaacugggacugcaucaugacgagcuaccaguaccugaucauccagaacaccaccugggaggaccacugccaguucucccggcccagccccaucggcuaccugggccuccugucccagcgcacccgggacaucuacaucagccgccggcugcucgggacguucaccuggacccugagcgacuccgagggcaacgagacccccgggggcuacugccugacgcgcuggaugcucaucgaggccgagcugaagugcuucgggaacaccgccguggccaagugcaacgagaagcacgacgaggaguucugcgacaugcugcggcuguucgacuucugcaagcaggcgauccgccggcugaaggcccccgcccagaugagcauccagcugaucaacaaggccgucaacgcccucaucaacgaccagcugaucaugaagaaccaccuccgcgacaucaugggcauccccuacugcaacuacuccaaguacugcuaccucaaccacaccagcuccggccggaccagccugcccaagugcugccugaucuccaacgggagcuaccucaacgagacgcaguucuccgacgacaucgagcagcaggcggacaacaugaucaccgagaugcugcagaaggaguacaucgagcgccagggcaagaccccgcuggggcucguggacaucuucaucuucagcaccuccuucuaccugaucagcaucuuccugcaccugaucaagaucccgacgcaccggcacaucgugggcaagcccugccccaagccccaccgccucaaccacaugggggucugcuccugcggccuguacaagcacccgggcgugcccaccaaguggaagcggugaggacuaguuauaagacugacuagcccgaugggccucccaacgggcccuccuccccuccuugcaccgagauuaauaaaaaaaaaaaaaaaaaaaaaaaaaaaaaaaaaaaaaaaaaaaaaaaaaaaaaaaaaaaaaaaaaaaaaaaaaaaaaaaaaaaaaaaaaaaaaaaaaaaa

SEQ ID NO: 34695 - RNA, 1662 nt, Artificial Sequence
  mRNA product Design i-3 (A100) comprising derived and/or modified sequence from LASV(803213;Clade II)__AAF86703__GPCmut8 (opt1)
aggagaaagcuuaccaugggccagaucaucaccuucuuccaggaggugccccacgucaucgaggaggugaugaacaucgugcugaucgcccucagccugcuggccauccucaaggggaucuacaacgucgcgaccugcggccuguucgggcugaucuccuuccuccugcugugcggccgcagcugcuccgugacguacaaggggguguacgagcuccagacccuggagcugaacauggccaaccucaacaugugcaugccgcugagcugcaccaagaacaacucccaccacuacaucauggucggcaacgagacgggccuggagcucacccugaccaacaccagcaucaucaaccacaaguucugcaaccuguccgacgcccacaagaagaaccucuacgaccacgcccugaugagcaucaucuccacguuccaccugagcauccccaacuucaaccaguacgaggccauguccugcgacuucaacgggggcaagaucagcgugcaguacaaccucucccacagcuucgcgguggacgccgccaaccacugcgggaccaucgccaacggcguccugcagaccuucaugcggauggcguggggcggguccuacaucgcccuggacagcggcaaggggaacugggacugcaucaugaccuccuaccaguaccucaucauccagaacacgaccugggaggaccacugccaguucagccgccccucccccaucggcuaccuggggcugcucagccagcggacccgcgacaucuacaucagccggcgccugcugggcaccuucacguggacccucuccgacagcgagggcaacgaggcccccgggggcuacugccugacccgguggaugcugaucgaggccgagcucaagugcuucgggaacaccgccguggcgaagugcaacgagaagcacgacgaggaguucugcgacaugcugcgccuguucgacuucugcaagcaggccaucaagcggcucaagacgcccgcccagauguccauccagcugaucaacaaggccgugaacgcccugaucaacgaccagcucaucaugaagaaccaccuccgcgacaucaugggcauccccuacugcaacuacagccgguacugcuaccugaaccacaccgucaccgggaagaccucccugccccgcugcugccuggugagcaacggcuccuaccugaacgagacgcacuucagcgacgacaucgagcagcaggcggacaacaugaucaccgagaugcuccagaaggaguacauggaccggcagggcaagaccccgcuggggcugguggaccucuucgucuucuccaccagcuucuaccugaucuccaucuuccugcaccuggugaagaucccgacgcaccgccacaucgugggcaagcccugccccaagccccaccggcucaaccacauggggaucugcagcugcggccuguacaagcacccggggguccccgugaaguggaagcgcugaggacuaguuauaagacugacuagcccgaugggccucccaacgggcccuccuccccuccuugcaccgagauuaauaaaaaaaaaaaaaaaaaaaaaaaaaaaaaaaaaaaaaaaaaaaaaaaaaaaaaaaaaaaaaaaaaaaaaaaaaaaaaaaaaaaaaaaaaaaaaaaaaaaa

SEQ ID NO: 34696 - RNA, 1662 nt, Artificial Sequence
  mRNA product Design i-3 (A100) comprising derived and/or modified sequence from LASV(GA391;Clade III)__CAA36645__GPCmut8 (opt1)
aggagaaagcuuaccaugggccagaucgugaccuucuuccaggaggucccccacgugaucgaggaggugaugaacaucguccugaucgcccucagcauccuggccauccugaaggggcucuacaacguggcgaccugcggccugaucgggcuggugacguuccuccugcuguccggccgcagcugcucccucaucuacaaggggaccuacgagcugcagacccuggagcucaacauggagacccugaacaugugcaugccgcugagcugcaccaagaacaacucccaccacuacauccgggucggcaacgagaccggccucgagcugacccugacgaacaccagcauccucaaccacaaguucugcaaccuguccgacgcccacaagcgcaaccuguacgaccacagccucauguccaucaucagcaccuuccaccuguccauccccaacuucaaccaguacgaggccaugagcugcgacuucaacgggggcaagaucaccgugcaguacaaccugucccacagcuucgccguggacgccgcggggcacugcggcacgcucgccaacgggguccugcagaccuucaugcggauggccuggggcggcuccuacaucgcccuggacagcgggcgcggcaacugggacugcaucaugaccuccuaccaguaccucaucauccagaacaccacgugggacgaccacugccaguucagccggcccucccccaucggguaccugggccugcucagccagcgcacccgggacaucuacaucagccgccggcugcugggcaccuucaccuggacgcucuccgacagcgaggggaacgagaccccgggcggguacugccugacccgcuggaugcugaucgaggcggagcucaagugcuucggcaacaccgccguggccaagugcaacgagaagcacgacgaggaguucugcgacaugcugcggcuguucgacuucugcaagcaggccauccgccggcucaagacgcccgcccagauguccauccagcugaucaacaaggcggugaacgcccugaucaacgaccagcucaucaugaagaaccaccuccgcgacaucauggggauccccuacugcaacuacagccgguacugcuaccugaaccacaccuccaccggcaagaccagccugccccgcugcugccugaucuccaacggcagcuaccugaacgagacgaaguucuccgacgacaucgagcagcaggccgacaacaugaucaccgagaugcuccagaaggaguacaucgaccggcaggggaagacgccccugggccuggucgaccuguucguguucagcaccuccuucuaccucaucagcaucuuccugcaccuggugaagaucccgacccaccgccacaucgucgggaagcccugccccaagccccaccggcucaaccacaugggcaucugcuccugcgggcuguacaagcagccgggcgugcccgugcgcuggaagcggugaggacuaguuauaagacugacuagcccgaugggccucccaacgggcccuccuccccuccuugcaccgagauuaauaaaaaaaaaaaaaaaaaaaaaaaaaaaaaaaaaaaaaaaaaaaaaaaaaaaaaaaaaaaaaaaaaaaaaaaaaaaaaaaaaaaaaaaaaaaaaaaaaaaa

SEQ ID NO: 34697 - RNA, 1665 nt, Artificial Sequence
  mRNA product Design i-3 (A100) comprising derived and/or modified sequence from LASV(AV;Clade V)__CCA30314__GPCmut8 (opt1)
aggagaaagcuuaccaugggccagaucgugaccuucuuccaggaggucccccacgugaucgaggaggugaugaacaucguccugaucgcccucagcauccuggccgugcugaaggggcucuacaacaucgcgaccugcggccugaucgggcugaucacguuccuccugcugugcggccgcuccugcagcuccaaccucuacaaggggguguacgagcugcagagccuggaccucaacauggagacccugaacaugugcaugccgcuguccugcaccaagaacaacagccaccacuacauccgggucggcaacgacacgggccucgagcugacccugaccaacaccuccauccucaaccacaaguucugcaaccugagcgacgcccacaagaaggaccuguacgaccacgcccucauguccaucaucagcacguuccaccuguccauccccaacuucaaccaguacgaggccaugagcugcgacuucaacgggggcaagaucuccgugcaguacaaccugagccacuccuacgccaucgacgcggccaaccacugcgggaccguggccaacggcauccuccagaccuucaugcgcauggccuggggcgggagcuacaucgcgcuggacuccggccgggggaacugggacugcaucaugaccagcuaccaguaccugaucauccagaacacgaccugggagaaccacugccaguucucccgccccagccccaucggcuaccucgggcugcugagccagcggacccgcgacaucuacaucucccggcgccuccugggcaccuucacguggacccugagcgacuccgagggcaacgccacccccgggggcuacugccucacccgguggaugcugaucgaggccgagcugaagugcuucgggaacacggccgucgccaagugcaacgagaagcacgacgaggaguucugcgacaugcuccgccuguucgacuucugcaagcaggcgaucagccggcugaagucccccgcccagaugagcauccagcucaucaacaaggccgugaacgcccugaucaacgaccagcugaucaugaagaaccaccuccgcgacaucaugggcauccccuacugcaacuacuccaaguacugcuaccugaaccacaccaucaccgggaagaccagccugcccaagugcugccucguguccaacggcagcuaccugaacgagacgcacuucuccgacgacaucgagcagcaggccgacaacaugaucaccgagaugcugcagaaggaguacauggagcggcagggcaagaccccgcucgggcuggucgaccuguucguguucagcaccuccuucuaccugaucagcaucuuccuccgccuggugaagaucccgacgcaccggcacaucgucggcaagcccugccccaagccccaccgccugaaccacauggggaucugcuccugcggccucuacaagcagccgggggugcccgugcgguggaagcgcugaggacuaguuauaagacugacuagcccgaugggccucccaacgggcccuccuccccuccuugcaccgagauuaauaaaaaaaaaaaaaaaaaaaaaaaaaaaaaaaaaaaaaaaaaaaaaaaaaaaaaaaaaaaaaaaaaaaaaaaaaaaaaaaaaaaaaaaaaaaaaaaaaaaa

SEQ ID NO: 34698 - RNA, 1662 nt, Artificial Sequence
  mRNA product Design i-3 (A100) comprising derived and/or modified sequence from LASV(Togo/2016/7082;Clade VI)__AMR44577__GPCmut8 (opt1)
aggagaaagcuuaccaugggccagaucaucaccuucuuccaggaggugccccacgucaucgaggaggugaugaacaucgugcugaucgcccucagccugcuggccauccucaagggggucuacaacguggcgaccugcggcaucaucgggcuggugacguuccuguuccucugcggccgcuccugcagccugaucuacaagggguccuacgagcugcagacccucgagcugaacauggagacccugaacaugugcaugccgcucagcugcacgaagaacuccagccaccacuacauccgggucggcaacgagaccggccuggagcugacccucaccaacacguccaucaucaaccacaaguucugcaaccugagcgacgcccacaagcgcaaccuguacgaccacgcccucauguccauccugagcaccuuccaccuguccauccccaacuucaaccaguacgaggccaugagcugcgacuucaacgggggcaagaucuccgugcaguacaaccucagccacgccuacgcgguggacgccgccgagcacugcgggaccgucgccaacggcgugcugcagaccuucaugcggauggcguggggcggguccuacaucgcccuggacagcggccgcgggaacugggacugcaucaugacguccuaccaguaccucaucauccagaacaccaccugggaggaccacugccaguucagccggcccucccccaucggcuaccuggggcugcucagccagcgcacccgggacaucuacaucagccgccggcugcugggcacguucaccuggacccucuccgacagcgagggcaacgagacccccgggggcuacugccugacgcgcuggaugcugaucgaggccgagcucaagugcuucgggaacaccgccguggccaagugcaacgagaagcacgacgaggaguucugcgacaugcugcggcuguucgacuucugcaagcaggcgauccagcgccucaagucccccgcccagaugagcauccagcugaucaacaaggccgucaacgcccugaucaacgaccagcucaucaugaagaaccaccuccgggacaugaugggcauccccuacugcaacuacuccaaguacugcuaccugaaccacaccagcuccgggcgcaccagccugcccaagugcugccugguguccaacggcagcuaccugaacgagacgcacuucuccgacgacaucgagcagcaggccgacaacaugaucaccgagaugcuccagaaggaguacaucgaccggcagggcaagaccccgcuggggcugguggaccucuucgucuucagcaccuccuucuaccugaucagcaucuuccugcaccugaucaagaucccgacgcaccgccacaucgugggcaagcccugccccaagccccaccggcucaaccacauggggaucugcuccugcggccuguacaagcagccgggggugcccacccgcuggaagcggugaggacuaguuauaagacugacuagcccgaugggccucccaacgggcccuccuccccuccuugcaccgagauuaauaaaaaaaaaaaaaaaaaaaaaaaaaaaaaaaaaaaaaaaaaaaaaaaaaaaaaaaaaaaaaaaaaaaaaaaaaaaaaaaaaaaaaaaaaaaaaaaaaaaa

SEQ ID NO: 34699 - RNA, 1662 nt, Artificial Sequence
  mRNA product Design i-3 (A100) comprising derived and/or modified sequence from LASV(KAK-428;Clade n.d. (VII))__ANH09740__GPCmut8 (opt1)
aggagaaagcuuaccaugggccagaucgugaccuucuuccaggaggucccccacgugaucgaggaggugaugaacaucguccugaucgcccucagccugcuggccauccucaaggggcuguacaacuucgcgaccugcggcgugaucgggcugaucacguuccuccugcugugcggccgcuccugcagcgccaccuacaaggggcaguacgagcuccagacccuggagcugaacauggagucccucaacaugugcaugccgcugagcugcacgaagaacaacucccaccacuacauccgggccggcaacaacaccggccuggagcucacccugaccaacacgagcaucaucucccacaaguucugcaaccugagcgacgcccacaagaagaaccucuacgaccacacccugauguccaucaucaccaccuuccaccugagcauccccaacuucaaccaguacgaggccauguccugcgacuucaacgggggcaagaucagcauccaguacaaccucucccacagcuacgcgggggacgccgcccagcacugcggcacgguggccaacgggguccugcagaccuucaugcgcauggcguggggcggcuccuaccuggcccucgacagcgggcggcgcggcugggacugcaucaucuccagcuaccaguaccugaucauccagaacaccaccugggacgaccacugccaguucucccggcccagccccaucggguaccugggcuucgugagccagaagacgcgcgacaucuacaucucccggcgccuccugggcaccuucaccuggacccugagcgacuccgaggggcacgacaugccgggcggguacugccucacgcgguggaugcugaucgaggccgaccugaagugcuucggcaacaccgccguggccaagugcaacgagaagcacgacgaggaguucugcgacauguggcgccucuucgacuucugcaagcaggcgauccagcggcugaaggcccccgcccagaugaacauccagcugaucaacaaggccgucaacgcccucaucaacgaccagcugaugaugaagaaccaccuccgcgacaucauggggauccccuacugcaacuacagcaaguucugcuaccugaacaacaccaccacgggccggaccucccugccccgcugcugccugaucagcaacggcuccuaccucaacgagacccacuucagcgacgacaucgagcagcaggcggacaacaugaucaccgagaugcugcagaaggaguacauggaccggcaggggaagacgccccugggccucguggaccuguucguguucuccaccagcuucuaccugaucaccaucuuccuccaccuggucaagaucccgacccaccgccacaucguggggaagcccugccccaagccccaccggcugaaccacaugggcaucugcuccugcgggcuguacaagcagccgggcgugcccguccgcuggaagcggugaggacuaguuauaagacugacuagcccgaugggccucccaacgggcccuccuccccuccuugcaccgagauuaauaaaaaaaaaaaaaaaaaaaaaaaaaaaaaaaaaaaaaaaaaaaaaaaaaaaaaaaaaaaaaaaaaaaaaaaaaaaaaaaaaaaaaaaaaaaaaaaaaaaa

SEQ ID NO: 34700 - RNA, 1662 nt, Artificial Sequence; identical to SEQ ID NO: 34694
  mRNA product Design i-3 (A100) comprising derived and/or modified sequence from LASV(Pinneo-NIG-1969;Clade I)__AIT17836__GPCmut8 (opt1)

SEQ ID NO: 34701 - RNA, 1662 nt, Artificial Sequence
  mRNA product Design i-3 (A100) comprising derived and/or modified sequence from LASV(ISTH0009-NIG-2011;Clade II)__AIT17404__GPCmut8 (opt1)
aggagaaagcuuaccaugggccagaucaucaccuucuuccaggaggugccccacgucaucgaggaggugaugaacaucgugcugaucgcccucagccugcuggccauccucaaggggaucuacaacgucgcgaccugcggccuguucgggcugguguccuuccuccugcugugcggccgcagcugcuccacgaccuacaaggggguguacgagcuccagacccuggagcuggacauggccagccucaacaugugcaugccgcuguccugcacgaagaacaacagccaccacuacaucauggucggcaacgagaccggccuggagcucacccugaccaacacguccaucaucaaccacaaguucugcaaccugagcgacgcccacaagaagaaccucuacgaccacgcccugauguccaucaucagcaccuuccaccuguccauccccaacuucaaccaguacgaggccaugagcugcgacuucaacgggggcaagaucuccgugcaguacaaccucagccacgcguacgccguggacgccgccaaccacugcgggaccaucgcgaacggcguccugcagaccuucaugcggauggccuggggcggguccuacaucgcccuggacagcggcaagggguccugggacugcaucaugacgagcuaccaguaccucaucauccagaacaccaccugggaggaccacugccaguucucccgccccagccccaucggcuaccuggggcugcucagccagcggacccgcgacaucuacaucucccggcgccugcugggcacguucaccuggacccucagcgacuccgagggcaacgagacccccgggggcuacugccugacgcgguggaugcugaucgaggccgagcucaagugcuucgggaacaccgccguggcgaagugcaacgagaagcacgacgaggaguucugcgacaugcugcgccuguucgacuucugcaagcaggccauccggcgccucaagacccccgcccagaugagcauccagcugaucaacaaggccgugaacgcccugaucaacgaccagcucaucaugaagaaccaccuccgggacaucaugggcaucccguacugcaacuacuccaaguacugcuaccugaaccacaccgucacggggaagaccagccugccccgcugcugccugguguccaacggcagcuaccugaacgagacccacuucuccgacgacaucgagcagcaggcggacaacaugaucaccgagcuccugcagaaggaguacauggaccggcagggcaagacgccccuggggcucguggaccuguucgucuucagcaccuccuucuaccugaucagcaucuuccugcaccucaucaagaucccgacccaccgccacaucaccggcaagcccugccccaagccccaccggcugaaccacauggggaucugcuccugcggccuguacaagcacccgggggugcccgugaaguggaagcgcugaggacuaguuauaagacugacuagcccgaugggccucccaacgggcccuccuccccuccuugcaccgagauuaauaaaaaaaaaaaaaaaaaaaaaaaaaaaaaaaaaaaaaaaaaaaaaaaaaaaaaaaaaaaaaaaaaaaaaaaaaaaaaaaaaaaaaaaaaaaaaaaaaaaa

SEQ ID NO: 34702 - RNA, 1662 nt, Artificial Sequence
  mRNA product Design i-3 (A100) comprising derived and/or modified sequence from LASV(ISTH2010-NIG-2012;Clade II)__AIT17482__GPCmut8 (opt1)
aggagaaagcuuaccaugggccagaucaucaccuucuuccaggaggugccccacgucaucgaggaggugaugaacaucgugcugaucgcccucagccugcuggccauccucaaggggaucuacaacgucgcgaccugcggccuguucgggcugguguccuuccuccugcugugcggccgcagcugcuccacgaccuacaaggggguguacgagcuccagacccuggagcuggacauggccagccucaacaugugcaugccgcuguccugcacgaagaacaacagccaccacuacaucauggucggcaacgagaccggccuggagcucacccugaccaacacguccaucaucaaccacaaguucugcaaccugagcgacgcccacaagaagaaccucuacgaccacgcccugauguccaucaucagcaccuuccaccuguccauccccaacuucaaccaguacgaggccaugagcugcgacuucaacgggggcaagaucuccgugcaguacaaccucagccacgcguacgccguggacgccgccaaccacugcgggaccaucgcgaacggcguccugcagaccuucaugcggauggccuggggcggguccuacaucgcccuggacagcggcaagggguccugggacugcaucaugacgagcuaccaguaccucaucauccagaacaucaccugggaggaccacugccaguucucccgccccagccccaucggcuaccuggggcugcucagccagcggacccgcgacaucuacaucucccggcgccugcugggcaccuucacguggacccucagcgacuccgagggcaacgagacccccgggggcuacugccugacccgguggaugcugaucgaggccgagcucaagugcuucgggaacacggccguggcgaagugcaacgagaagcacgacgaggaguucugcgacaugcugcgccuguucgacuucugcaagcaggccauccggcgccucaagacccccgcccagaugagcauccagcugaucaacaaggccgugaacgcccugaucaacgaccagcucaucaugaagaaccaccuccgggacaucaugggcauccccuacugcaacuacuccaaguacugcuaccugaaccacaccgucaccgggaagacgagccugccccgcugcugccugguguccaacggcagcuaccugaacgagacccacuucuccgacgacaucgagcagcaggcggacaacaugaucaccgagcuccugcagaaggaguacaucgaccggcagggcaagaccccgcuggggcucguggaccuguucgucuucagcacguccuucuaccugaucagcaucuuccugcaccucgugaagaucccgacccaccgccacguggucggcaagcccugccccaagccccaccggcugaaccacauggggaucugcuccugcggccuguacaagcacccgggggugcccgugaaguggaagcgcugaggacuaguuauaagacugacuagcccgaugggccucccaacgggcccuccuccccuccuugcaccgagauuaauaaaaaaaaaaaaaaaaaaaaaaaaaaaaaaaaaaaaaaaaaaaaaaaaaaaaaaaaaaaaaaaaaaaaaaaaaaaaaaaaaaaaaaaaaaaaaaaaaaaa

SEQ ID NO: 34703 - RNA, 1662 nt, Artificial Sequence
  mRNA product Design i-3 (A100) comprising derived and/or modified sequence from LASV(Lassa virus/H.sapiens-wt/NGA/2015/ISTH_0543;Clade II)__AVO03639__GPCmut8 (opt1)
aggagaaagcuuaccaugggccagaucaucaccuucuuccaggaggugccccacgucaucgaggaggugaugaacaucgugcugaucgcccucagccugcuggccauccucaaggggaucuacaacgucgcgaccugcggccuguucgggcugguguccuuccuccugcugugcggccgcagcugcuccacgaccuacaaggggguguacgagcuccagacccuggagcuggacauggccaaccucaacaugugcaugccgcugagcugcacgaagaacaacucccaccacuacaucauggucggcaacgagaccggccuggagcucacccugaccaacacgagcaucaucaaccacaaguucugcaaccuguccgacgcccacaagaagaaccucuacgaccacgcccugaugagcaucaucuccaccuuccaccugagcauccccaacuucaaccaguacgaggccauguccugcgacuucaacgggggcaagaucagcgugcaguacaaccucucccacaccuacgcgguggacgccgccaaccacugcgggaccaucgccaacggcguccugcagacguucaugcggauggcguggggcgggagcuacaucgcccuggacuccggcaaggggagcugggacugcaucaugaccuccuaccaguaccucgugauccagaacaccaccugggaggaccacugccaguucagccgccccucccccaucggcuaccuggggcugcucagccagcggacgcgcgacaucuacaucagccggcgccugcugggcaccuucaccuggacccucuccgacagcgagggcaacgagacgcccgggggcuacugccugacccgguggaugcugaucgaggccgagcucaagugcuucgggaacaccgccguggccaagugcaacgagaagcacgacgaggaguucugcgacaugcugcgccuguucgacuucugcaagcaggcgauccggcgccucaagacccccgcccagauguccauccagcugaucaacaaggccgucaacgcccugaucaacgaccagcucaucaugaagaaccaccuccgggacaucaugggcauccccuacugcaacuacagcaaguacugcuaccugaaccacacggugaccgggaagaccucccugccccgcugcugccuggugagcaacggcuccuaccugaacgagacccacuucagcgacgacaucgagcagcaggccgacaacaugaucacggagcuccugcagaaggaguacaucgaccggcagggcaagaccccgcuggggcucgucgaccuguucguguucuccaccagcuucuaccugaucuccaucuuccugcaccucgugaagaucccgacccaccgccacaucacgggcaagcccugccccaagccccaccggcugaaccacauggggaucugcagcugcggccuguacaagcacccggggguccccgugaaguggaagcgcugaggacuaguuauaagacugacuagcccgaugggccucccaacgggcccuccuccccuccuugcaccgagauuaauaaaaaaaaaaaaaaaaaaaaaaaaaaaaaaaaaaaaaaaaaaaaaaaaaaaaaaaaaaaaaaaaaaaaaaaaaaaaaaaaaaaaaaaaaaaaaaaaaaaa

SEQ ID NO: 34704 - RNA, 1662 nt, Artificial Sequence
  mRNA product Design i-3 (A100) comprising derived and/or modified sequence from LASV(Lassa virus/H.sapiens-wt/NGA/2016/ISTH_0009;Clade II)__AVO03571__GPCmut8 (opt1)
aggagaaagcuuaccaugggccagaucaucaccuucuuccaggaggugccccacgucaucgaggaggugaugaacaucgugcugaucgcccucagccugcuggccauccucaaggggaucuacaacgucgcgaccugcggccugcuggggcucguguccuuccugcugcucugcggccgcagcugcuccacgaccuacaaggggguguacgagcugcagacccuggagcucgacauggccagccugaacaugugcaugccgcuguccugcacgaagaacaacagccaccacuacaucauggucggcaacgagaccggccucgagcugacccugaccaacacguccaucaucaaccacaaguucugcaaccucagcgacgcccacaagaagaaccuguacgaccacgcccugauguccaucaucagcaccuuccaccucuccauccccaacuucaaccaguacgaggccaugagcugcgacuucaacgggggccggaucuccgugcaguacaaccugagccacuccuacgcgguggacgccgccaaccacugcgggaccaucgccaacggcguccugcagaccuucaugcgcauggcguggggcgggagcuacaucgcccucgacuccggcaaggggagcugggacugcaucaugacguccuaccaguaccugaucauccagaacaccaccugggaggaccacugccaguucagccggcccagccccaucggcuaccuggggcuccugucccagcgcacccgggacaucuacaucagccgccggcugcucggcacguucaccuggacccuguccgacagcgagggcaacgagacccccgggggcuacugccugacgcgcuggaugcucaucgaggccgagcugaagugcuucgggaacaccgccguggccaagugcaacgagaagcacgacgaggaguucugcgacaugcugcggcuguucgacuucugcaagcaggcgauccgccggcugaagacccccgcccagauguccauccagcugaucaacaaggccgugaacgcccucaucaacgaccagcugaucaugaagaaccaccuccgcgacaucaugggcaucccguacugcaacuacagcaaguacugcuaccucaaccacaccgucacggggaagaccucccugccccggugcugccuggugagcaacggcuccuaccucaacgagacccacuucagcgacgacaucgagcagcaggccgacaacaugaucaccgagcugcugcagaaggaguacaucgaccgccagggcaagacgccccucgggcugguggaccuguucgucuucuccaccagcuucuaccugaucuccaucuuccuccaccuggugaagaucccgacccaccggcacaucaccggcaagcccugccccaagccccaccgccugaaccacauggggaucugcagcugcggccucuacaaccacccgggggugcccgucaaguggaagcggugaggacuaguuauaagacugacuagcccgaugggccucccaacgggcccuccuccccuccuugcaccgagauuaauaaaaaaaaaaaaaaaaaaaaaaaaaaaaaaaaaaaaaaaaaaaaaaaaaaaaaaaaaaaaaaaaaaaaaaaaaaaaaaaaaaaaaaaaaaaaaaaaaaaa

SEQ ID NO: 34705 - RNA, 1662 nt, Artificial Sequence
  mRNA product Design i-3 (A100) comprising derived and/or modified sequence from LASV(Lassa virus/H.sapiens-wt/NGA/2016/ISTH_0017;Clade II)__AVO03567__GPCmut8 (opt1)
aggagaaagcuuaccaugggccagaucaucaccuucuuccaggaggugccccacgucaucgaggaggugaugaacaucgugcugaucgcccucagccugcuggccauccucaaggggaucuacaacgucgcgaccugcggccuguucgggcugguguccuuccuccugcugugcggccgcagcugcuccacgaccuacaaggggguguacgagcuccagacccuggagcuggacauggccagccucaacaugugcaugccgcuguccugcacgaagaacaacagccaccacuacaucauggucggcaacgagaccggccuggagcucacccugaccaacacguccaucaucaaccacaaguucugcaaccugagcgacgcccacaagaagaaccucuacgaccacgcccugauguccaucaucagcaccuuccaccuguccauccccaacuucaaccaguacgaggccaugagcugcgacuucaacgggggcaagaucuccgugcaguacaaccucagccacaccuacgcgaucgacgccgccaaccacugcgggaccaucgccaacggcgugcugcagacguucaugcggauggcguggggcggguccuacaucgcccuggacagcggcaagggguccugggacugcaucaugaccagcuaccaguaccucaucauccagaacaccaccugggaggaccacugccaguucucccgccccagccccaucggcuaccuggggcugcucagccagcggacgcgcgacaucuacaucucccggcgccugcugggcaccuucaccuggacccucagcgacuccgagggcaacgagacgcccgggggcuacugccugacccgguggaugcugaucgaggccgagcucaagugcuucgggaacaccgccgucgccaagugcaacgagaagcacgacgaggaguucugcgacaugcugcgccuguucgacuucugcaagcaggcgauccggcgccucaagacccccgcccagaugagcauccagcugaucaacaaggccgugaacgcccugaucaacgaccagcucaucaugaagaaccaccuccgggacaucaugggcauccccuacugcaacuacuccaaguacugcuaccugaaccacacggugaccgggaagaccagccugccccgcugcugccuggucuccaacggcagcuaccugaacgagacccacuucuccgacgacaucgagcagcaggccgacaacaugaucacggagcuccugcagaaggaguacauggaccggcagggcaagaccccgcuggggcucguggaccuguucguguucagcaccuccuucuaccugaucagcaucuuccugcaccucguccgcaucccgacccaccggcacgugaucggcaagcccugccccaagccccaccgccugaaccacauggggaucugcuccugcggccuguacaagcacccgggggugcccgucaaguggaagcggugaggacuaguuauaagacugacuagcccgaugggccucccaacgggcccuccuccccuccuugcaccgagauuaauaaaaaaaaaaaaaaaaaaaaaaaaaaaaaaaaaaaaaaaaaaaaaaaaaaaaaaaaaaaaaaaaaaaaaaaaaaaaaaaaaaaaaaaaaaaaaaaaaaaa

SEQ ID NO: 34706 - RNA, 1662 nt, Artificial Sequence
  mRNA product Design i-3 (A100) comprising derived and/or modified sequence from LASV(Lassa virus/H.sapiens-wt/NGA/2018/ISTH_0959;Clade II)__AVV65099__GPCmut8 (opt1)
aggagaaagcuuaccaugggccagaucaucaccuucuuccaggaggugccccacgucaucgaggaggugaugaacaucgugcugaucgcccucagccugcuggccauccucaaggggaucuacaacgucgugaccugcggccuguucgggcugguguccuuccuccugcugugcggccgcagcugcuccacgaccuacaagggggucuacgagcuccagacccuggagcuggacauggcgagccucaacaugugcaugccgcuguccugcacgaagaacaacagccaccacuacaucauggugggcaacgagaccggccuggagcucacccugaccaacacguccaucaucaaccacaaguucugcaaccugagcgacgcccacaagaagaaccucuacgaccacgcccugauguccaucaucagcaccuuccaccuguccauccccaacuucaaccaguacgaggccaugagcugcgacuucaacgggggcaagaucuccgugcaguacaaccucagccacgccuacgcgaucgacgccgccaaccacugcgggaccaucgccaacggcguccugcagaccuucaugcggauggcguggggcggguccuacaucgcccuggacagcggcaagggguccugggacugcaucaugacgagcuaccaguaccucaucauccagaacaccaccugggaggaccacugccaguucucccgccccagccccaucggcuaccuggggcugcucagccagcggacccgcgacaucuacaucucccggcgccugcugggcacguucaccuggacccucagcgacuccgagggcaacgagacccccgggggcuacugccugacgcgguggaugcugaucgaggccgagcucaagugcuucgggaacaccgccguggccaagugcaacgagaagcacgacgaggaguucugcgacaugcugcgccuguucgacuucugcaagcaggcgauccggcgccucaagacccccgcccagaugagcauccagcugaucaacaaggccgugaacgcccugaucaacgaccagcucaucaugaagaaccaccuccgggacaucaugggcaucccguacugcaacuacuccaaguacugcuaccugaaccacaccgucacggggaagaccagccugccccgcugcugccugguguccaacggcagcuaccugaacgagacccacuucuccgacgacaucgagcagcaggccgacaacaugaucaccgagcuccugcagaaggaguacaucgaccggcagggcaagacgccccuggggcucguggaccuguucgucuucagcaccuccuucuaccugaucagcaucuuccugcaccucgugaagaucccgacccaccgccacgugaucggcaagcccugccccaagccccaccggcugaaccacauggggaucugcuccugcggccuguacaagcacccggggguccccgugaaguggaagcgcugaggacuaguuauaagacugacuagcccgaugggccucccaacgggcccuccuccccuccuugcaccgagauuaauaaaaaaaaaaaaaaaaaaaaaaaaaaaaaaaaaaaaaaaaaaaaaaaaaaaaaaaaaaaaaaaaaaaaaaaaaaaaaaaaaaaaaaaaaaaaaaaaaaaa

SEQ ID NO: 34707 - RNA, 1662 nt, Artificial Sequence
  mRNA product Design i-3 (A100) comprising derived and/or modified sequence from LASV(LASV003-NIG-2008;Clade II)__AIT17580__GPCmut8 (opt1)
aggagaaagcuuaccaugggccagaucaucaccuucuuccaggaggugccccacgucaucgaggaggugaugaacaucgugcugaucgcccucagccugcuggccauccucaaggggaucuacaacgucgcgaccugcggccuguucgggcugguguccuuccuccugcugugcggccgcagcugcuccacgaccuacaaggggguguacgagcuccagacccuggagcuggacauggccagccucaacaugugcaugccgcuguccugcacgaagaacaacagccaccacuacaucauggucggcaacgagaccggccuggagcucacccugaccaacacguccaucaucaaccacaaguucugcaaccugagcgacgcccacaagaagaaccucuacgaccacgcccugauguccaucaucagcaccuuccaccuguccauccccaacuucaaccaguacgaggccaugagcugcgacuucaacgggggcaagaucuccgugcaguacaaccucagccacaccuacgcgguggacgccgccaaccacugcgggaccaucgccaacggcguccugcagacguucaugcggauggcguggggcggguccuacaucgcccuggacagcggcaagggguccugggacugcaucaugaccagcuaccaguaccucaucauccagaacaccaccugggaggaccacugccaguucucccgccccagccccaucggcuaccuggggcugcucagccagcggacgcgcgacaucuacaucucccggcgccugcugggcaccuucaccuggacccucagcgacuccgagagcaacgagacgccgggcggguacugccugacccgguggaugcugaucgaggccgagcucaagugcuucggcaacaccgccguggccaagugcaacgagaagcacgacgaggaguucugcgacaugcugcgccuguucgacuucugcaagcaggcgauccggcgccucaaggcccccgcccagauguccauccagcugaucaacaaggccgugaacgcccugaucaacgaccagcucaucaugaagaaccaccuccgggacaucauggggauccccuacugcaacuacagcaaguacugcuaccugaaccacaccgucacgggccgcaccucccugccccggugcugccuggugagcaacggguccuaccugaacgagacccacuucagcgacgacaucgagcagcaggcggacaacaugaucaccgagcuccugcagaaggaguacauggaccgccagggcaagacgccccugggccucguggaccuguucgucuucuccaccagcuucuaccugaucuccaucuuccugcaccucgugaagaucccgacccaccggcacgugaucgggaagcccugccccaagccccaccgccugaaccacaugggcaucugcagcugcgggcuguacaagcacccgggcguccccgugaaguggaagcggugaggacuaguuauaagacugacuagcccgaugggccucccaacgggcccuccuccccuccuugcaccgagauuaauaaaaaaaaaaaaaaaaaaaaaaaaaaaaaaaaaaaaaaaaaaaaaaaaaaaaaaaaaaaaaaaaaaaaaaaaaaaaaaaaaaaaaaaaaaaaaaaaaaaa

SEQ ID NO: 34708 - RNA, 1662 nt, Artificial Sequence
  mRNA product Design i-3 (A100) comprising derived and/or modified sequence from LASV(LASV035-NIG-2009;Clade II)__AIT17588__GPCmut8 (opt1)
aggagaaagcuuaccaugggccagaucaucaccuucuuccaggaggugccccacgucaucgaggaggugaugaacaucgugcugaucgcccucagccugcuggccauccucaaggggaucuacaacgucgcgaccugcggccuguucgggcugguguccuuccuccugcugugcggccgcagcugcuccacgaccuacaaggggguguacgagcuccagacccuggagcuggacauggccagccucaacaugugcaugccgcuguccugcacgaagaacaacagccaccacuacaucauggucggcaacgagaccggccuggagcucacccugaccaacacguccaucaucaaccacaaguucugcaaccugagcgacgcccacaagaagaaccucuacgaccacgcccugauguccaucaucagcaccuuccaccuguccauccccaacuucaaccaguacgaggccaugagcugcgacuucaacgggggcaagaucuccgugcaguacaaccucagccacgcguacgccguggacgccgccaaccacugcgggaccaucgcgaacggcguccugcagaccuucaugcggauggccuggggcggguccuacaucgcccuggacagcggcaagggguccugggacugcaucaugacgagcuaccaguaccucaucauccagaacaccaccugggaggaccacugccaguucucccgccccagccccaucggcuaccuggggcugcucagccagcggacccgcgacaucuacaucucccggcgccugcugggcacguucaccuggacccucagcgacuccgagggcaacgagacccccgggggcuacugccugacgcgguggaugcugaucgaggccgagcucaagugcuucgggaacaccgccguggcgaagugcaacgagaagcacgacgaggaguucugcgacaugcugcgccuguucgacuucugcaagcaggccauccggcgccucaaggcccccgcccagaugagcauccagcugaucaacaaggccgugaacgcgcugaucaacgaccagcucaucaugaagaaccaccuccgggacaucaugggcauccccuacugcaacuacuccaaguacugcuaccugaaccacaccgucaccgggaagacgagccugccccgcugcugccugguguccaacggcagcuaccugaacgagacccacuucuccgacgacaucgagcagcaggccgacaacaugaucaccgagcuccugcagaaggaguacaucgaccggcagggcaagaccccgcuggggcucguggaccuguucgucuucagcacguccuucuaccugaucagcaucuuccugcaccucgugaagaucccgacccaccgccacgugaucggcaagcccugccccaagccccaccggcugaaccacauggggaucugcuccugcggccuguacaagcacccggggguccccgugaaguggaagcgcugaggacuaguuauaagacugacuagcccgaugggccucccaacgggcccuccuccccuccuugcaccgagauuaauaaaaaaaaaaaaaaaaaaaaaaaaaaaaaaaaaaaaaaaaaaaaaaaaaaaaaaaaaaaaaaaaaaaaaaaaaaaaaaaaaaaaaaaaaaaaaaaaaaaa

SEQ ID NO: 34709 - RNA, 1662 nt, Artificial Sequence
  mRNA product Design i-3 (A100) comprising derived and/or modified sequence from LASV(LASV1000-NIG-2009;Clade II)__AIT17782__GPCmut8 (opt1)
aggagaaagcuuaccaugggccagaucaucaccuucuuccaggaggugccccacgucaucgaggaggugaugaacaucgugcugaucgcccucagccugcuggccauccucaaggggaucuacaacgucgcgaccugcggccuguucgggcugguguccuuccuccugcugugcggccgcagcugcuccacgaccuacaaggggguguacgagcuccagacccuggagcuggacauggccagccucaacaugugcaugccgcuguccugcacgaagaacaacagccaccacuacaucauggucggcaacgagaccggccuggagcucacccugaccaacacguccaucaucaaccacaaguucugcaaccugagcgacgcccacaagaagaaccucuacgaccacgcccugauguccaucaucagcaccuuccaccuguccauccccaacuucaaccaguacgaggccaugagcugcgacuucaacgggggcaagaucuccgugcaguacaaccucagccacaccuacgcgguggacgccgccaaccacugcgggaccaucgccaacggcguccugcagacguucaugcggauggcguggggcggguccuacaucgcccuggacagcggcaagggguccugggacugcaucaugaccagcuaccaguaccucaucauccagaacaccaccugggaggaccacugccaguucucccgccccagccccaucggcuaccuggggcugcucagccagcggacgcgcgacaucuacaucucccggcgccugcugggcaccuucaccuggacccucagcgacuccgagggcaacgagacgcccgggggcuacugccugacccgguggaugcugaucgaggccgagcucaagugcuucgggaacaccgccguggccaagugcaacgagaagcacgacgaggaguucugcgacaugcugcgccuguucgacuucugcaagcaggcgaucaagcggcucaagacccccgcccagaugagcauccagcugaucaacaaggccgugaacgcccugaucaacgaccagcucaucaugaagaaccaccuccgcgacaucaugggcauccccuacugcaacuacuccaaguacugcuaccugaaccacacggucaccgggaagaccagccugccccggugcugccugguguccaacggcagcuaccugaacgagacccacuucuccgacgacaucgagcagcaggccgacaacaugaucacggagcuccugcagaaggaguacaucgaccgccagggcaagaccccgcuggggcucguggaccuguucgucuucagcaccuccuucuaccugaucagcaucuuccugcaccucgugaagaucccgacccaccggcacguggucggcaagcccugccccaagccccaccgccugaaccacauggggaucugcuccugcggccuguacaagcacccgggggugcccgugaaguggaagcggugaggacuaguuauaagacugacuagcccgaugggccucccaacgggcccuccuccccuccuugcaccgagauuaauaaaaaaaaaaaaaaaaaaaaaaaaaaaaaaaaaaaaaaaaaaaaaaaaaaaaaaaaaaaaaaaaaaaaaaaaaaaaaaaaaaaaaaaaaaaaaaaaaaaa

SEQ ID NO: 34710 - RNA, 1662 nt, Artificial Sequence
  mRNA product Design i-3 (A100) comprising derived and/or modified sequence from LASV(LASV221-NIG-2010;Clade II)__AIT17624__GPCmut8 (opt1)
aggagaaagcuuaccaugggccagaucaucaccuucuuccaggaggugccccacgucaucgaggaggugaugaacaucgugcugaucgcccucagccugcuggccauccucaaggggaucuacaacgucgcgaccugcggccuguucgggcugguguccuuccuccugcugugcggccgcagcugcuccacgaccuacaaggggguguacgagcuccagacccuggagcuggacauggccagccucaacaugugcaugccgcuguccugcacgaagaacaacagccaccacuacaucauggucggcaacgagaccggccuggagcucacccugaccaacacguccaucaucaaccacaaguucugcaaccugagcgacgcccacaagaagaaccucuacgaccacgcccugauguccaucaucagcaccuuccaccuguccauccccaacuucaaccaguacgaggccaugagcugcgacuucaacgggggcaagaucuccgugcaguacaaccucagccacaccuacgcgaucgacgccgccaaccacugcgggaccaucgccaacggcgugcugcagacguucaugcggauggcguggggcggguccuacaucgcccuggacagcggcaagggguccugggacugcaucaugaccagcuaccaguaccucaucauccagaacaccaccugggaggaccacugccaguucucccgccccagccccaucggcuaccuggggcugcucagccagcggacgcgcgacaucuacaucucccggcgccugcugggcaccuucaccuggacccucagcgacuccgagggcaacgagacgcccgggggcuacugccugacccgguggaugcugaucgaggccgagcucaagugcuucgggaacaccgccgucgccaagugcaacgagaagcacgacgaggaguucugcgacaugcugcgccuguucgacuucugcaagcaggcgauccggcgccucaagacccccgcccagaugagcauccagcugaucaacaaggccgugaacgcccugaucaacgaccagcucaucaugaagaaccaccuccgggacaucaugggcauccccuacugcaacuacuccaaguacugcuaccugaaccacacggugaccgggaagaccagccugccccgcugcugccuggucuccaacggcagcuaccugaacgagacccacuucuccgacgacaucgagcagcaggccgacaacaugaucacggagaugcuccagaaggaguacauggaccggcagggcaagaccccgcuggggcugguggaccucuucguguucagcaccuccuucuaccugaucagcaucuuccugcaccuggucaagaucccgacccaccgccacgugaucggcaagcccugccccaagccccaccggcucaaccacauggggaucugcuccugcggccuguacaagcacccgggggugcccgucaaguggaagcgcugaggacuaguuauaagacugacuagcccgaugggccucccaacgggcccuccuccccuccuugcaccgagauuaauaaaaaaaaaaaaaaaaaaaaaaaaaaaaaaaaaaaaaaaaaaaaaaaaaaaaaaaaaaaaaaaaaaaaaaaaaaaaaaaaaaaaaaaaaaaaaaaaaaaa

SEQ ID NO: 34711 - RNA, 1662 nt, Artificial Sequence
  mRNA product Design i-3 (A100) comprising derived and/or modified sequence from LASV(LASV237-NIG-2010;Clade II)__AIT17638__GPCmut8 (opt1)
aggagaaagcuuaccaugggccagaucaucaccuucuuccaggaggugccccacgucaucgaggaggugaugaacaucgugcugaucgcccucagccugcuggccauccucaaggggaucuacaacgucgcgaccugcggccuguucgggcugguguccuuccuccugcugugcggccgcagcugcuccacgaccuacaaggggguguacgagcuccagacccuggagcuggacauggccagccucaacaugugcaugccgcuguccugcacgaagaacaacagccaccacuacaucauggucggcaacgagaccggccuggagcucacccugaccaacacguccaucaucaaccacaaguucugcaaccugagcgacgcccacaagaaggaccucuacgaccacgcccugauguccaucaucagcaccuuccaccuguccauccccaacuucaaccaguacgaggccaugagcugcgacuucaacgggggcaagaucuccgugcaguacaaccucagccacaccuacgcgguggacgccgccaaccacugcgggaccaucgccaacggcguccugcagacguucaugcggauggcguggggcggguccuacaucgcccuggacagcggcaagggguccugggacugcaucaugaccagcuaccaguaccucaucauccagaacaccaccugggaggaccacugccaguucucccgccccagccccaucggcuaccuggggcugcucagccagcggacgcgcgacaucuacaucucccggcgccugcugggcaccuucaccuggacccucagcgacuccgagggcaacgagacgcccgggggcuacugccugacccgguggaugcugaucgaggccgagcucaagugcuucgggaacaccgccguggccaagugcaacgagaagcacgacgaggaguucugcgacaugcugcgccuguucgacuucugcaagcaggcgauccggcgccucaagacccccgcccagaugagcauccagcugaucaacaaggccgugaacgcccugaucaacgaccagcucaucaugaagaaccaccuccgggacaucaugggcauccccuacugcaacuacuccaaguacugcuaccugaaccacacggucaccgggaagaccagccugccccgcugcugccugguguccaacggcagcuaccugaacgagacccacuucuccgacgacaucgagcagcaggccgacaacaugaucacggagcuccugcagaaggaguacauggaccggcagggcaagaccccgcuggggcucguggaccuguucgucuucagcaccuccuucuaccugaucagcaucuuccugcaccucaucaagaucccgacccaccgccacaucacgggcaagcccugccccaagccccaccggcugaaccacauggggaucugcuccugcggccuguacaagcacccgggggugcccgugaaguggaagcgcugaggacuaguuauaagacugacuagcccgaugggccucccaacgggcccuccuccccuccuugcaccgagauuaauaaaaaaaaaaaaaaaaaaaaaaaaaaaaaaaaaaaaaaaaaaaaaaaaaaaaaaaaaaaaaaaaaaaaaaaaaaaaaaaaaaaaaaaaaaaaaaaaaaaa

SEQ ID NO: 34712 - RNA, 1662 nt, Artificial Sequence
  mRNA product Design i-3 (A100) comprising derived and/or modified sequence from LASV(LASV253-NIG-2011;Clade II)__AIT17670__GPCmut8 (opt1)
aggagaaagcuuaccaugggccagaucaucaccuucuuccaggaggugccccacgucaucgaggaggugaugaacaucgugcugaucgcccucagccugcuggccauccucaaggggaucuacaacgucgcgaccugcggccuguucgggcugguguccuuccuccugcugugcggccgcagcugcuccacgaccuacaaggggguguacgagcuccagacccuggagcuggacauggccagccucaacaugugcaugccgcuguccugcacgaagaacaacagccaccacuacaucauggucggcaacgagaccggccuggagcucacccugaccaacacguccaucaucaaccacaaguucugcaaccugagcgacgcccacaagaagaaccucuacgaccacgcccugauguccaucaucagcaccuuccaccuguccauccccaacuucaaccaguacgaggccaugagcugcgacuucaacgggggcaagaucuccgugcaguacaaccucagccacaccuacgcgguggacgccgccaaccacugcgggaccaucgccaacggcguccugcagacguucaugcggauggcguggggcggguccuacaucgcccuggacagcggcaagggguccugggacugcaucaugaccagcuaccaguaccucaucauccagaacaccaccugggaggaccacugccaguucucccgccccagccccaucggcuaccuggggcugcucagccagcggacgcgcgacaucuacaucucccggcgccugcugggcaccuucaccuggacccucagcgacuccgagggcaacgagacgcccgggggcuacugccugacccgguggaugcugaucgaggccgagcucaagugcuucgggaacaccgccguggccaagugcaacgagaagcacgacgaggaguucugcgacaugcugcgccuguucgacuucugcaagcaggcgauccggcgccucaaggcccccgcccagaugagcauccagcugaucaacaaggccgugaacgcccugaucaacgaccagcucaucaugaagaaccaccuccgggacaucaugggcaucccguacugcaacuacuccaaguacugcuaccugaaccacaccgucacggggcgcaccagccugccccggugcugccugguguccaacggcagcuaccugaacgagacccacuucuccgacgacaucgagcagcaggcggacaacaugaucaccgagcuccugcagaaggaguacaucgaccgccagggcaagacgccccuggggcucguggaccuguucgucuucagcaccuccuucuaccugaucagcaucuuccugcaccucgugaagaucccgacccaccggcacaucaucggcaagcccugccccaagccccaccgccugaaccacauggggaucugcuccugcggccuguacaagcacccgggggugcccgucaaguggaagcggugaggacuaguuauaagacugacuagcccgaugggccucccaacgggcccuccuccccuccuugcaccgagauuaauaaaaaaaaaaaaaaaaaaaaaaaaaaaaaaaaaaaaaaaaaaaaaaaaaaaaaaaaaaaaaaaaaaaaaaaaaaaaaaaaaaaaaaaaaaaaaaaaaaaa

SEQ ID NO: 34713 - RNA, 1662 nt, Artificial Sequence
  mRNA product Design i-3 (A100) comprising derived and/or modified sequence from LASV(LASV254-NIG-2011;Clade II)__AIT17674__GPCmut8 (opt1)
aggagaaagcuuaccaugggccagaucaucaccuucuuccaggaggugccccacgucaucgaggaggugaugaacaucgugcugaucgcccucagccugcuggccauccucaaggggaucuacaacgucgcgaccugcggccuguucgggcugguguccuuccuccugcugugcggccgcagcugcuccacgaccuacaaggggguguacgagcuccagacccuggagcuggacaugaccaaccucaacaugugcaugccgcugagcugcaccaagaacaacucccaccacuacaucauggucggcaacgagaccggccuggagcucacccugacgaacaccagcaucaucaaccacaaguucugcaaccuguccgacgcccacaagaagaaccucuacaaccacgcccugaugagcaucaucuccaccuuccaccugagcauccccaacuucaaccaguacgaggccauguccugcgacuucaacgggggcaagaucagcgugcaguacaaccucucccacagcuacgccguggacgcggccaaccacugcgggaccaucgccaacggcguccugcagacguucaugcggauggccuggggcggguccuacaucgcgcuggacagcggcaaggggaacugggacugcaucaugaccuccuaccaguaccucaucauccagaacaccaccugggaggaccacugccaguucagccgccccucccccaucggcuaccuggggcugcucagccagcggacgcgcgacaucuacaucagccggcgccugcugggcaccuucaccuggacccucuccgacagcgagggcaacgagacgcccgggggcuacugccugacccgguggaugcugaucgaggccgagcucaagugcuucgggaacaccgccguggccaagugcaacgagaagcacgacgaggaguucugcgacaugcugcgccuguucgacuucugcaagcaggccauccggcgccucaagacccccgcgcaggccaacauccagcugaucaacaaggccgugaacgcccugaucaacgaccagcucaucaugaagaaccaccuccgggacaucaugggcauccccuacugcaacuacuccaaguacugcuaccugaaccacacggucaccgggaagaccagccugccccgcugcugccugguguccaacggcagcuaccugaacgagacccacuucuccgacgacaucgagcagcaggccgacaacaugaucacggagcuccugcagaaggaguacauggaccggcagggcaagaccccgcuggggcucguggaccuguucgucuucagcaccuccuucuaccugaucagcaucuuccugcaccucgugaagaucccgacccaccgccacgugaucggcaagcccugccccaagccccaccggcugaaccacauggggaucugcuccugcggccuguacaagcacccggggguccccgugaaguggaagcgcugaggacuaguuauaagacugacuagcccgaugggccucccaacgggcccuccuccccuccuugcaccgagauuaauaaaaaaaaaaaaaaaaaaaaaaaaaaaaaaaaaaaaaaaaaaaaaaaaaaaaaaaaaaaaaaaaaaaaaaaaaaaaaaaaaaaaaaaaaaaaaaaaaaaa

SEQ ID NO: 34714 - RNA, 1662 nt, Artificial Sequence
  mRNA product Design i-3 (A100) comprising derived and/or modified sequence from LASV(Nig08-A19;Clade III)__ADU56618__GPCmut8 (opt1)
aggagaaagcuuaccaugggccagaucgugaccuucuuccaggaggucccccacgugaucgaggaggugaugaacaucguccugaucgcccucagcauccuggccauccugaaggggcucuacaacaucgcgaccugcggccugaucgggcuggugacguuccuccugcuguccggccgcagcugcuccaugaccuacaaggggguguacgagcuccagacccuggagcugaacaugaacacccucaacaugugcaugccgcugagcugcaccaagaacaacucccaccacuacaucauggucggcaacgagaccggccuggagcucacccugacgaacaccagccugcuccaccacaaguucugcaaccuguccgacgcccacaagaagaaccuguacgaccacacccucaugagcaucaucuccaccuuccaccugagcauccccaacuucaaccaguacgaggccauguccugcgacuucaacgggggcaagaucacggugcaguacaaccugagccacuccuacgccaucgacgccgcgaaccacugcgggaccguggccaacggcguccuccagaccuucaugcggauggccuggggcgggagcuacaucgcccuggacuccggccgcgggaagugggacugcaucaugaccagcuaccaguaccugaucauccagaacacgaccugggaggaccacugccaguucucccggcccagccccaucggcuaccucgggcugcugucccagcgcacccgggacaucuacaucagccgccggcuccugggcaccuucacguggacccugagcgacuccgagggcaacgagacccccgggggcuacugccucacccgcuggaugcugaucgaggcggagcugaagugcuucgggaacacggccguggccaagugcaacgagaagcacgacgaggaguucugcgacaugcuccggcuguucgacuucugcaagcaggccauccgccggcugaaggcccccgcgcagaugagcauccagcucaucaacaaggccgugaacgcccugaucaacgaccagcugaucaugaagaaccaccuccgcgacaucaugggcauccccuacugcaacuacuccaaguacugcuaccugaaccacaccagcaccgggcggaccucccugccccgcugcugccucgucagcaacggcuccuaccugaacgagacgcacuucagcgacgacaucgagcagcaggccgacaacaugaucaccgagaugcugcagaaggaguaccucgaccggcagggcaagaccccgcuggggcugguggaccuguucguguucuccaccagcuucuaccucaucuccaucuuccugcaccuggucaagaucccgacgcaccgccacaucgugggcaagcccugccccaagccccaccggcucaaccacauggggaucugcagcugcggccuguacaagcagccgggggugcccguccgcuggaagcggugaggacuaguuauaagacugacuagcccgaugggccucccaacgggcccuccuccccuccuugcaccgagauuaauaaaaaaaaaaaaaaaaaaaaaaaaaaaaaaaaaaaaaaaaaaaaaaaaaaaaaaaaaaaaaaaaaaaaaaaaaaaaaaaaaaaaaaaaaaaaaaaaaaaa

SEQ ID NO: 34715 - RNA, 1665 nt, Artificial Sequence
  mRNA product Design i-3 (A100) comprising derived and/or modified sequence from LASV(G1180-SLE-2010;Clade IV)__AIT17168__GPCmut8 (opt1)
aggagaaagcuuaccaugggccagaucgugaccuucuuccaggaggucccccacgugaucgaggaggugaugaacaucguccugaucgcccucagcauccuggccgugcugaaggggcucuacaacuucgcgaccugcggccugguggggcugcucaccuuccugcugcucugcggccgcuccugcaccgccagccgguacaagggggucuacgagcugcagacccuggagcucaacauggagacccugaacaugugcaugccgcuguccugcaccaagaacaacagccaccacuacaucauggugggcaacgagaccggccucgagcugacccugacgaacaccuccaucaucaaccacaaguucugcaaccucagcgacgcccacaagaagaaccuguacgaccacgcccugauguccaucaucagcaccuuccaccucuccauccccaacuucaaccaguacgaggccaugagcugcgacuucaacgggggcaagaucuccgugcaguacaaccugagccacuccuacgcgggggacgccgccaaccacugcggcaccgucgccaacggggugcugcagacguucaugcgcauggcguggggcggcagcuacaucgcccucgacuccgggcacggcagcugggacugcaucaugaccuccuaccaguaccugaucauccagaacaccaccugggaggaccacugccaguucagccggcccucccccaucggguaccugggccuccugagccagcgcacgcgggacaucuacaucagccgccggcugcucggcaccuucaccuggacccuguccgacagcgaggggaaggacacgccgggcggguacugccugacccgcuggaugcucaucgaggccgagcugaagugcuucggcaacaccgccguggccaagugcaacgagaagcacgacgaggaguucugcgacaugcugcggcuguucgacuucugcaagcaggcgauccagcgccugaaggcccccgcccagauguccauccagcugaucaacaaggccgucaacgcccucaucaacgaccagcugaucaugaagaaccaccuccgggacaucauggggauccccuacugcaacuacagcaaguacugcuaccucaaccacaccacgaccggcaagaccucccugcccaagugcugccuggugagcaacggcuccuaccucaacgagacccacuucagcgacgacaucgagcagcaggcggacaacaugaucacggagaugcugcagaaggaguacauggagcgccaggggaagacgccccugggccucguggaccuguucgucuucuccaccagcuucuaccugaucuccaucuuccugcaccucgugaagaucccgacccaccggcacaucgugggcaagagcugccccaagccccaccgccugaaccacauggggaucugcuccugcgggcuguacaagcagcccggcgucccggugaaguggaagcggugaggacuaguuauaagacugacuagcccgaugggccucccaacgggcccuccuccccuccuugcaccgagauuaauaaaaaaaaaaaaaaaaaaaaaaaaaaaaaaaaaaaaaaaaaaaaaaaaaaaaaaaaaaaaaaaaaaaaaaaaaaaaaaaaaaaaaaaaaaaaaaaaaaaa

SEQ ID NO: 34716 - RNA, 1665 nt, Artificial Sequence
  mRNA product Design i-3 (A100) comprising derived and/or modified sequence from LASV(G1442-SLE-2011;Clade IV)__AIT17180__GPCmut8 (opt1)
aggagaaagcuuaccaugggccagaucgugaccuucuuccaggaggucccccacgugaucgaggaggugaugaacaucguccugaucgcccucagcauccuggccgugcugaaggggcucuacaacguggcgaccugcggccugaucgggcuggucacguuccuccugcugugcggccgcuccugcaccaccacccucuacaaggggguguacgagcugcagacgcuggagcucaacauggagacccugaacaugugcaugccgcugagcugcaccaagaacaacucccaccacuacauccgggugggcaacgagacgggccucgagcugacccugaccaacaccagcaucaucaaccacaaguucugcaaccucuccgacgcccacaagaagaaccuguacgaccacgcccugaugagcaucaucuccacguuccaccucagcauccccaacuucaaccaguacgaggccauguccugcgacuucaacgggggcaagaucagcguccaguacaaccugucccacagcuacgccggggacgcggccaaccacugcggcaccguggccaacggggugcugcagaccuucaugcgcauggccuggggcggcuccuacaucgcgcucgacagcgggcggggcaacugggacugcaucaugaccuccuaccaguaccugaucauccagaacacgaccugggacgaccacugccaguucagccgccccucccccaucggguaccugggccuccugagccagcggacccgcgacgucuacaucucccggcgccugcucggcaccuucacguggacccugagcgacagcgaggggaaggacaccccgggcggguacugccugacccgguggaugcucaucgaggccgagcugaagugcuucggcaacacggccguggccaagugcaacgagaagcacgacgaggaguucugcgacaugcugcgccucuucgacuucugcaagcaggccauccagcggcugaaggcgcccgcccagauguccauccagcugaucaacaaggccgugaacgcccucaucaacgaccagcugaucaugaagaaccaccuccgcgacaucauggggauccccuacugcaacuacagcaaguacugcuaccugaacaacaccgccaccggcaagaccucccugcccaagugcugccugaucagcaacggcuccuaccucaacgagacgcacuucagcgacgacaucgagcaggaggcggacaacaugaucaccgagaugcugcagaaggaguacauggagcggcaggggaagacgccccugggccucgucgaccuguucguguucuccaccagcuucuaccugaucuccaucuuccugcaccucgugaagaucccgacccaccgccacaucgucggcaagagcugccccaagccccaccggcugaaccacauggggaucugcuccugcgggcuguacaagcagcccggcgugccggugcgcuggaagcggugaggacuaguuauaagacugacuagcccgaugggccucccaacgggcccuccuccccuccuugcaccgagauuaauaaaaaaaaaaaaaaaaaaaaaaaaaaaaaaaaaaaaaaaaaaaaaaaaaaaaaaaaaaaaaaaaaaaaaaaaaaaaaaaaaaaaaaaaaaaaaaaaaaaa

SEQ ID NO: 34717 - RNA, 1665 nt, Artificial Sequence
  mRNA product Design i-3 (A100) comprising derived and/or modified sequence from LASV(G3010-SLE-2013;Clade IV)__AIT17344__GPCmut8 (opt1)
aggagaaagcuuaccaugggccagaucgugaccuucuuccaggaggucccccacgugaucgaggaggugaugaacaucguccugaucgcccucagcauccuggccgugcugaaggggcucuacaacuucgcgaccugcggccugguggggcuggucacguuccuccugcugugcggccgcuccugcaccaccagccucuacaaggggguguacgagcugcagacccuggagcucaacauggagacgcugaacaugugcaugccgcuguccugcaccaagaacaacagccaccacuacaucauggugggcaacgagaccggccucgagcugacgcugaccaacaccuccaucaucaaccacaaguucugcaaccucagcgacgcccacaagaagaaccuguacaaccacgcccugauguccaucaucagcaccuuccaccucuccauccccaacuucaaccaguacgaggccaugagcugcgacuucaacgggggcaagaucuccguccaguacaaccugagccacuccuacgccggggacgcggccagccacugcggcacgguggccaacggggugcugcagaccuucaugcggauggccuggggcggcuccuacaucgcgcucgacagcggguacggcaagugggacugcaucaugaccuccuaccaguaccugaucauccagaacaccacgugggaggaccacugccaguucagccgccccucccccaucggguaccugggccuccugagccagcggacccgcgacaucuacaucagccggcgccugcucggcaccuucaccuggacgcuguccgacagcgaggggaaggacaccccgggcggguacugccugacccgguggaugcucaucgaggccgagcugaagugcuucggcaacaccgccgucgccaagugcaacgagaagcacgacgaggaguucugcgacaugcugcgccucuucgacuucugcaagcaggccauccagcggcugaagacgcccgcgcagauguccauccagcugaucaacaaggccgugaacgcccucaucaacgaccagcugaucaugaagaaccaccuccgcgacaucauggggauccccuacugcaacuacagcaaguacugcuaccugaaccacaccaccaccggcaagacgucccugcccaagugcugccuggugagcaacggcuccuaccucaacgagacccacuucagcgacgacaucgagcagcaggccgacaacaugaucaccgagaugcugcagaaggaguacauggagcggcaggggaagacgccccugggccucgucgaccuguucguguucuccaccagcuucuaccugaucuccaucuuccugcaccucgugaagaucccgacccaccgccacaucgucggcaagagcugccccaagccccaccggcugaaccacauggggaucugcuccugcgggcuguacaagcagcccggcgugccggugcgcuggaagcggugaggacuaguuauaagacugacuagcccgaugggccucccaacgggcccuccuccccuccuugcaccgagauuaauaaaaaaaaaaaaaaaaaaaaaaaaaaaaaaaaaaaaaaaaaaaaaaaaaaaaaaaaaaaaaaaaaaaaaaaaaaaaaaaaaaaaaaaaaaaaaaaaaaaa

SEQ ID NO: 34718 - RNA, 1665 nt, Artificial Sequence
  mRNA product Design i-3 (A100) comprising derived and/or modified sequence from LASV(G502-SLE-2009;Clade IV)__AIT17126__GPCmut8 (opt1)
aggagaaagcuuaccaugggccagaucgugaccuucuuccaggaggucccccacgugaucgaggaggugaugaacaucguccugaucgcccucagcauccuggccgugcugaaggggcucuacaacuucgcgaccugcggccugguggggcugcucacguuccugcugcucugcggccgcuccugcaccaccgggcuguacaagggcgucuacgagcugcagacccucgagcugaacauggagacgcugaacaugugcaugccgcucagcugcaccaagaacaacucccaccacuacaucauggugggcaacgagaccgggcuggagcugacgcucaccaacaccagcaucaucaaccacaaguucugcaaccuguccgacgcccacaagaagaaccuguacgaccacgcccucaugagcaucaucuccaccuuccaccugagcauccccaacuucaaccaguacgaggccauguccugcgacuucaacggcgggaagaucagcgugcaguacaaccugucccacagcuacgccggcgacgcggccgaccacugcgggacggucgccaacggcgugcuccagaccuucaugcggauggccuggggcggguccuacaucgcgcuggacagcggccgcgggcggugggacugcaucaugaccuccuaccaguaccugaucauccagaacaccacgugggaggaccacugccaguucagccgccccucccccaucggcuaccucggccugcugagccagcggacccgcgacaucuacaucucccggcgccuccuggggaccuucaccuggacgcugagcgacagcgagggcaaggacacccccgggggcuacugccucacccgguggaugcugaucgaggccgagcugaagugcuucgggaacaccgccguggccaagugcaacgagaagcacgacgaggaguucugcgacaugcuccgccuguucgacuucugcaagcaggccauccagcggcugaaggcgcccgcccagauguccauccagcucaucaacaaggccgucaacgcccugaucaacgaccagcuggugaugaagaaccaccuccgcgacaucaugggcauccccuacugcaacuacagccgguacugcuaccugaaccacacgaccaccggccgcaccucccugcccaagugcugccucgugagcaacggguccuaccugaacgagacgcacuucagcgacgacaucgagcagcaggccgacaacaugaucaccgagaugcugcagaaggaguacauggagcggcagggcaagaccccgcucgggcuggucgaccuguucguguucuccaccagcuucuaccugaucuccaucuuccuccaccuggugaagaucccgacgcaccgccacaucgucggcaagagcugccccaagccccaccggcugaaccacauggggaucugcuccugcggccucuacaagcagcccggcgugccggugaaguggaagcgcugaggacuaguuauaagacugacuagcccgaugggccucccaacgggcccuccuccccuccuugcaccgagauuaauaaaaaaaaaaaaaaaaaaaaaaaaaaaaaaaaaaaaaaaaaaaaaaaaaaaaaaaaaaaaaaaaaaaaaaaaaaaaaaaaaaaaaaaaaaaaaaaaaaaa

SEQ ID NO: 34719 - RNA, 1665 nt, Artificial Sequence
  mRNA product Design i-3 (A100) comprising derived and/or modified sequence from LASV(G733-SLE-2010;Clade IV)__AIT17154__GPCmut8 (opt1)
aggagaaagcuuaccaugggccagaucgugaccuucuuccaggaggucccccacgugaucgaggaggugaugaacaucguccugaucgcccucagcauccuggccgugcugaaggggcucuacaacuucgcgaccugcggcaucguggggcuggucuccuuccugcuccugugcggccgcagcugcacgaccucccuguacaaggggguguacgagcuccagacccuggagcugaacauggagacccucaacaugugcaugccgcugagcugcaccaagaacaacucccaccacuacaucauggugggcaacgagaccggccuggagcucacccugacgaacaccagcaucaucaaccacaaguucugcaaccuguccgacgcccacaagaagaaccucuacgaccacgcccugaugagcaucaucuccaccuuccaccugagcauccccaacuucaaccaguacgaggccauguccugcgacuucaacgggggcaagaucagcguccaguacaaccucucccacagcuacgccggggacgcggccaaccacugcggcaccaucgccaacggggugcugcagacguucaugcggauggccuggggcggcuccuacaucgcgcuggacagcgggcgcgaccggugggacugcaucaugaccuccuaccaguaccucaucauccagaacaccaccugggaggaccacugccaguucagccgccccucccccaucggcuaccuggggcugcucagccagcggacgcgcgacaucuacaucagccggcgccugcugggcaccuucaccuggacccucuccgacagcgagggcaaggacacgcccgggggcuacugccugacccgguggaugcugaucgaggccgagcucaagugcuucgggaacaccgccguggccaagugcaacgagaagcacgacgaggaguucugcgacaugcugcgccuguucgacuucugcaagcaggccauccagcggcucaaggcgcccgcccagauguccauccagcugaucaacaaggccgucaacgcccugaucaacgaccagcucaucaugaagaaccaccuccgcgacaucaugggcauccccuacugcaacuacagcaaguacugcuaccugaaccacaccacgaccgggaagaccucccugcccaagugcugccuggugagcaacggcuccuaccugaacgagacccacuucagcgacgacaucgagcagcaggccgacaacaugaucacggagaugcuccagaaggaguacauggagcggcagggcaagaccccgcuggggcugguggaccucuucgucuucuccaccagcuucuaccugaucuccaucuuccugcaccuggugaagaucccgacccaccgccacguggucggcaagagcugccccaagccccaccggcucaaccacauggggaucugcuccugcggccuguacgggcagcccggcgugccggugaaguggaagcgcugaggacuaguuauaagacugacuagcccgaugggccucccaacgggcccuccuccccuccuugcaccgagauuaauaaaaaaaaaaaaaaaaaaaaaaaaaaaaaaaaaaaaaaaaaaaaaaaaaaaaaaaaaaaaaaaaaaaaaaaaaaaaaaaaaaaaaaaaaaaaaaaaaaaa

SEQ ID NO: 34720 - RNA, 1665 nt, Artificial Sequence
  mRNA product Design i-3 (A100) comprising derived and/or modified sequence from MOPV/LASV reassortant(IGS-1;Clade IV)__AFY05576__GPCmut8 (opt1)
aggagaaagcuuaccaugggccagaucgugaccuucuuccaggaggucccccacgugaucgaggaggugaugaacaucguccugaucgcccucagcgugcuggccgugcugaaggggcucuacaacuucgcgaccugcggccuggucgggcuggugacguuccuccugcugugcggccgcuccugcaccaccagccucuacaaggggguguacgagcugcagacccuggagcucaacauggagacgcugaacaugugcaugccgcuguccugcaccaagaacaacagccaccacuacaucauggucggcaacgagaccggccucgagcugacgcugaccaacaccuccaucaucaaccacaaguucugcaaccucagcgacgcccacaagaagaaccuguacgaccacgcccugauguccaucaucagcaccuuccaccucuccauccccaacuucaaccaguacgaggccaugagcugcgacuucaacgggggcaagaucuccgugcaguacaaccugagccacuccuacgccggggacgcggccaaccacugcggcacgguggccaacgggguccugcagaccuucaugcggauggccuggggcggcagcuacaucgcgcucgacuccgggcgcggcaacugggacugcaucaugaccagcuaccaguaccugaucauccagaacaccacgugggaggaccacugccaguucucccggcccagccccaucggguaccugggccuccugucccagcgcacccgggacaucuacaucagccgccggcugcucggcaccuucaccuggacgcugagcgacuccgagggggaggacaccccgggcggguacugccugacccgcuggaugcucaucgaggccgagcugaagugcuucggcaacaccgccguggccaagugcaacgagaagcacgacgaggaguucugcgacaugcugcggcuguucgacuucugcaagcaggccauccagcgccugaaggcgcccgcccagaugagcauccagcugaucaacaaggccgugaacgcccucaucaacgaccagcugaucaugaagaaccaccuccgggacaucauggggauccccuacugcaacuacuccaaguacugcuaccucaaccacacgaccaccggccgcaccagccugcccaagugcugccuggucuccaacggcagcuaccucaacgagacgcacuucuccgacgacaucgagcagcaggccgacaacaugaucaccgagaugcugcagaaggaguacauggagcggcaggggaagacgccccugggccucguggaccuguucguguucagcaccuccuucuaccugaucagcaucuuccugcaccucgucaagaucccgacccaccgccacaucguggggaaguccugccccaagccccaccggcugaaccacaugggcaucugcagcugcgggcuguacaagcagcccggcgugccggucaaguggaagcgcugaggacuaguuauaagacugacuagcccgaugggccucccaacgggcccuccuccccuccuugcaccgagauuaauaaaaaaaaaaaaaaaaaaaaaaaaaaaaaaaaaaaaaaaaaaaaaaaaaaaaaaaaaaaaaaaaaaaaaaaaaaaaaaaaaaaaaaaaaaaaaaaaaaaa

SEQ ID NO: 34721 - RNA, 1665 nt, Artificial Sequence
  mRNA product Design i-3 (A100) comprising derived and/or modified sequence from LASV(LM765-SLE-2012;Clade IV)__AIT17814__GPCmut8 (opt1)
aggagaaagcuuaccaugggccagaucgugaccuucuuccaggaggucccccacgugaucgaggaggugaugaacaucguccugaucgcccucagcauccuggccgugcugaaggggcucuacaacuucgcgaccugcggccugguggggcuggucacguuccuccugcugugcggccgcuccugcaccaccagccucuacaaggggguguacgagcugcagacccuggagcucaacauggagacgcugaacaugugcaugccgcuguccugcaccaagaacaacagccaccacuacaucauggugggcaacgagaccggccucgagcugacgcugaccaacaccuccaucaucgaccacaaguucugcaaccucagcgacgcccaccggaagaaccuguacgaccacgcccugauguccaucaucagcaccuuccaccucuccauccccaacuucaaccaguacgaggccaugagcugcgacuucaacgggggcaagaucuccguccaguacaaccugagccacuccuacgccaaggacgcggccgaccacugcgggacgguggccaacggcgugcugcagaccuucaugcgcauggccuggggcgggagcuacaucgcgcucgacuccggccgggggcgcugggacugcaucaugaccagcuaccaguaccugaucauccagaacaccacgugggaggaccacugccaguucucccggcccagccccaucggcuaccuggggcuccugucccagcgcacccgggacaucuacaucagccgccggcugcucggcaccuucaccuggacgcugagcgacuccgagggcaaggacacccccgggggcuacugccugacccgcuggaugcucaucgaggccgagcugaagugcuucgggaacaccgccgucgccaagugcaacgagaagcacgacgaggaguucugcgacaugcugcggcuguucgacuucugcaagcaggccauccagcgccugaaggcgcccgcccagaugagcauccagcugaucaacaaggccgugaacgcccucaucaacgaccagcugaucaugaagaaccaccuccgggacaucaugggcauccccuacugcaacuacuccaaguacugcuaccucaaccacacgaccaccgggaagaccagccugcccaagugcugccugguguccaacggcagcuaccucaacgagacgcacuucuccgacgacaucgagcagcaggccgacaacaugaucaccgagaugcugcagaaggaguacauggagcgccagggcaagaccccgcuggggcucgucgaccuguucguguucagcaccuccuucuaccugaucagcaucuuccugcaccucgugaagaucccgacgcaccggcacaucgucggcaagcccugccccaagccccaccgccugaaccacauggggaucugcuccugcggccuguacaagcagccgggggugcccgugaaguggaagcggugaggacuaguuauaagacugacuagcccgaugggccucccaacgggcccuccuccccuccuugcaccgagauuaauaaaaaaaaaaaaaaaaaaaaaaaaaaaaaaaaaaaaaaaaaaaaaaaaaaaaaaaaaaaaaaaaaaaaaaaaaaaaaaaaaaaaaaaaaaaaaaaaaaaa

SEQ ID NO: 34722 - RNA, 1665 nt, Artificial Sequence
  mRNA product Design i-3 (A100) comprising derived and/or modified sequence from LASV(LM776-SLE-2012;Clade IV)__AIT17824__GPCmut8 (opt1)
aggagaaagcuuaccaugggccagaucgugaccuucuuccaggaggucccccacgugaucgaggaggugaugaacaucguccugaucgcccucagcauccuggccgugcugaaggggcucuacaacuucgcgaccugcggccugguggggcuggucacguuccuccugcugugcggccgcuccugcaccaccagcguguacaaggggguguacgagcuccagacccuggagcugaacauggagacgcucaacaugugcaugccgcuguccugcaccaagaacaacagccaccacuacaucauggucggcaacgagaccggccuggagcucacgcugaccaacaccuccaucaucaaccacaaguucugcaaccugagcgacgcccacaagaagaaccucuacgaccacgcccugauguccaucaucagcaccuuccaccuguccauccccaacuucaaccaguacgaggccaugagcugcgacuucaacgggggcaagaucuccgugcaguacaaccucagccacuccuacgccggggacgcggccaaccacugcggcacgguggccaacgggguccugcagaccuucaugcggauggccuggggcggcagcuacaucgcgcuggacuccgggcacggcaagugggacugcaucaugaccagcuaccaguaccucaucauccagaacaccacgugggaggaccacugccaguucucccgccccagccccaucggguaccugggccugcucucccagcggacccgcgacaucuacaucagccggcgccugcugggcaccuucaccuggacgcucagcgacuccgaggggaaggacaccccgggcggguacugccugacccgguggaugcugaucgaggccgagcucaagugcuucggcaacaccgccguggccaagugcaacgagaagcacgacgaggaguucugcgacaugcugcgccuguucgacuucugcaagcaggccauccagcggcucaaggcgcccgcccagaugagcauccagcugaucaacaaggccgugaacgcccugaucaacgaccagcucaucaugaagaaccaccuccgcgacaucauggggauccccuacugcaacuacuccaaguacugcuaccugaaccacacgaccaccggcaagaccagccugcccaagugcugccuggucuccaacggcagcuaccugaacgagacgcacuucuccgacgacaucgagcagcaggccgacaacaugaucaccgagaugcuccagaaggaguacauggagcggcaggggaagacgccccugggccugguggaccucuucguguucagcaccuccuucuaccugaucagcaucuuccugcaccuggucaagaucccgacccaccgccacaucguggggaaguccugccccaagccccaccggcucaaccacaugggcaucugcagcugcgggcuguacaagcagcccggcgugccgguccgcuggaagcggugaggacuaguuauaagacugacuagcccgaugggccucccaacgggcccuccuccccuccuugcaccgagauuaauaaaaaaaaaaaaaaaaaaaaaaaaaaaaaaaaaaaaaaaaaaaaaaaaaaaaaaaaaaaaaaaaaaaaaaaaaaaaaaaaaaaaaaaaaaaaaaaaaaaa

SEQ ID NO: 34723 - RNA, 1665 nt, Artificial Sequence
  mRNA product Design i-3 (A100) comprising derived and/or modified sequence from LASV(Mad39;Clade IV)__ANH09722__GPCmut8 (opt1)
aggagaaagcuuaccaugggccagaucgugaccuucuuccaggaggucccccacgugaucgaggaggugaugaacaucguccugaucgcccucagcauccuggccgugcugaaggggcucuacaacguggcgaccugcggccugaucgggcuggucacguuccuccugcugugcggccgcuccugcaccaccacccucuacaaggggguguacgagcugcaggcccuggagcucaacauggagacgcugaacaugugcaugccgcugagcugcaccaagaacaacucccaccacuacauccgggugggcaacgagaccggccucgagcugacgcugaccaacaccagccucaucaaccacaaguucugcaaccuguccgacgcccacaagaagaaccuguacgaccacgcccucaugagcaucaucuccaccuuccaccugagcauccccaacuucaaccaguacgaggccauguccugcgacuucaacgacgggaagaucagcguccaguacaaccugucccacacguacgcgggcgacaccgccaaccacugcgggaccguggccaacggcgugcuccagaccuucaugcgcauggccuggggcgggagcuacaucgcgcuggacuccggccgcgggggcugggacugcaucaugacgagcuaccaguaccugaucauccagaacaccaccugggaggaccacugccaguucucccggcccagccccaucggguaccucggccugcugucccagcggacccgcgacaucuacaucagccggcgccuccugggcacguucaccuggacccuguccgacagcgaggggaaggacaccccgggcggguacugccucacgcgguggaugcugaucgaggccgagcugaagugcuucggcaacaccgccgucgccaagugcaacgagaagcacgacgaggaguucugcgacaugcuccgccuguucgacuucugcaagcaggccauccagcggcugaaggcgcccgcccagaugagcauccagcucaucaacaaggccgugaacgcccugaucaacgaccagcugaucaugaagaaccaccuccgcgacaucauggggauccccuacugcaacuacuccaaguacugcuaccugaaccacaccgugaccggcaagacgagccugcccaagugcugccucgucuccaacggcagcuaccugaacgagacccacuucuccgacgacaucgagcagcaggccgacaacaugaucaccgagaugcugcagaaggaguacauggagcggcaggggaagacgccccucggccugguggaccuguucguguucagcaccuccuucuaccugaucagcaucuuccuccaccuggucaagaucccgacccaccgccacgugguggggaagcccugccccaagccccaccggcugaaccacaugggcaucugcuccugcggguucuacaagcagccgggcguccccgugcgcuggaagcggugaggacuaguuauaagacugacuagcccgaugggccucccaacgggcccuccuccccuccuugcaccgagauuaauaaaaaaaaaaaaaaaaaaaaaaaaaaaaaaaaaaaaaaaaaaaaaaaaaaaaaaaaaaaaaaaaaaaaaaaaaaaaaaaaaaaaaaaaaaaaaaaaaaaa

SEQ ID NO: 34724 - RNA, 1665 nt, Artificial Sequence
  mRNA product Design i-3 (A100) comprising derived and/or modified sequence from LASV(Z0947-SLE-2011;Clade IV)__AIT17840__GPCmut8 (opt1)
aggagaaagcuuaccaugggccagaucgugaccuucuuccaggaggucccccacgugaucgaggaggugaugaacaucguccugaucgcccucagcauccuggccgugcugaaggggcucuacaacuucgcgaccugcggccugguggggcuggucacguuccuccugcugugcggccgcuccugcaccaucagccucuacaaggggguguacgagcugcagacccuggagcucaacauggagacccugaacaugugcaugccgcuguccugcaccaagaacaacagccaccacuacaucauggugggcaacgagaccggccucgagcugacccugacgaacaccuccaucaucaaccacaaguucugcaaccucagcgacgcccacaagaagaaccuguacgaccacgcccugauguccaucaucagcaccuuccaccucuccauccccaacuucaaccaguacgaggccaugagcugcgacuucaacgggggcaagaucuccguccaguacaaccugagccacuccuacgccggggacgcggccaaccacugcggcaccguggccaacggggugcugcagacguucaugcggauggccuggggcggcagcuacaucgcgcucgacuccgggcgcgaccggugggacugcaucaugaccagcuaccaguaccugaucauccagaacaccaccugggaggaccacugccaguucucccgccccagccccaucggcuaccuggggcuccugucccagcggacgcgcgacaucuacaucagccggcgccugcucggcaccuucaccuggacccugagcgacuccgagggcaaggacacgcccgggggcuacugccugacccgguggaugcucaucgaggccgagcugaagugcuucgggaacaccgccgucgccaagugcaacgagaagcacgacgaggaguucugcgacaugcugcgccucuucgacuucugcaagcaggccauccagcggcugaaggcgcccgcccagaugagcauccagcugaucaacaaggccgugaacgcccucaucaacgaccagcugaucaugaagaaccaccuccgcgacaucaugggcauccccuacugcaacuacuccaaguacugcuaccugaaccacaccacgaccgggaagaccagccugcccaagugcugccugguguccaacggcagcuaccucaacgagacccacuucuccgacgacaucgagcagcaggccgacaacaugaucacggagaugcugcagaaggaguacauggagcggcagggcaagaccccgcuggggcucgucgaccuguucguguucagcaccuccuucuaccugaucagcaucuuccugcaccucgugaagaucccgacccaccgccacaucgucggcaagcccugccccaagccccaccggcugaaccacauggggaucugcuccugcggccuguacaagcagccgggggugcccgugaaguggaagcgcugaggacuaguuauaagacugacuagcccgaugggccucccaacgggcccuccuccccuccuugcaccgagauuaauaaaaaaaaaaaaaaaaaaaaaaaaaaaaaaaaaaaaaaaaaaaaaaaaaaaaaaaaaaaaaaaaaaaaaaaaaaaaaaaaaaaaaaaaaaaaaaaaaaaa

SEQ ID NO: 34725 - RNA, 1665 nt, Artificial Sequence
  mRNA product Design i-3 (A100) comprising derived and/or modified sequence from LASV(Josiah;Clade IV)__NP_694870__GPCmut8 (opt1)
aggagaaagcuuaccaugggccagaucgugaccuucuuccaggaggucccccacgugaucgaggaggugaugaacaucguccugaucgcccucagcgugcuggccgugcugaaggggcucuacaacuucgcgaccugcggccuggucgggcuggugacguuccuccugcugugcggccgcuccugcaccaccagccucuacaaggggguguacgagcugcagacccuggagcucaacauggagacgcugaacaugugcaugccgcuguccugcaccaagaacaacagccaccacuacaucauggucggcaacgagaccggccucgagcugacccugacgaacaccuccaucaucaaccacaaguucugcaaccucagcgacgcccacaagaagaaccuguacgaccacgcccugauguccaucaucagcaccuuccaccucuccauccccaacuucaaccaguacgaggccaugagcugcgacuucaacgggggcaagaucuccgugcaguacaaccugagccacuccuacgccggggacgcggccaaccacugcggcaccguggccaacgggguccugcagacguucaugcggauggccuggggcggcagcuacaucgcgcucgacuccgggcgcggcaacugggacugcaucaugaccagcuaccaguaccugaucauccagaacaccaccugggaggaccacugccaguucucccggcccagccccaucggguaccugggccuccugucccagcgcacgcgggacaucuacaucagccgccggcugcucggcaccuucaccuggacccugagcgacuccgaggggaaggacacgccgggcggguacugccugacccgcuggaugcucaucgaggccgagcugaagugcuucggcaacaccgccguggccaagugcaacgagaagcacgacgaggaguucugcgacaugcugcggcuguucgacuucugcaagcaggccauccagcgccugaaggcgcccgcccagaugagcauccagcugaucaacaaggccgugaacgcccucaucaacgaccagcugaucaugaagaaccaccuccgggacaucauggggauccccuacugcaacuacuccaaguacugcuaccucaaccacaccacgaccggccgcaccagccugcccaagugcugccuggucuccaacggcagcuaccucaacgagacccacuucuccgacgacaucgagcagcaggccgacaacaugaucacggagaugcugcagaaggaguacauggagcggcaggggaagaccccgcugggccugguggaccucuucguguucagcaccuccuucuaccugaucagcaucuuccugcaccucgucaagauccccacccaccgccacaucguggggaaguccugccccaagccccaccggcugaaccacaugggcaucugcagcugcgggcuguacaagcagccgggcgugcccgucaaguggaagcgcugaggacuaguuauaagacugacuagcccgaugggccucccaacgggcccuccuccccuccuugcaccgagauuaauaaaaaaaaaaaaaaaaaaaaaaaaaaaaaaaaaaaaaaaaaaaaaaaaaaaaaaaaaaaaaaaaaaaaaaaaaaaaaaaaaaaaaaaaaaaaaaaaaaaa

SEQ ID NO: 34726 - RNA, 1662 nt, Artificial Sequence
  mRNA product Design i-3 (A100) comprising derived and/or modified sequence from LASV(LP;Clade I)__AAF86701__GPCmut8 (opt1)
aggagaaagcuuaccaugggccagaucaucaccuucuuccaggaggugccccacgucaucgaggaggugaugaacaucgugcugaucgcccucagccugcuggccauccucaaggggcuguacaacaucgcgaccugcggcaucaucgggcuggucgccuuccucuuccugugcggcaaguccugcagccugacgcucaagggcggguacgagcugcagacccuggagcucaacauggagacccugaacaugugcaugccgcuguccugcaccaagaacagcucccaccacuacauccgcgugggcaacgagacggggcucgagcugacccugaccaacaccagcaucaucaaccacaaguucugcaaccucuccgacgcccacaagaagaaccuguacgaccacgcccugaugagcaucaucuccacguuccaccucagcauccccaacuucaaccaguacgaggccauguccugcgacuucaacggcgggaagaucagcgugcaguacaaccugucccacagcuacgcgggcgacgccgccgagcacugcgggaccgucgccaacggcgugcugcagaccuucaugcggauggcguggggcgggcgcuacaucgcccucgacuccggcaaggggaacugggacugcaucaugaccagcuaccaguaccugaucauccagaacacgaccugggaggaccacugccaguucucccggcccagccccaucggcuaccugggccuccugucccagcgcacccgggacaucuacaucagccgccggcugcucgggaccuucacguggacccugagcgacuccgagggcaacgagacccccgggggcuacugccugacccgcuggaugcucaucgaggccgagcugaagugcuucgggaacacggccguggccaagugcaacgagaagcacgacgaggaguucugcgacaugcugcggcuguucgacuucugcaagcaggcgauccgccggcugaaggccccggcccagaugagcauccagcugaucaacaaggccgucaacgcccucaucaacgaccagcugaucaugaagaaccaccuccgcgacaucaugggcauccccuacugcaacuacuccaaguacugcuaccucaaccacaccagcuccggccggaccagccugcccaagugcugccugaucuccaacgggagcuaccucaacgagacccaguucuccgacgacaucgagcagcaggcggacaacaugaucacggagaugcugcagaaggaguacaucgagcgccagggcaagaccccgcuggggcugguggacaucuucaucuucagcaccuccuucuaccucaucagcaucuuccugcaccugaucaagauccccacccaccggcacaucgugggcaagcccugccccaagccgcaccgccucaaccacaugggggucugcuccugcggccuguacaagcaccccggcgugcccacgaaguggaagcggugaggacuaguuauaagacugacuagcccgaugggccucccaacgggcccuccuccccuccuugcaccgagauuaauaaaaaaaaaaaaaaaaaaaaaaaaaaaaaaaaaaaaaaaaaaaaaaaaaaaaaaaaaaaaaaaaaaaaaaaaaaaaaaaaaaaaaaaaaaaaaaaaaaaa

SEQ ID NO: 34727 - RNA, 1662 nt, Artificial Sequence
  mRNA product Design i-3 (A100) comprising derived and/or modified sequence from LASV(803213;Clade II)__AAF86703__GPCmut8 (opt1)
aggagaaagcuuaccaugggccagaucaucaccuucuuccaggaggugccccacgucaucgaggaggugaugaacaucgugcugaucgcccucagccugcuggccauccucaaggggaucuacaacgucgcgaccugcggccuguucgggcugaucuccuuccuccugcugugcggccgcagcugcuccgugacguacaaggggguguacgagcuccagacccuggagcugaacauggccaaccucaacaugugcaugccgcugagcugcaccaagaacaacucccaccacuacaucauggucggcaacgagaccggccuggagcucacgcugaccaacaccagcaucaucaaccacaaguucugcaaccuguccgacgcccacaagaagaaccucuacgaccacgcccugaugagcaucaucuccaccuuccaccugagcauccccaacuucaaccaguacgaggccauguccugcgacuucaacgggggcaagaucagcgugcaguacaaccucucccacagcuucgcgguggacgccgccaaccacugcgggacgaucgccaacggcguccugcagaccuucaugcggauggcguggggcggguccuacaucgcccuggacagcggcaaggggaacugggacugcaucaugaccuccuaccaguaccucaucauccagaacaccacgugggaggaccacugccaguucagccgccccucccccaucggcuaccuggggcugcucagccagcggacccgcgacaucuacaucagccggcgccugcugggcaccuucaccuggacgcucuccgacagcgagggcaacgaggcccccgggggcuacugccugacccgguggaugcugaucgaggccgagcucaagugcuucgggaacaccgccguggcgaagugcaacgagaagcacgacgaggaguucugcgacaugcugcgccuguucgacuucugcaagcaggccaucaagcggcucaagaccccggcccagauguccauccagcugaucaacaaggccgugaacgcccugaucaacgaccagcucaucaugaagaaccaccuccgcgacaucaugggcauccccuacugcaacuacagccgguacugcuaccugaaccacacggucaccgggaagaccucccugccccgcugcugccuggugagcaacggcuccuaccugaacgagacccacuucagcgacgacaucgagcagcaggcggacaacaugaucacggagaugcuccagaaggaguacauggaccggcagggcaagaccccgcuggggcugguggaccuguucgucuucuccaccagcuucuaccucaucuccaucuuccugcaccuggugaagauccccacccaccgccacaucgugggcaagcccugccccaagccgcaccggcucaaccacauggggaucugcagcugcggccuguacaagcaccccgggguccccgugaaguggaagcgcugaggacuaguuauaagacugacuagcccgaugggccucccaacgggcccuccuccccuccuugcaccgagauuaauaaaaaaaaaaaaaaaaaaaaaaaaaaaaaaaaaaaaaaaaaaaaaaaaaaaaaaaaaaaaaaaaaaaaaaaaaaaaaaaaaaaaaaaaaaaaaaaaaaaa

SEQ ID NO: 34728 - RNA, 1662 nt, Artificial Sequence
  mRNA product Design i-3 (A100) comprising derived and/or modified sequence from LASV(GA391;Clade III)__CAA36645__GPCmut8 (opt1)
aggagaaagcuuaccaugggccagaucgugaccuucuuccaggaggucccccacgugaucgaggaggugaugaacaucguccugaucgcccucagcauccuggccauccugaaggggcucuacaacguggcgaccugcggccugaucgggcuggugacguuccuccugcuguccggccgcagcugcucccucaucuacaaggggaccuacgagcugcagacccuggagcucaacauggagacccugaacaugugcaugccgcugagcugcacgaagaacaacucccaccacuacauccgggucggcaacgagaccggccucgagcugacccugaccaacacgagcauccucaaccacaaguucugcaaccuguccgacgcccacaagcgcaaccuguacgaccacagccucauguccaucaucagcaccuuccaccuguccauccccaacuucaaccaguacgaggccaugagcugcgacuucaacgggggcaagaucaccgugcaguacaaccugucccacagcuucgccguggacgccgcggggcacugcggcacccucgccaacgggguccugcagacguucaugcggauggccuggggcggcuccuacaucgcccuggacagcgggcgcggcaacugggacugcaucaugaccuccuaccaguaccucaucauccagaacaccaccugggacgaccacugccaguucagccggcccucccccaucggguaccugggccugcucagccagcgcacgcgggacaucuacaucagccgccggcugcugggcaccuucaccuggacccucuccgacagcgaggggaacgagacgccgggcggguacugccugacccgcuggaugcugaucgaggcggagcucaagugcuucggcaacaccgccguggccaagugcaacgagaagcacgacgaggaguucugcgacaugcugcggcuguucgacuucugcaagcaggccauccgccggcucaagacccccgcccagauguccauccagcugaucaacaaggcggugaacgcccugaucaacgaccagcucaucaugaagaaccaccuccgcgacaucauggggauccccuacugcaacuacagccgguacugcuaccugaaccacacguccaccggcaagaccagccugccccgcugcugccugaucuccaacggcagcuaccugaacgagaccaaguucuccgacgacaucgagcagcaggccgacaacaugaucacggagaugcugcagaaggaguacaucgaccggcaggggaagaccccgcucggccuggucgaccuguucguguucagcaccuccuucuaccucaucagcaucuuccugcaccuggugaagauccccacccaccgccacaucgucgggaagcccugccccaagccgcaccggcucaaccacaugggcaucugcuccugcgggcuguacaagcagcccggcgugcccgugcgcuggaagcggugaggacuaguuauaagacugacuagcccgaugggccucccaacgggcccuccuccccuccuugcaccgagauuaauaaaaaaaaaaaaaaaaaaaaaaaaaaaaaaaaaaaaaaaaaaaaaaaaaaaaaaaaaaaaaaaaaaaaaaaaaaaaaaaaaaaaaaaaaaaaaaaaaaaa

SEQ ID NO: 34729 - RNA, 1665 nt, Artificial Sequence
  mRNA product Design i-3 (A100) comprising derived and/or modified sequence from LASV(AV;Clade V)__CCA30314__GPCmut8 (opt1)
aggagaaagcuuaccaugggccagaucgugaccuucuuccaggaggucccccacgugaucgaggaggugaugaacaucguccugaucgcccucagcauccuggccgugcugaaggggcucuacaacaucgcgaccugcggccugaucgggcugaucacguuccuccugcugugcggccgcuccugcagcuccaaccucuacaaggggguguacgagcugcagagccuggaccucaacauggagacccugaacaugugcaugccgcuguccugcaccaagaacaacagccaccacuacauccgggucggcaacgacaccggccucgagcugacgcugaccaacaccuccauccucaaccacaaguucugcaaccugagcgacgcccacaagaaggaccuguacgaccacgcccucauguccaucaucagcaccuuccaccuguccauccccaacuucaaccaguacgaggccaugagcugcgacuucaacgggggcaagaucuccgugcaguacaaccugagccacuccuacgccaucgacgcggccaaccacugcgggacgguggccaacggcauccuccagaccuucaugcgcauggccuggggcgggagcuacaucgcgcuggacuccggccgggggaacugggacugcaucaugaccagcuaccaguaccugaucauccagaacaccacgugggagaaccacugccaguucucccgccccagccccaucggcuaccucgggcugcugagccagcggacccgcgacaucuacaucucccggcgccuccugggcaccuucaccuggacgcugagcgacuccgagggcaacgccacccccgggggcuacugccucacccgguggaugcugaucgaggccgagcugaagugcuucgggaacaccgccgucgccaagugcaacgagaagcacgacgaggaguucugcgacaugcuccgccuguucgacuucugcaagcaggcgaucagccggcugaaguccccggcccagaugagcauccagcucaucaacaaggccgugaacgcccugaucaacgaccagcugaucaugaagaaccaccuccgcgacaucaugggcauccccuacugcaacuacuccaaguacugcuaccugaaccacacgaucaccgggaagaccagccugcccaagugcugccucguguccaacggcagcuaccugaacgagacccacuucuccgacgacaucgagcagcaggccgacaacaugaucacggagaugcugcagaaggaguacauggagcggcagggcaagaccccgcuggggcucgucgaccuguucguguucagcaccuccuucuaccugaucagcaucuuccuccgccuggugaagauccccacccaccggcacaucgucggcaagcccugccccaagccgcaccgccugaaccacauggggaucugcuccugcggccucuacaagcagcccggggugcccgugcgguggaagcgcugaggacuaguuauaagacugacuagcccgaugggccucccaacgggcccuccuccccuccuugcaccgagauuaauaaaaaaaaaaaaaaaaaaaaaaaaaaaaaaaaaaaaaaaaaaaaaaaaaaaaaaaaaaaaaaaaaaaaaaaaaaaaaaaaaaaaaaaaaaaaaaaaaaaa

SEQ ID NO: 34730 - RNA, 1662 nt, Artificial Sequence
  mRNA product Design i-3 (A100) comprising derived and/or modified sequence from LASV(Togo/2016/7082;Clade VI)__AMR44577__GPCmut8 (opt1)
aggagaaagcuuaccaugggccagaucaucaccuucuuccaggaggugccccacgucaucgaggaggugaugaacaucgugcugaucgcccucagccugcuggccauccucaagggggucuacaacguggcgaccugcggcaucaucgggcuggugacguuccuguuccucugcggccgcuccugcagccugaucuacaagggguccuacgagcugcagacccucgagcugaacauggagacccugaacaugugcaugccgcucagcugcaccaagaacuccagccaccacuacauccgggucggcaacgagacgggccuggagcugacccucaccaacaccuccaucaucaaccacaaguucugcaaccugagcgacgcccacaagcgcaaccuguacgaccacgcccucauguccauccugagcacguuccaccuguccauccccaacuucaaccaguacgaggccaugagcugcgacuucaacgggggcaagaucuccgugcaguacaaccucagccacgccuacgcgguggacgccgccgagcacugcgggaccgucgccaacggcgugcugcagaccuucaugcggauggcguggggcggguccuacaucgcccuggacagcggccgcgggaacugggacugcaucaugaccuccuaccaguaccucaucauccagaacacgaccugggaggaccacugccaguucagccggcccucccccaucggcuaccuggggcugcucagccagcgcacccgggacaucuacaucagccgccggcugcugggcaccuucacguggacccucuccgacagcgagggcaacgagacccccgggggcuacugccugacccgcuggaugcugaucgaggccgagcucaagugcuucgggaacacggccguggccaagugcaacgagaagcacgacgaggaguucugcgacaugcugcggcuguucgacuucugcaagcaggcgauccagcgccucaaguccccggcccagaugagcauccagcugaucaacaaggccgucaacgcccugaucaacgaccagcucaucaugaagaaccaccuccgggacaugaugggcauccccuacugcaacuacuccaaguacugcuaccugaaccacaccagcuccgggcgcaccagccugcccaagugcugccugguguccaacggcagcuaccugaacgagacccacuucuccgacgacaucgagcagcaggccgacaacaugaucacggagaugcuccagaaggaguacaucgaccggcagggcaagaccccgcuggggcugguggaccuguucgucuucagcaccuccuucuaccucaucagcaucuuccugcaccugaucaagauccccacccaccgccacaucgugggcaagcccugccccaagccgcaccggcucaaccacauggggaucugcuccugcggccuguacaagcagcccggggugcccacgcgcuggaagcggugaggacuaguuauaagacugacuagcccgaugggccucccaacgggcccuccuccccuccuugcaccgagauuaauaaaaaaaaaaaaaaaaaaaaaaaaaaaaaaaaaaaaaaaaaaaaaaaaaaaaaaaaaaaaaaaaaaaaaaaaaaaaaaaaaaaaaaaaaaaaaaaaaaaa

SEQ ID NO: 34731 - RNA, 1662 nt, Artificial Sequence
  mRNA product Design i-3 (A100) comprising derived and/or modified sequence from LASV(KAK-428;Clade n.d. (VII))__ANH09740__GPCmut8 (opt1)
aggagaaagcuuaccaugggccagaucgugaccuucuuccaggaggucccccacgugaucgaggaggugaugaacaucguccugaucgcccucagccugcuggccauccucaaggggcuguacaacuucgcgaccugcggcgugaucgggcugaucacguuccuccugcugugcggccgcuccugcagcgccaccuacaaggggcaguacgagcuccagacccuggagcugaacauggagucccucaacaugugcaugccgcugagcugcaccaagaacaacucccaccacuacauccgggccggcaacaacacgggccuggagcucacccugaccaacaccagcaucaucucccacaaguucugcaaccugagcgacgcccacaagaagaaccucuacgaccacacgcugauguccaucaucaccaccuuccaccugagcauccccaacuucaaccaguacgaggccauguccugcgacuucaacgggggcaagaucagcauccaguacaaccucucccacagcuacgcgggggacgccgcccagcacugcggcaccguggccaacgggguccugcagacguucaugcgcauggcguggggcggcuccuaccuggcccucgacagcgggcggcgcggcugggacugcaucaucuccagcuaccaguaccugaucauccagaacaccaccugggacgaccacugccaguucucccggcccagccccaucggguaccugggcuucgugagccagaagacccgcgacaucuacaucucccggcgccuccugggcacguucaccuggacccugagcgacuccgaggggcacgacaugccgggcggguacugccucacccgguggaugcugaucgaggccgaccugaagugcuucggcaacacggccguggccaagugcaacgagaagcacgacgaggaguucugcgacauguggcgccucuucgacuucugcaagcaggcgauccagcggcugaaggcccccgcccagaugaacauccagcugaucaacaaggccgucaacgcccucaucaacgaccagcugaugaugaagaaccaccuccgcgacaucauggggauccccuacugcaacuacagcaaguucugcuaccugaacaacaccaccaccggccggacgucccugccccgcugcugccugaucagcaacggcuccuaccucaacgagacccacuucagcgacgacaucgagcagcaggcggacaacaugaucaccgagaugcugcagaaggaguacauggaccggcaggggaagaccccgcugggccucguggaccuguucguguucuccacgagcuucuaccugaucaccaucuuccugcaccucgucaagauccccacccaccgccacaucguggggaagcccugccccaagccgcaccggcugaaccacaugggcaucugcuccugcgggcuguacaagcagcccggcgugcccguccgcuggaagcggugaggacuaguuauaagacugacuagcccgaugggccucccaacgggcccuccuccccuccuugcaccgagauuaauaaaaaaaaaaaaaaaaaaaaaaaaaaaaaaaaaaaaaaaaaaaaaaaaaaaaaaaaaaaaaaaaaaaaaaaaaaaaaaaaaaaaaaaaaaaaaaaaaaaa

SEQ ID NO: 34732 - RNA, 1662 nt, Artificial Sequence; identical to SEQ ID NO: 34726
  mRNA product Design i-3 (A100) comprising derived and/or modified sequence from LASV(Pinneo-NIG-1969;Clade I)__AIT17836__GPCmut8 (opt1)

SEQ ID NO: 34733 - RNA, 1662 nt, Artificial Sequence
  mRNA product Design i-3 (A100) comprising derived and/or modified sequence from LASV(ISTH0009-NIG-2011;Clade II)__AIT17404__GPCmut8 (opt1)
aggagaaagcuuaccaugggccagaucaucaccuucuuccaggaggugccccacgucaucgaggaggugaugaacaucgugcugaucgcccucagccugcuggccauccucaaggggaucuacaacgucgcgaccugcggccuguucgggcugguguccuuccuccugcugugcggccgcagcugcuccacgaccuacaaggggguguacgagcuccagacccuggagcuggacauggccagccucaacaugugcaugccgcuguccugcaccaagaacaacagccaccacuacaucauggucggcaacgagacgggccuggagcucacccugaccaacaccuccaucaucaaccacaaguucugcaaccugagcgacgcccacaagaagaaccucuacgaccacgcccugauguccaucaucagcacguuccaccuguccauccccaacuucaaccaguacgaggccaugagcugcgacuucaacgggggcaagaucuccgugcaguacaaccucagccacgcguacgccguggacgccgccaaccacugcgggaccaucgcgaacggcguccugcagaccuucaugcggauggccuggggcggguccuacaucgcccuggacagcggcaagggguccugggacugcaucaugaccagcuaccaguaccucaucauccagaacacgaccugggaggaccacugccaguucucccgccccagccccaucggcuaccuggggcugcucagccagcggacccgcgacaucuacaucucccggcgccugcugggcaccuucacguggacccucagcgacuccgagggcaacgagacccccgggggcuacugccugacccgguggaugcugaucgaggccgagcucaagugcuucgggaacacggccguggcgaagugcaacgagaagcacgacgaggaguucugcgacaugcugcgccuguucgacuucugcaagcaggccauccggcgccucaagaccccggcccagaugagcauccagcugaucaacaaggccgugaacgcccugaucaacgaccagcucaucaugaagaaccaccuccgggacaucaugggcauccccuacugcaacuacuccaaguacugcuaccugaaccacaccgucaccgggaagacgagccugccccgcugcugccugguguccaacggcagcuaccugaacgagacccacuucuccgacgacaucgagcagcaggcggacaacaugaucaccgagcuccugcagaaggaguacauggaccggcagggcaagaccccgcuggggcugguggaccucuucgucuucagcacguccuucuaccugaucagcaucuuccugcaccucaucaagauccccacccaccgccacaucaccggcaagcccugccccaagccgcaccggcugaaccacauggggaucugcuccugcggccuguacaagcaccccggggugcccgugaaguggaagcgcugaggacuaguuauaagacugacuagcccgaugggccucccaacgggcccuccuccccuccuugcaccgagauuaauaaaaaaaaaaaaaaaaaaaaaaaaaaaaaaaaaaaaaaaaaaaaaaaaaaaaaaaaaaaaaaaaaaaaaaaaaaaaaaaaaaaaaaaaaaaaaaaaaaaa

SEQ ID NO: 34734 - RNA, 1662 nt, Artificial Sequence
  mRNA product Design i-3 (A100) comprising derived and/or modified sequence from LASV(ISTH2010-NIG-2012;Clade II)__AIT17482__GPCmut8 (opt1)
aggagaaagcuuaccaugggccagaucaucaccuucuuccaggaggugccccacgucaucgaggaggugaugaacaucgugcugaucgcccucagccugcuggccauccucaaggggaucuacaacgucgcgaccugcggccuguucgggcugguguccuuccuccugcugugcggccgcagcugcuccacgaccuacaaggggguguacgagcuccagacccuggagcuggacauggccagccucaacaugugcaugccgcuguccugcaccaagaacaacagccaccacuacaucauggucggcaacgagacgggccuggagcucacccugaccaacaccuccaucaucaaccacaaguucugcaaccugagcgacgcccacaagaagaaccucuacgaccacgcccugauguccaucaucagcacguuccaccuguccauccccaacuucaaccaguacgaggccaugagcugcgacuucaacgggggcaagaucuccgugcaguacaaccucagccacgcguacgccguggacgccgccaaccacugcgggaccaucgcgaacggcguccugcagaccuucaugcggauggccuggggcggguccuacaucgcccuggacagcggcaagggguccugggacugcaucaugaccagcuaccaguaccucaucauccagaacaucacgugggaggaccacugccaguucucccgccccagccccaucggcuaccuggggcugcucagccagcggacccgcgacaucuacaucucccggcgccugcugggcaccuucaccuggacgcucagcgacuccgagggcaacgagacccccgggggcuacugccugacccgguggaugcugaucgaggccgagcucaagugcuucgggaacaccgccguggcgaagugcaacgagaagcacgacgaggaguucugcgacaugcugcgccuguucgacuucugcaagcaggccauccggcgccucaagacgccggcccagaugagcauccagcugaucaacaaggccgugaacgcccugaucaacgaccagcucaucaugaagaaccaccuccgggacaucaugggcauccccuacugcaacuacuccaaguacugcuaccugaaccacaccgucaccgggaagaccagccugccccgcugcugccugguguccaacggcagcuaccugaacgagacgcacuucuccgacgacaucgagcagcaggcggacaacaugaucaccgagcuccugcagaaggaguacaucgaccggcagggcaagaccccgcuggggcugguggaccucuucgucuucagcaccuccuucuaccugaucagcaucuuccugcaccucgugaagauccccacgcaccgccacguggucggcaagcccugccccaagccgcaccggcugaaccacauggggaucugcuccugcggccuguacaagcaccccggggugcccgugaaguggaagcgcugaggacuaguuauaagacugacuagcccgaugggccucccaacgggcccuccuccccuccuugcaccgagauuaauaaaaaaaaaaaaaaaaaaaaaaaaaaaaaaaaaaaaaaaaaaaaaaaaaaaaaaaaaaaaaaaaaaaaaaaaaaaaaaaaaaaaaaaaaaaaaaaaaaaa

SEQ ID NO: 34735 - RNA, 1662 nt, Artificial Sequence
  mRNA product Design i-3 (A100) comprising derived and/or modified sequence from LASV(Lassa virus/H.sapiens-wt/NGA/2015/ISTH_0543;Clade II)__AVO03639__GPCmut8 (opt1)
aggagaaagcuuaccaugggccagaucaucaccuucuuccaggaggugccccacgucaucgaggaggugaugaacaucgugcugaucgcccucagccugcuggccauccucaaggggaucuacaacgucgcgaccugcggccuguucgggcugguguccuuccuccugcugugcggccgcagcugcuccacgaccuacaaggggguguacgagcuccagacccuggagcuggacauggccaaccucaacaugugcaugccgcugagcugcaccaagaacaacucccaccacuacaucauggucggcaacgagacgggccuggagcucacccugaccaacaccagcaucaucaaccacaaguucugcaaccuguccgacgcccacaagaagaaccucuacgaccacgcccugaugagcaucaucuccacguuccaccugagcauccccaacuucaaccaguacgaggccauguccugcgacuucaacgggggcaagaucagcgugcaguacaaccucucccacaccuacgcgguggacgccgccaaccacugcgggaccaucgccaacggcguccugcagaccuucaugcggauggcguggggcgggagcuacaucgcccuggacuccggcaaggggagcugggacugcaucaugacguccuaccaguaccucgugauccagaacaccaccugggaggaccacugccaguucagccgccccucccccaucggcuaccuggggcugcucagccagcggacccgcgacaucuacaucagccggcgccugcugggcacguucaccuggacccucuccgacagcgagggcaacgagacccccgggggcuacugccugacgcgguggaugcugaucgaggccgagcucaagugcuucgggaacaccgccguggccaagugcaacgagaagcacgacgaggaguucugcgacaugcugcgccuguucgacuucugcaagcaggcgauccggcgccucaagaccccggcccagauguccauccagcugaucaacaaggccgucaacgcccugaucaacgaccagcucaucaugaagaaccaccuccgggacaucaugggcauccccuacugcaacuacagcaaguacugcuaccugaaccacaccgugacggggaagaccucccugccccgcugcugccuggugagcaacggcuccuaccugaacgagacccacuucagcgacgacaucgagcagcaggccgacaacaugaucaccgagcuccugcagaaggaguacaucgaccggcagggcaagacgccgcuggggcuggucgaccucuucguguucuccaccagcuucuaccugaucuccaucuuccugcaccucgugaagauccccacccaccgccacaucaccggcaagcccugccccaagccgcaccggcugaaccacauggggaucugcagcugcggccuguacaagcaccccgggguccccgugaaguggaagcgcugaggacuaguuauaagacugacuagcccgaugggccucccaacgggcccuccuccccuccuugcaccgagauuaauaaaaaaaaaaaaaaaaaaaaaaaaaaaaaaaaaaaaaaaaaaaaaaaaaaaaaaaaaaaaaaaaaaaaaaaaaaaaaaaaaaaaaaaaaaaaaaaaaaaa

SEQ ID NO: 34736 - RNA, 1662 nt, Artificial Sequence
  mRNA product Design i-3 (A100) comprising derived and/or modified sequence from LASV(Lassa virus/H.sapiens-wt/NGA/2016/ISTH_0009;Clade II)__AVO03571__GPCmut8 (opt1)
aggagaaagcuuaccaugggccagaucaucaccuucuuccaggaggugccccacgucaucgaggaggugaugaacaucgugcugaucgcccucagccugcuggccauccucaaggggaucuacaacgucgcgaccugcggccugcuggggcucguguccuuccugcugcucugcggccgcagcugcuccacgaccuacaaggggguguacgagcugcagacccuggagcucgacauggccagccugaacaugugcaugccgcuguccugcaccaagaacaacagccaccacuacaucauggucggcaacgagacgggccucgagcugacccugaccaacaccuccaucaucaaccacaaguucugcaaccucagcgacgcccacaagaagaaccuguacgaccacgcccugauguccaucaucagcacguuccaccucuccauccccaacuucaaccaguacgaggccaugagcugcgacuucaacgggggccggaucuccgugcaguacaaccugagccacuccuacgcgguggacgccgccaaccacugcgggaccaucgccaacggcguccugcagaccuucaugcgcauggcguggggcgggagcuacaucgcccucgacuccggcaaggggagcugggacugcaucaugaccuccuaccaguaccugaucauccagaacacgaccugggaggaccacugccaguucagccggcccagccccaucggcuaccuggggcuccugucccagcgcacccgggacaucuacaucagccgccggcugcucggcaccuucacguggacccuguccgacagcgagggcaacgagacccccgggggcuacugccugacccgcuggaugcucaucgaggccgagcugaagugcuucgggaacacggccguggccaagugcaacgagaagcacgacgaggaguucugcgacaugcugcggcuguucgacuucugcaagcaggcgauccgccggcugaagaccccggcccagauguccauccagcugaucaacaaggccgugaacgcccucaucaacgaccagcugaucaugaagaaccaccuccgcgacaucaugggcauccccuacugcaacuacagcaaguacugcuaccucaaccacaccgucaccgggaagacgucccugccccggugcugccuggugagcaacggcuccuaccucaacgagacccacuucagcgacgacaucgagcagcaggccgacaacaugaucaccgagcugcugcagaaggaguacaucgaccgccagggcaagaccccgcuggggcucguggaccuguucgucuucuccacgagcuucuaccugaucuccaucuuccuccaccuggugaagauccccacccaccggcacaucaccggcaagcccugccccaagccgcaccgccugaaccacauggggaucugcagcugcggccucuacaaccaccccggggugcccgucaaguggaagcggugaggacuaguuauaagacugacuagcccgaugggccucccaacgggcccuccuccccuccuugcaccgagauuaauaaaaaaaaaaaaaaaaaaaaaaaaaaaaaaaaaaaaaaaaaaaaaaaaaaaaaaaaaaaaaaaaaaaaaaaaaaaaaaaaaaaaaaaaaaaaaaaaaaaa

SEQ ID NO: 34737 - RNA, 1662 nt, Artificial Sequence
  mRNA product Design i-3 (A100) comprising derived and/or modified sequence from LASV(Lassa virus/H.sapiens-wt/NGA/2016/ISTH_0017;Clade II)__AVO03567__GPCmut8 (opt1)
aggagaaagcuuaccaugggccagaucaucaccuucuuccaggaggugccccacgucaucgaggaggugaugaacaucgugcugaucgcccucagccugcuggccauccucaaggggaucuacaacgucgcgaccugcggccuguucgggcugguguccuuccuccugcugugcggccgcagcugcuccacgaccuacaaggggguguacgagcuccagacccuggagcuggacauggccagccucaacaugugcaugccgcuguccugcaccaagaacaacagccaccacuacaucauggucggcaacgagacgggccuggagcucacccugaccaacaccuccaucaucaaccacaaguucugcaaccugagcgacgcccacaagaagaaccucuacgaccacgcccugauguccaucaucagcacguuccaccuguccauccccaacuucaaccaguacgaggccaugagcugcgacuucaacgggggcaagaucuccgugcaguacaaccucagccacaccuacgcgaucgacgccgccaaccacugcgggaccaucgccaacggcgugcugcagaccuucaugcggauggcguggggcggguccuacaucgcccuggacagcggcaagggguccugggacugcaucaugacgagcuaccaguaccucaucauccagaacaccaccugggaggaccacugccaguucucccgccccagccccaucggcuaccuggggcugcucagccagcggacccgcgacaucuacaucucccggcgccugcugggcacguucaccuggacccucagcgacuccgagggcaacgagacccccgggggcuacugccugacgcgguggaugcugaucgaggccgagcucaagugcuucgggaacaccgccgucgccaagugcaacgagaagcacgacgaggaguucugcgacaugcugcgccuguucgacuucugcaagcaggcgauccggcgccucaagaccccggcccagaugagcauccagcugaucaacaaggccgugaacgcccugaucaacgaccagcucaucaugaagaaccaccuccgggacaucaugggcauccccuacugcaacuacuccaaguacugcuaccugaaccacaccgugacggggaagaccagccugccccgcugcugccuggucuccaacggcagcuaccugaacgagacccacuucuccgacgacaucgagcagcaggccgacaacaugaucaccgagcuccugcagaaggaguacauggaccggcagggcaagacgccgcuggggcugguggaccucuucguguucagcaccuccuucuaccugaucagcaucuuccugcaccucguccgcauccccacccaccggcacgugaucggcaagcccugccccaagccgcaccgccugaaccacauggggaucugcuccugcggccuguacaagcaccccggggugcccgucaaguggaagcggugaggacuaguuauaagacugacuagcccgaugggccucccaacgggcccuccuccccuccuugcaccgagauuaauaaaaaaaaaaaaaaaaaaaaaaaaaaaaaaaaaaaaaaaaaaaaaaaaaaaaaaaaaaaaaaaaaaaaaaaaaaaaaaaaaaaaaaaaaaaaaaaaaaaa

SEQ ID NO: 34738 - RNA, 1662 nt, Artificial Sequence
  mRNA product Design i-3 (A100) comprising derived and/or modified sequence from LASV(Lassa virus/H.sapiens-wt/NGA/2018/ISTH_0959;Clade II)__AVV65099__GPCmut8 (opt1)
aggagaaagcuuaccaugggccagaucaucaccuucuuccaggaggugccccacgucaucgaggaggugaugaacaucgugcugaucgcccucagccugcuggccauccucaaggggaucuacaacgucgugaccugcggccuguucgggcugguguccuuccuccugcugugcggccgcagcugcuccacgaccuacaagggggucuacgagcuccagacccuggagcuggacauggcgagccucaacaugugcaugccgcuguccugcaccaagaacaacagccaccacuacaucauggugggcaacgagacgggccuggagcucacccugaccaacaccuccaucaucaaccacaaguucugcaaccugagcgacgcccacaagaagaaccucuacgaccacgcccugauguccaucaucagcacguuccaccuguccauccccaacuucaaccaguacgaggccaugagcugcgacuucaacgggggcaagaucuccgugcaguacaaccucagccacgccuacgcgaucgacgccgccaaccacugcgggaccaucgccaacggcguccugcagaccuucaugcggauggcguggggcggguccuacaucgcccuggacagcggcaagggguccugggacugcaucaugaccagcuaccaguaccucaucauccagaacacgaccugggaggaccacugccaguucucccgccccagccccaucggcuaccuggggcugcucagccagcggacccgcgacaucuacaucucccggcgccugcugggcaccuucacguggacccucagcgacuccgagggcaacgagacccccgggggcuacugccugacccgguggaugcugaucgaggccgagcucaagugcuucgggaacacggccguggccaagugcaacgagaagcacgacgaggaguucugcgacaugcugcgccuguucgacuucugcaagcaggcgauccggcgccucaagaccccggcccagaugagcauccagcugaucaacaaggccgugaacgcccugaucaacgaccagcucaucaugaagaaccaccuccgggacaucaugggcauccccuacugcaacuacuccaaguacugcuaccugaaccacaccgucaccgggaagacgagccugccccgcugcugccugguguccaacggcagcuaccugaacgagacccacuucuccgacgacaucgagcagcaggccgacaacaugaucaccgagcuccugcagaaggaguacaucgaccggcagggcaagaccccgcuggggcugguggaccucuucgucuucagcacguccuucuaccugaucagcaucuuccugcaccucgugaagauccccacccaccgccacgugaucggcaagcccugccccaagccgcaccggcugaaccacauggggaucugcuccugcggccuguacaagcaccccgggguccccgugaaguggaagcgcugaggacuaguuauaagacugacuagcccgaugggccucccaacgggcccuccuccccuccuugcaccgagauuaauaaaaaaaaaaaaaaaaaaaaaaaaaaaaaaaaaaaaaaaaaaaaaaaaaaaaaaaaaaaaaaaaaaaaaaaaaaaaaaaaaaaaaaaaaaaaaaaaaaaa

SEQ ID NO: 34739 - RNA, 1662 nt, Artificial Sequence
  mRNA product Design i-3 (A100) comprising derived and/or modified sequence from LASV(LASV003-NIG-2008;Clade II)__AIT17580__GPCmut8 (opt1)
aggagaaagcuuaccaugggccagaucaucaccuucuuccaggaggugccccacgucaucgaggaggugaugaacaucgugcugaucgcccucagccugcuggccauccucaaggggaucuacaacgucgcgaccugcggccuguucgggcugguguccuuccuccugcugugcggccgcagcugcuccacgaccuacaaggggguguacgagcuccagacccuggagcuggacauggccagccucaacaugugcaugccgcuguccugcaccaagaacaacagccaccacuacaucauggucggcaacgagacgggccuggagcucacccugaccaacaccuccaucaucaaccacaaguucugcaaccugagcgacgcccacaagaagaaccucuacgaccacgcccugauguccaucaucagcacguuccaccuguccauccccaacuucaaccaguacgaggccaugagcugcgacuucaacgggggcaagaucuccgugcaguacaaccucagccacaccuacgcgguggacgccgccaaccacugcgggaccaucgccaacggcguccugcagaccuucaugcggauggcguggggcggguccuacaucgcccuggacagcggcaagggguccugggacugcaucaugacgagcuaccaguaccucaucauccagaacaccaccugggaggaccacugccaguucucccgccccagccccaucggcuaccuggggcugcucagccagcggacccgcgacaucuacaucucccggcgccugcugggcacguucaccuggacccucagcgacuccgagagcaacgagaccccgggcggguacugccugacgcgguggaugcugaucgaggccgagcucaagugcuucggcaacaccgccguggccaagugcaacgagaagcacgacgaggaguucugcgacaugcugcgccuguucgacuucugcaagcaggcgauccggcgccucaaggcccccgcccagauguccauccagcugaucaacaaggccgugaacgcccugaucaacgaccagcucaucaugaagaaccaccuccgggacaucauggggauccccuacugcaacuacagcaaguacugcuaccugaaccacaccgucaccggccgcacgucccugccccggugcugccuggugagcaacggguccuaccugaacgagacccacuucagcgacgacaucgagcagcaggcggacaacaugaucaccgagcuccugcagaaggaguacauggaccgccagggcaagaccccgcugggccugguggaccucuucgucuucuccacgagcuucuaccugaucuccaucuuccugcaccucgugaagauccccacccaccggcacgugaucgggaagcccugccccaagccgcaccgccugaaccacaugggcaucugcagcugcgggcuguacaagcaccccggcguccccgugaaguggaagcggugaggacuaguuauaagacugacuagcccgaugggccucccaacgggcccuccuccccuccuugcaccgagauuaauaaaaaaaaaaaaaaaaaaaaaaaaaaaaaaaaaaaaaaaaaaaaaaaaaaaaaaaaaaaaaaaaaaaaaaaaaaaaaaaaaaaaaaaaaaaaaaaaaaaa

SEQ ID NO: 34740 - RNA, 1662 nt, Artificial Sequence
  mRNA product Design i-3 (A100) comprising derived and/or modified sequence from LASV(LASV035-NIG-2009;Clade II)__AIT17588__GPCmut8 (opt1)
aggagaaagcuuaccaugggccagaucaucaccuucuuccaggaggugccccacgucaucgaggaggugaugaacaucgugcugaucgcccucagccugcuggccauccucaaggggaucuacaacgucgcgaccugcggccuguucgggcugguguccuuccuccugcugugcggccgcagcugcuccacgaccuacaaggggguguacgagcuccagacccuggagcuggacauggccagccucaacaugugcaugccgcuguccugcaccaagaacaacagccaccacuacaucauggucggcaacgagacgggccuggagcucacccugaccaacaccuccaucaucaaccacaaguucugcaaccugagcgacgcccacaagaagaaccucuacgaccacgcccugauguccaucaucagcacguuccaccuguccauccccaacuucaaccaguacgaggccaugagcugcgacuucaacgggggcaagaucuccgugcaguacaaccucagccacgcguacgccguggacgccgccaaccacugcgggaccaucgcgaacggcguccugcagaccuucaugcggauggccuggggcggguccuacaucgcccuggacagcggcaagggguccugggacugcaucaugaccagcuaccaguaccucaucauccagaacacgaccugggaggaccacugccaguucucccgccccagccccaucggcuaccuggggcugcucagccagcggacccgcgacaucuacaucucccggcgccugcugggcaccuucacguggacccucagcgacuccgagggcaacgagacccccgggggcuacugccugacccgguggaugcugaucgaggccgagcucaagugcuucgggaacacggccguggcgaagugcaacgagaagcacgacgaggaguucugcgacaugcugcgccuguucgacuucugcaagcaggccauccggcgccucaaggccccggcccagaugagcauccagcugaucaacaaggccgugaacgcgcugaucaacgaccagcucaucaugaagaaccaccuccgggacaucaugggcauccccuacugcaacuacuccaaguacugcuaccugaaccacaccgucaccgggaagaccagccugccccgcugcugccugguguccaacggcagcuaccugaacgagacgcacuucuccgacgacaucgagcagcaggccgacaacaugaucaccgagcuccugcagaaggaguacaucgaccggcagggcaagaccccgcuggggcugguggaccucuucgucuucagcaccuccuucuaccugaucagcaucuuccugcaccucgugaagauccccacgcaccgccacgugaucggcaagcccugccccaagccgcaccggcugaaccacauggggaucugcuccugcggccuguacaagcaccccgggguccccgugaaguggaagcgcugaggacuaguuauaagacugacuagcccgaugggccucccaacgggcccuccuccccuccuugcaccgagauuaauaaaaaaaaaaaaaaaaaaaaaaaaaaaaaaaaaaaaaaaaaaaaaaaaaaaaaaaaaaaaaaaaaaaaaaaaaaaaaaaaaaaaaaaaaaaaaaaaaaaa

SEQ ID NO: 34741 - RNA, 1662 nt, Artificial Sequence
  mRNA product Design i-3 (A100) comprising derived and/or modified sequence from LASV(LASV1000-NIG-2009;Clade II)__AIT17782__GPCmut8 (opt1)
aggagaaagcuuaccaugggccagaucaucaccuucuuccaggaggugccccacgucaucgaggaggugaugaacaucgugcugaucgcccucagccugcuggccauccucaaggggaucuacaacgucgcgaccugcggccuguucgggcugguguccuuccuccugcugugcggccgcagcugcuccacgaccuacaaggggguguacgagcuccagacccuggagcuggacauggccagccucaacaugugcaugccgcuguccugcaccaagaacaacagccaccacuacaucauggucggcaacgagacgggccuggagcucacccugaccaacaccuccaucaucaaccacaaguucugcaaccugagcgacgcccacaagaagaaccucuacgaccacgcccugauguccaucaucagcacguuccaccuguccauccccaacuucaaccaguacgaggccaugagcugcgacuucaacgggggcaagaucuccgugcaguacaaccucagccacaccuacgcgguggacgccgccaaccacugcgggaccaucgccaacggcguccugcagaccuucaugcggauggcguggggcggguccuacaucgcccuggacagcggcaagggguccugggacugcaucaugacgagcuaccaguaccucaucauccagaacaccaccugggaggaccacugccaguucucccgccccagccccaucggcuaccuggggcugcucagccagcggacccgcgacaucuacaucucccggcgccugcugggcacguucaccuggacccucagcgacuccgagggcaacgagacccccgggggcuacugccugacgcgguggaugcugaucgaggccgagcucaagugcuucgggaacaccgccguggccaagugcaacgagaagcacgacgaggaguucugcgacaugcugcgccuguucgacuucugcaagcaggcgaucaagcggcucaagaccccggcccagaugagcauccagcugaucaacaaggccgugaacgcccugaucaacgaccagcucaucaugaagaaccaccuccgcgacaucaugggcauccccuacugcaacuacuccaaguacugcuaccugaaccacaccgucacggggaagaccagccugccccggugcugccugguguccaacggcagcuaccugaacgagacccacuucuccgacgacaucgagcagcaggccgacaacaugaucaccgagcuccugcagaaggaguacaucgaccgccagggcaagacgccgcuggggcugguggaccucuucgucuucagcaccuccuucuaccugaucagcaucuuccugcaccucgugaagauccccacccaccggcacguggucggcaagcccugccccaagccgcaccgccugaaccacauggggaucugcuccugcggccuguacaagcaccccggggugcccgugaaguggaagcggugaggacuaguuauaagacugacuagcccgaugggccucccaacgggcccuccuccccuccuugcaccgagauuaauaaaaaaaaaaaaaaaaaaaaaaaaaaaaaaaaaaaaaaaaaaaaaaaaaaaaaaaaaaaaaaaaaaaaaaaaaaaaaaaaaaaaaaaaaaaaaaaaaaaa

SEQ ID NO: 34742 - RNA, 1662 nt, Artificial Sequence
  mRNA product Design i-3 (A100) comprising derived and/or modified sequence from LASV(LASV221-NIG-2010;Clade II)__AIT17624__GPCmut8 (opt1)
aggagaaagcuuaccaugggccagaucaucaccuucuuccaggaggugccccacgucaucgaggaggugaugaacaucgugcugaucgcccucagccugcuggccauccucaaggggaucuacaacgucgcgaccugcggccuguucgggcugguguccuuccuccugcugugcggccgcagcugcuccacgaccuacaaggggguguacgagcuccagacccuggagcuggacauggccagccucaacaugugcaugccgcuguccugcaccaagaacaacagccaccacuacaucauggucggcaacgagacgggccuggagcucacccugaccaacaccuccaucaucaaccacaaguucugcaaccugagcgacgcccacaagaagaaccucuacgaccacgcccugauguccaucaucagcacguuccaccuguccauccccaacuucaaccaguacgaggccaugagcugcgacuucaacgggggcaagaucuccgugcaguacaaccucagccacaccuacgcgaucgacgccgccaaccacugcgggaccaucgccaacggcgugcugcagaccuucaugcggauggcguggggcggguccuacaucgcccuggacagcggcaagggguccugggacugcaucaugacgagcuaccaguaccucaucauccagaacaccaccugggaggaccacugccaguucucccgccccagccccaucggcuaccuggggcugcucagccagcggacccgcgacaucuacaucucccggcgccugcugggcacguucaccuggacccucagcgacuccgagggcaacgagacccccgggggcuacugccugacgcgguggaugcugaucgaggccgagcucaagugcuucgggaacaccgccgucgccaagugcaacgagaagcacgacgaggaguucugcgacaugcugcgccuguucgacuucugcaagcaggcgauccggcgccucaagaccccggcccagaugagcauccagcugaucaacaaggccgugaacgcccugaucaacgaccagcucaucaugaagaaccaccuccgggacaucaugggcauccccuacugcaacuacuccaaguacugcuaccugaaccacaccgugacggggaagaccagccugccccgcugcugccuggucuccaacggcagcuaccugaacgagacccacuucuccgacgacaucgagcagcaggccgacaacaugaucaccgagaugcuccagaaggaguacauggaccggcagggcaagacgccgcuggggcugguggaccuguucguguucagcaccuccuucuaccucaucagcaucuuccugcaccuggucaagauccccacccaccgccacgugaucggcaagcccugccccaagccgcaccggcucaaccacauggggaucugcuccugcggccuguacaagcaccccggggugcccgucaaguggaagcgcugaggacuaguuauaagacugacuagcccgaugggccucccaacgggcccuccuccccuccuugcaccgagauuaauaaaaaaaaaaaaaaaaaaaaaaaaaaaaaaaaaaaaaaaaaaaaaaaaaaaaaaaaaaaaaaaaaaaaaaaaaaaaaaaaaaaaaaaaaaaaaaaaaaaa

SEQ ID NO: 34743 - RNA, 1662 nt, Artificial Sequence
  mRNA product Design i-3 (A100) comprising derived and/or modified sequence from LASV(LASV237-NIG-2010;Clade II)__AIT17638__GPCmut8 (opt1)
aggagaaagcuuaccaugggccagaucaucaccuucuuccaggaggugccccacgucaucgaggaggugaugaacaucgugcugaucgcccucagccugcuggccauccucaaggggaucuacaacgucgcgaccugcggccuguucgggcugguguccuuccuccugcugugcggccgcagcugcuccacgaccuacaaggggguguacgagcuccagacccuggagcuggacauggccagccucaacaugugcaugccgcuguccugcaccaagaacaacagccaccacuacaucauggucggcaacgagacgggccuggagcucacccugaccaacaccuccaucaucaaccacaaguucugcaaccugagcgacgcccacaagaaggaccucuacgaccacgcccugauguccaucaucagcacguuccaccuguccauccccaacuucaaccaguacgaggccaugagcugcgacuucaacgggggcaagaucuccgugcaguacaaccucagccacaccuacgcgguggacgccgccaaccacugcgggaccaucgccaacggcguccugcagaccuucaugcggauggcguggggcggguccuacaucgcccuggacagcggcaagggguccugggacugcaucaugacgagcuaccaguaccucaucauccagaacaccaccugggaggaccacugccaguucucccgccccagccccaucggcuaccuggggcugcucagccagcggacccgcgacaucuacaucucccggcgccugcugggcacguucaccuggacccucagcgacuccgagggcaacgagacccccgggggcuacugccugacgcgguggaugcugaucgaggccgagcucaagugcuucgggaacaccgccguggccaagugcaacgagaagcacgacgaggaguucugcgacaugcugcgccuguucgacuucugcaagcaggcgauccggcgccucaagaccccggcccagaugagcauccagcugaucaacaaggccgugaacgcccugaucaacgaccagcucaucaugaagaaccaccuccgggacaucaugggcauccccuacugcaacuacuccaaguacugcuaccugaaccacaccgucacggggaagaccagccugccccgcugcugccugguguccaacggcagcuaccugaacgagacccacuucuccgacgacaucgagcagcaggccgacaacaugaucaccgagcuccugcagaaggaguacauggaccggcagggcaagacgccgcuggggcugguggaccucuucgucuucagcaccuccuucuaccugaucagcaucuuccugcaccucaucaagauccccacccaccgccacaucaccggcaagcccugccccaagccgcaccggcugaaccacauggggaucugcuccugcggccuguacaagcaccccggggugcccgugaaguggaagcgcugaggacuaguuauaagacugacuagcccgaugggccucccaacgggcccuccuccccuccuugcaccgagauuaauaaaaaaaaaaaaaaaaaaaaaaaaaaaaaaaaaaaaaaaaaaaaaaaaaaaaaaaaaaaaaaaaaaaaaaaaaaaaaaaaaaaaaaaaaaaaaaaaaaaa

SEQ ID NO: 34744 - RNA, 1662 nt, Artificial Sequence
  mRNA product Design i-3 (A100) comprising derived and/or modified sequence from LASV(LASV253-NIG-2011;Clade II)__AIT17670__GPCmut8 (opt1)
aggagaaagcuuaccaugggccagaucaucaccuucuuccaggaggugccccacgucaucgaggaggugaugaacaucgugcugaucgcccucagccugcuggccauccucaaggggaucuacaacgucgcgaccugcggccuguucgggcugguguccuuccuccugcugugcggccgcagcugcuccacgaccuacaaggggguguacgagcuccagacccuggagcuggacauggccagccucaacaugugcaugccgcuguccugcaccaagaacaacagccaccacuacaucauggucggcaacgagacgggccuggagcucacccugaccaacaccuccaucaucaaccacaaguucugcaaccugagcgacgcccacaagaagaaccucuacgaccacgcccugauguccaucaucagcacguuccaccuguccauccccaacuucaaccaguacgaggccaugagcugcgacuucaacgggggcaagaucuccgugcaguacaaccucagccacaccuacgcgguggacgccgccaaccacugcgggaccaucgccaacggcguccugcagaccuucaugcggauggcguggggcggguccuacaucgcccuggacagcggcaagggguccugggacugcaucaugacgagcuaccaguaccucaucauccagaacaccaccugggaggaccacugccaguucucccgccccagccccaucggcuaccuggggcugcucagccagcggacccgcgacaucuacaucucccggcgccugcugggcacguucaccuggacccucagcgacuccgagggcaacgagacccccgggggcuacugccugacgcgguggaugcugaucgaggccgagcucaagugcuucgggaacaccgccguggccaagugcaacgagaagcacgacgaggaguucugcgacaugcugcgccuguucgacuucugcaagcaggcgauccggcgccucaaggccccggcccagaugagcauccagcugaucaacaaggccgugaacgcccugaucaacgaccagcucaucaugaagaaccaccuccgggacaucaugggcauccccuacugcaacuacuccaaguacugcuaccugaaccacaccgucaccgggcgcacgagccugccccggugcugccugguguccaacggcagcuaccugaacgagacccacuucuccgacgacaucgagcagcaggcggacaacaugaucaccgagcuccugcagaaggaguacaucgaccgccagggcaagaccccgcuggggcugguggaccucuucgucuucagcacguccuucuaccugaucagcaucuuccugcaccucgugaagauccccacccaccggcacaucaucggcaagcccugccccaagccgcaccgccugaaccacauggggaucugcuccugcggccuguacaagcaccccggggugcccgucaaguggaagcggugaggacuaguuauaagacugacuagcccgaugggccucccaacgggcccuccuccccuccuugcaccgagauuaauaaaaaaaaaaaaaaaaaaaaaaaaaaaaaaaaaaaaaaaaaaaaaaaaaaaaaaaaaaaaaaaaaaaaaaaaaaaaaaaaaaaaaaaaaaaaaaaaaaaa

SEQ ID NO: 34745 - RNA, 1662 nt, Artificial Sequence
  mRNA product Design i-3 (A100) comprising derived and/or modified sequence from LASV(LASV254-NIG-2011;Clade II)__AIT17674__GPCmut8 (opt1)
aggagaaagcuuaccaugggccagaucaucaccuucuuccaggaggugccccacgucaucgaggaggugaugaacaucgugcugaucgcccucagccugcuggccauccucaaggggaucuacaacgucgcgaccugcggccuguucgggcugguguccuuccuccugcugugcggccgcagcugcuccacgaccuacaaggggguguacgagcuccagacccuggagcuggacaugaccaaccucaacaugugcaugccgcugagcugcacgaagaacaacucccaccacuacaucauggucggcaacgagaccggccuggagcucacccugaccaacacgagcaucaucaaccacaaguucugcaaccuguccgacgcccacaagaagaaccucuacaaccacgcccugaugagcaucaucuccaccuuccaccugagcauccccaacuucaaccaguacgaggccauguccugcgacuucaacgggggcaagaucagcgugcaguacaaccucucccacagcuacgccguggacgcggccaaccacugcgggaccaucgccaacggcguccugcagaccuucaugcggauggccuggggcggguccuacaucgcgcuggacagcggcaaggggaacugggacugcaucaugacguccuaccaguaccucaucauccagaacaccaccugggaggaccacugccaguucagccgccccucccccaucggcuaccuggggcugcucagccagcggacccgcgacaucuacaucagccggcgccugcugggcacguucaccuggacccucuccgacagcgagggcaacgagacccccgggggcuacugccugacgcgguggaugcugaucgaggccgagcucaagugcuucgggaacaccgccguggccaagugcaacgagaagcacgacgaggaguucugcgacaugcugcgccuguucgacuucugcaagcaggccauccggcgccucaagaccccggcgcaggccaacauccagcugaucaacaaggccgugaacgcccugaucaacgaccagcucaucaugaagaaccaccuccgggacaucaugggcauccccuacugcaacuacuccaaguacugcuaccugaaccacaccgucacggggaagaccagccugccccgcugcugccugguguccaacggcagcuaccugaacgagacccacuucuccgacgacaucgagcagcaggccgacaacaugaucaccgagcuccugcagaaggaguacauggaccggcagggcaagacgccgcuggggcugguggaccucuucgucuucagcaccuccuucuaccugaucagcaucuuccugcaccucgugaagauccccacccaccgccacgugaucggcaagcccugccccaagccgcaccggcugaaccacauggggaucugcuccugcggccuguacaagcaccccgggguccccgugaaguggaagcgcugaggacuaguuauaagacugacuagcccgaugggccucccaacgggcccuccuccccuccuugcaccgagauuaauaaaaaaaaaaaaaaaaaaaaaaaaaaaaaaaaaaaaaaaaaaaaaaaaaaaaaaaaaaaaaaaaaaaaaaaaaaaaaaaaaaaaaaaaaaaaaaaaaaaa

SEQ ID NO: 34746 - RNA, 1662 nt, Artificial Sequence
  mRNA product Design i-3 (A100) comprising derived and/or modified sequence from LASV(Nig08-A19;Clade III)__ADU56618__GPCmut8 (opt1)
aggagaaagcuuaccaugggccagaucgugaccuucuuccaggaggucccccacgugaucgaggaggugaugaacaucguccugaucgcccucagcauccuggccauccugaaggggcucuacaacaucgcgaccugcggccugaucgggcuggugacguuccuccugcuguccggccgcagcugcuccaugaccuacaaggggguguacgagcuccagacccuggagcugaacaugaacacccucaacaugugcaugccgcugagcugcacgaagaacaacucccaccacuacaucauggucggcaacgagaccggccuggagcucacccugaccaacacgagccugcuccaccacaaguucugcaaccuguccgacgcccacaagaagaaccuguacgaccacacccucaugagcaucaucuccaccuuccaccugagcauccccaacuucaaccaguacgaggccauguccugcgacuucaacgggggcaagaucaccgugcaguacaaccugagccacuccuacgccaucgacgccgcgaaccacugcgggacgguggccaacggcguccuccagaccuucaugcggauggccuggggcgggagcuacaucgcccuggacuccggccgcgggaagugggacugcaucaugaccagcuaccaguaccugaucauccagaacaccacgugggaggaccacugccaguucucccggcccagccccaucggcuaccucgggcugcugucccagcgcacccgggacaucuacaucagccgccggcuccugggcaccuucaccuggacgcugagcgacuccgagggcaacgagacccccgggggcuacugccucacccgcuggaugcugaucgaggcggagcugaagugcuucgggaacaccgccguggccaagugcaacgagaagcacgacgaggaguucugcgacaugcuccggcuguucgacuucugcaagcaggccauccgccggcugaaggccccggcgcagaugagcauccagcucaucaacaaggccgugaacgcccugaucaacgaccagcugaucaugaagaaccaccuccgcgacaucaugggcauccccuacugcaacuacuccaaguacugcuaccugaaccacacgagcaccgggcggaccucccugccccgcugcugccucgucagcaacggcuccuaccugaacgagacccacuucagcgacgacaucgagcagcaggccgacaacaugaucacggagaugcugcagaaggaguaccuggaccggcagggcaagaccccgcucgggcugguggaccuguucguguucuccaccagcuucuaccucaucuccaucuuccugcaccuggucaagauccccacccaccgccacaucgugggcaagcccugccccaagccgcaccggcucaaccacauggggaucugcagcugcggccuguacaagcagcccggggugcccguccgcuggaagcggugaggacuaguuauaagacugacuagcccgaugggccucccaacgggcccuccuccccuccuugcaccgagauuaauaaaaaaaaaaaaaaaaaaaaaaaaaaaaaaaaaaaaaaaaaaaaaaaaaaaaaaaaaaaaaaaaaaaaaaaaaaaaaaaaaaaaaaaaaaaaaaaaaaaa

SEQ ID NO: 34747 - RNA, 1665 nt, Artificial Sequence
  mRNA product Design i-3 (A100) comprising derived and/or modified sequence from LASV(G1180-SLE-2010;Clade IV)__AIT17168__GPCmut8 (opt1)
aggagaaagcuuaccaugggccagaucgugaccuucuuccaggaggucccccacgugaucgaggaggugaugaacaucguccugaucgcccucagcauccuggccgugcugaaggggcucuacaacuucgcgaccugcggccugguggggcugcucacguuccugcugcucugcggccgcuccugcaccgccagccgguacaagggggucuacgagcugcagacccuggagcucaacauggagacccugaacaugugcaugccgcuguccugcacgaagaacaacagccaccacuacaucauggugggcaacgagaccggccucgagcugacccugaccaacacguccaucaucaaccacaaguucugcaaccucagcgacgcccacaagaagaaccuguacgaccacgcccugauguccaucaucagcaccuuccaccucuccauccccaacuucaaccaguacgaggccaugagcugcgacuucaacgggggcaagaucuccgugcaguacaaccugagccacuccuacgcgggggacgccgccaaccacugcggcaccgucgccaacggggugcugcagaccuucaugcgcauggcguggggcggcagcuacaucgcccucgacuccgggcacggcagcugggacugcaucaugacguccuaccaguaccugaucauccagaacaccaccugggaggaccacugccaguucagccggcccucccccaucggguaccugggccuccugagccagcgcacccgggacaucuacaucagccgccggcugcucggcacguucaccuggacccuguccgacagcgaggggaaggacaccccgggcggguacugccugacgcgcuggaugcucaucgaggccgagcugaagugcuucggcaacaccgccguggccaagugcaacgagaagcacgacgaggaguucugcgacaugcugcggcuguucgacuucugcaagcaggcgauccagcgccugaaggcccccgcccagauguccauccagcugaucaacaaggccgucaacgcccucaucaacgaccagcugaucaugaagaaccaccuccgggacaucauggggauccccuacugcaacuacagcaaguacugcuaccucaaccacaccaccacgggcaagaccucccugcccaagugcugccuggugagcaacggcuccuaccucaacgagacccacuucagcgacgacaucgagcagcaggcggacaacaugaucaccgagaugcugcagaaggaguacauggagcgccaggggaagacgccgcugggccugguggaccucuucgucuucuccaccagcuucuaccugaucuccaucuuccugcaccucgugaagauccccacccaccggcacaucgugggcaagagcugccccaagccccaccgccugaaccacauggggaucugcuccugcgggcuguacaagcagccgggcguccccgugaaguggaagcggugaggacuaguuauaagacugacuagcccgaugggccucccaacgggcccuccuccccuccuugcaccgagauuaauaaaaaaaaaaaaaaaaaaaaaaaaaaaaaaaaaaaaaaaaaaaaaaaaaaaaaaaaaaaaaaaaaaaaaaaaaaaaaaaaaaaaaaaaaaaaaaaaaaaa

SEQ ID NO: 34748 - RNA, 1665 nt, Artificial Sequence
  mRNA product Design i-3 (A100) comprising derived and/or modified sequence from LASV(G1442-SLE-2011;Clade IV)__AIT17180__GPCmut8 (opt1)
aggagaaagcuuaccaugggccagaucgugaccuucuuccaggaggucccccacgugaucgaggaggugaugaacaucguccugaucgcccucagcauccuggccgugcugaaggggcucuacaacguggcgaccugcggccugaucgggcuggucacguuccuccugcugugcggccgcuccugcaccaccacccucuacaaggggguguacgagcugcagacgcuggagcucaacauggagacccugaacaugugcaugccgcugagcugcaccaagaacaacucccaccacuacauccgggugggcaacgagaccggccucgagcugacgcugaccaacaccagcaucaucaaccacaaguucugcaaccucuccgacgcccacaagaagaaccuguacgaccacgcccugaugagcaucaucuccaccuuccaccucagcauccccaacuucaaccaguacgaggccauguccugcgacuucaacgggggcaagaucagcguccaguacaaccugucccacagcuacgccggggacgcggccaaccacugcggcacgguggccaacggggugcugcagaccuucaugcgcauggccuggggcggcuccuacaucgcgcucgacagcgggcggggcaacugggacugcaucaugaccuccuaccaguaccugaucauccagaacaccacgugggacgaccacugccaguucagccgccccucccccaucggguaccugggccuccugagccagcggacccgcgacgucuacaucucccggcgccugcucggcaccuucaccuggacgcugagcgacagcgaggggaaggacaccccgggcggguacugccugacccgguggaugcucaucgaggccgagcugaagugcuucggcaacaccgccguggccaagugcaacgagaagcacgacgaggaguucugcgacaugcugcgccucuucgacuucugcaagcaggccauccagcggcugaaggcgcccgcccagauguccauccagcugaucaacaaggccgugaacgcccucaucaacgaccagcugaucaugaagaaccaccuccgcgacaucauggggauccccuacugcaacuacagcaaguacugcuaccugaacaacacggccaccggcaagaccucccugcccaagugcugccugaucagcaacggcuccuaccucaacgagacccacuucagcgacgacaucgagcaggaggcggacaacaugaucacggagaugcugcagaaggaguacauggagcggcaggggaagaccccgcugggccuggucgaccucuucguguucuccaccagcuucuaccugaucuccaucuuccugcaccucgugaagauccccacccaccgccacaucgucggcaagagcugccccaagccccaccggcugaaccacauggggaucugcuccugcgggcuguacaagcagccgggcgugcccgugcgcuggaagcggugaggacuaguuauaagacugacuagcccgaugggccucccaacgggcccuccuccccuccuugcaccgagauuaauaaaaaaaaaaaaaaaaaaaaaaaaaaaaaaaaaaaaaaaaaaaaaaaaaaaaaaaaaaaaaaaaaaaaaaaaaaaaaaaaaaaaaaaaaaaaaaaaaaaa

SEQ ID NO: 34749 - RNA, 1665 nt, Artificial Sequence
  mRNA product Design i-3 (A100) comprising derived and/or modified sequence from LASV(G3010-SLE-2013;Clade IV)__AIT17344__GPCmut8 (opt1)
aggagaaagcuuaccaugggccagaucgugaccuucuuccaggaggucccccacgugaucgaggaggugaugaacaucguccugaucgcccucagcauccuggccgugcugaaggggcucuacaacuucgcgaccugcggccugguggggcuggucacguuccuccugcugugcggccgcuccugcaccaccagccucuacaaggggguguacgagcugcagacccuggagcucaacauggagacgcugaacaugugcaugccgcuguccugcaccaagaacaacagccaccacuacaucauggugggcaacgagaccggccucgagcugacccugacgaacaccuccaucaucaaccacaaguucugcaaccucagcgacgcccacaagaagaaccuguacaaccacgcccugauguccaucaucagcaccuuccaccucuccauccccaacuucaaccaguacgaggccaugagcugcgacuucaacgggggcaagaucuccguccaguacaaccugagccacuccuacgccggggacgcggccagccacugcggcaccguggccaacggggugcugcagacguucaugcggauggccuggggcggcuccuacaucgcgcucgacagcggguacggcaagugggacugcaucaugaccuccuaccaguaccugaucauccagaacaccaccugggaggaccacugccaguucagccgccccucccccaucggguaccugggccuccugagccagcggacgcgcgacaucuacaucagccggcgccugcucggcaccuucaccuggacccuguccgacagcgaggggaaggacacgccgggcggguacugccugacccgguggaugcucaucgaggccgagcugaagugcuucggcaacaccgccgucgccaagugcaacgagaagcacgacgaggaguucugcgacaugcugcgccucuucgacuucugcaagcaggccauccagcggcugaagacccccgcgcagauguccauccagcugaucaacaaggccgugaacgcccucaucaacgaccagcugaucaugaagaaccaccuccgcgacaucauggggauccccuacugcaacuacagcaaguacugcuaccugaaccacacgaccaccggcaagaccucccugcccaagugcugccuggugagcaacggcuccuaccucaacgagacgcacuucagcgacgacaucgagcagcaggccgacaacaugaucaccgagaugcugcagaaggaguacauggagcggcaggggaagaccccgcugggccuggucgaccucuucguguucuccaccagcuucuaccugaucuccaucuuccugcaccucgugaagauccccacgcaccgccacaucgucggcaagagcugccccaagccccaccggcugaaccacauggggaucugcuccugcgggcuguacaagcagccgggcgugcccgugcgcuggaagcggugaggacuaguuauaagacugacuagcccgaugggccucccaacgggcccuccuccccuccuugcaccgagauuaauaaaaaaaaaaaaaaaaaaaaaaaaaaaaaaaaaaaaaaaaaaaaaaaaaaaaaaaaaaaaaaaaaaaaaaaaaaaaaaaaaaaaaaaaaaaaaaaaaaaa

SEQ ID NO: 34750 - RNA, 1665 nt, Artificial Sequence
  mRNA product Design i-3 (A100) comprising derived and/or modified sequence from LASV(G502-SLE-2009;Clade IV)__AIT17126__GPCmut8 (opt1)
aggagaaagcuuaccaugggccagaucgugaccuucuuccaggaggucccccacgugaucgaggaggugaugaacaucguccugaucgcccucagcauccuggccgugcugaaggggcucuacaacuucgcgaccugcggccugguggggcugcucacguuccugcugcucugcggccgcuccugcaccaccgggcuguacaagggcgucuacgagcugcagacccucgagcugaacauggagacgcugaacaugugcaugccgcucagcugcaccaagaacaacucccaccacuacaucauggugggcaacgagaccgggcuggagcugacccucacgaacaccagcaucaucaaccacaaguucugcaaccuguccgacgcccacaagaagaaccuguacgaccacgcccucaugagcaucaucuccaccuuccaccugagcauccccaacuucaaccaguacgaggccauguccugcgacuucaacggcgggaagaucagcgugcaguacaaccugucccacagcuacgccggcgacgcggccgaccacugcgggaccgucgccaacggcgugcuccagacguucaugcggauggccuggggcggguccuacaucgcgcuggacagcggccgcgggcggugggacugcaucaugaccuccuaccaguaccugaucauccagaacaccaccugggaggaccacugccaguucagccgccccucccccaucggcuaccucggccugcugagccagcggacgcgcgacaucuacaucucccggcgccuccuggggaccuucaccuggacccugagcgacagcgagggcaaggacacgcccgggggcuacugccucacccgguggaugcugaucgaggccgagcugaagugcuucgggaacaccgccguggccaagugcaacgagaagcacgacgaggaguucugcgacaugcuccgccuguucgacuucugcaagcaggccauccagcggcugaaggcgccggcccagauguccauccagcucaucaacaaggccgucaacgcccugaucaacgaccagcuggugaugaagaaccaccuccgcgacaucaugggcauccccuacugcaacuacagccgguacugcuaccugaaccacaccacgaccggccgcaccucccugcccaagugcugccucgugagcaacggguccuaccugaacgagacccacuucagcgacgacaucgagcagcaggccgacaacaugaucacggagaugcugcagaaggaguacauggagcggcagggcaagaccccgcuggggcucgucgaccuguucguguucuccaccagcuucuaccugaucuccaucuuccuccaccuggugaagauccccacccaccgccacaucgucggcaagagcugccccaagccccaccggcugaaccacauggggaucugcuccugcggccucuacaagcagccgggcgugcccgugaaguggaagcgcugaggacuaguuauaagacugacuagcccgaugggccucccaacgggcccuccuccccuccuugcaccgagauuaauaaaaaaaaaaaaaaaaaaaaaaaaaaaaaaaaaaaaaaaaaaaaaaaaaaaaaaaaaaaaaaaaaaaaaaaaaaaaaaaaaaaaaaaaaaaaaaaaaaaa

SEQ ID NO: 34751 - RNA, 1665 nt, Artificial Sequence
  mRNA product Design i-3 (A100) comprising derived and/or modified sequence from LASV(G733-SLE-2010;Clade IV)__AIT17154__GPCmut8 (opt1)
aggagaaagcuuaccaugggccagaucgugaccuucuuccaggaggucccccacgugaucgaggaggugaugaacaucguccugaucgcccucagcauccuggccgugcugaaggggcucuacaacuucgcgaccugcggcaucguggggcuggucuccuuccugcuccugugcggccgcagcugcacgaccucccuguacaaggggguguacgagcuccagacccuggagcugaacauggagacccucaacaugugcaugccgcugagcugcacgaagaacaacucccaccacuacaucauggugggcaacgagaccggccuggagcucacccugaccaacacgagcaucaucaaccacaaguucugcaaccuguccgacgcccacaagaagaaccucuacgaccacgcccugaugagcaucaucuccaccuuccaccugagcauccccaacuucaaccaguacgaggccauguccugcgacuucaacgggggcaagaucagcguccaguacaaccucucccacagcuacgccggggacgcggccaaccacugcggcaccaucgccaacggggugcugcagaccuucaugcggauggccuggggcggcuccuacaucgcgcuggacagcgggcgcgaccggugggacugcaucaugacguccuaccaguaccucaucauccagaacaccaccugggaggaccacugccaguucagccgccccucccccaucggcuaccuggggcugcucagccagcggacccgcgacaucuacaucagccggcgccugcugggcacguucaccuggacccucuccgacagcgagggcaaggacacccccgggggcuacugccugacgcgguggaugcugaucgaggccgagcucaagugcuucgggaacaccgccguggccaagugcaacgagaagcacgacgaggaguucugcgacaugcugcgccuguucgacuucugcaagcaggccauccagcggcucaaggcgccggcccagauguccauccagcugaucaacaaggccgucaacgcccugaucaacgaccagcucaucaugaagaaccaccuccgcgacaucaugggcauccccuacugcaacuacagcaaguacugcuaccugaaccacaccaccacggggaagaccucccugcccaagugcugccuggugagcaacggcuccuaccugaacgagacccacuucagcgacgacaucgagcagcaggccgacaacaugaucaccgagaugcuccagaaggaguacauggagcggcagggcaagacgccgcuggggcugguggaccuguucgucuucuccaccagcuucuaccucaucuccaucuuccugcaccuggugaagauccccacccaccgccacguggucggcaagagcugccccaagccccaccggcucaaccacauggggaucugcuccugcggccuguacgggcagccgggcgugcccgugaaguggaagcgcugaggacuaguuauaagacugacuagcccgaugggccucccaacgggcccuccuccccuccuugcaccgagauuaauaaaaaaaaaaaaaaaaaaaaaaaaaaaaaaaaaaaaaaaaaaaaaaaaaaaaaaaaaaaaaaaaaaaaaaaaaaaaaaaaaaaaaaaaaaaaaaaaaaaa

SEQ ID NO: 34752 - RNA, 1665 nt, Artificial Sequence
  mRNA product Design i-3 (A100) comprising derived and/or modified sequence from MOPV/LASV reassortant(IGS-1;Clade IV)__AFY05576__GPCmut8 (opt1)
aggagaaagcuuaccaugggccagaucgugaccuucuuccaggaggucccccacgugaucgaggaggugaugaacaucguccugaucgcccucagcgugcuggccgugcugaaggggcucuacaacuucgcgaccugcggccuggucgggcuggugacguuccuccugcugugcggccgcuccugcaccaccagccucuacaaggggguguacgagcugcagacccuggagcucaacauggagacgcugaacaugugcaugccgcuguccugcaccaagaacaacagccaccacuacaucauggucggcaacgagaccggccucgagcugacccugacgaacaccuccaucaucaaccacaaguucugcaaccucagcgacgcccacaagaagaaccuguacgaccacgcccugauguccaucaucagcaccuuccaccucuccauccccaacuucaaccaguacgaggccaugagcugcgacuucaacgggggcaagaucuccgugcaguacaaccugagccacuccuacgccggggacgcggccaaccacugcggcaccguggccaacgggguccugcagacguucaugcggauggccuggggcggcagcuacaucgcgcucgacuccgggcgcggcaacugggacugcaucaugaccagcuaccaguaccugaucauccagaacaccaccugggaggaccacugccaguucucccggcccagccccaucggguaccugggccuccugucccagcgcacgcgggacaucuacaucagccgccggcugcucggcaccuucaccuggacccugagcgacuccgagggggaggacacgccgggcggguacugccugacccgcuggaugcucaucgaggccgagcugaagugcuucggcaacaccgccguggccaagugcaacgagaagcacgacgaggaguucugcgacaugcugcggcuguucgacuucugcaagcaggccauccagcgccugaaggcgcccgcccagaugagcauccagcugaucaacaaggccgugaacgcccucaucaacgaccagcugaucaugaagaaccaccuccgggacaucauggggauccccuacugcaacuacuccaaguacugcuaccucaaccacaccacgaccggccgcaccagccugcccaagugcugccuggucuccaacggcagcuaccucaacgagacccacuucuccgacgacaucgagcagcaggccgacaacaugaucacggagaugcugcagaaggaguacauggagcggcaggggaagaccccgcugggccugguggaccucuucguguucagcaccuccuucuaccugaucagcaucuuccugcaccucgucaagauccccacccaccgccacaucguggggaaguccugccccaagccccaccggcugaaccacaugggcaucugcagcugcgggcuguacaagcagccgggcgugcccgucaaguggaagcgcugaggacuaguuauaagacugacuagcccgaugggccucccaacgggcccuccuccccuccuugcaccgagauuaauaaaaaaaaaaaaaaaaaaaaaaaaaaaaaaaaaaaaaaaaaaaaaaaaaaaaaaaaaaaaaaaaaaaaaaaaaaaaaaaaaaaaaaaaaaaaaaaaaaaa

SEQ ID NO: 34753 - RNA, 1665 nt, Artificial Sequence
  mRNA product Design i-3 (A100) comprising derived and/or modified sequence from LASV(LM765-SLE-2012;Clade IV)__AIT17814__GPCmut8 (opt1)
aggagaaagcuuaccaugggccagaucgugaccuucuuccaggaggucccccacgugaucgaggaggugaugaacaucguccugaucgcccucagcauccuggccgugcugaaggggcucuacaacuucgcgaccugcggccugguggggcuggucacguuccuccugcugugcggccgcuccugcaccaccagccucuacaaggggguguacgagcugcagacccuggagcucaacauggagacgcugaacaugugcaugccgcuguccugcaccaagaacaacagccaccacuacaucauggugggcaacgagaccggccucgagcugacccugacgaacaccuccaucaucgaccacaaguucugcaaccucagcgacgcccaccggaagaaccuguacgaccacgcccugauguccaucaucagcaccuuccaccucuccauccccaacuucaaccaguacgaggccaugagcugcgacuucaacgggggcaagaucuccguccaguacaaccugagccacuccuacgccaaggacgcggccgaccacugcgggaccguggccaacggcgugcugcagacguucaugcgcauggccuggggcgggagcuacaucgcgcucgacuccggccgggggcgcugggacugcaucaugaccagcuaccaguaccugaucauccagaacaccaccugggaggaccacugccaguucucccggcccagccccaucggcuaccuggggcuccugucccagcgcacgcgggacaucuacaucagccgccggcugcucggcaccuucaccuggacccugagcgacuccgagggcaaggacacgcccgggggcuacugccugacccgcuggaugcucaucgaggccgagcugaagugcuucgggaacaccgccgucgccaagugcaacgagaagcacgacgaggaguucugcgacaugcugcggcuguucgacuucugcaagcaggccauccagcgccugaaggcgccggcccagaugagcauccagcugaucaacaaggccgugaacgcccucaucaacgaccagcugaucaugaagaaccaccuccgggacaucaugggcauccccuacugcaacuacuccaaguacugcuaccucaaccacaccacgaccgggaagaccagccugcccaagugcugccugguguccaacggcagcuaccucaacgagacccacuucuccgacgacaucgagcagcaggccgacaacaugaucacggagaugcugcagaaggaguacauggagcgccagggcaagaccccgcuggggcuggucgaccucuucguguucagcaccuccuucuaccugaucagcaucuuccugcaccucgugaagauccccacccaccggcacaucgucggcaagcccugccccaagccgcaccgccugaaccacauggggaucugcuccugcggccuguacaagcagcccggggugcccgugaaguggaagcggugaggacuaguuauaagacugacuagcccgaugggccucccaacgggcccuccuccccuccuugcaccgagauuaauaaaaaaaaaaaaaaaaaaaaaaaaaaaaaaaaaaaaaaaaaaaaaaaaaaaaaaaaaaaaaaaaaaaaaaaaaaaaaaaaaaaaaaaaaaaaaaaaaaaa

SEQ ID NO: 34754 - RNA, 1665 nt, Artificial Sequence
  mRNA product Design i-3 (A100) comprising derived and/or modified sequence from LASV(LM776-SLE-2012;Clade IV)__AIT17824__GPCmut8 (opt1)
aggagaaagcuuaccaugggccagaucgugaccuucuuccaggaggucccccacgugaucgaggaggugaugaacaucguccugaucgcccucagcauccuggccgugcugaaggggcucuacaacuucgcgaccugcggccugguggggcuggucacguuccuccugcugugcggccgcuccugcaccaccagcguguacaaggggguguacgagcuccagacccuggagcugaacauggagacgcucaacaugugcaugccgcuguccugcaccaagaacaacagccaccacuacaucauggucggcaacgagaccggccuggagcucacccugacgaacaccuccaucaucaaccacaaguucugcaaccugagcgacgcccacaagaagaaccucuacgaccacgcccugauguccaucaucagcaccuuccaccuguccauccccaacuucaaccaguacgaggccaugagcugcgacuucaacgggggcaagaucuccgugcaguacaaccucagccacuccuacgccggggacgcggccaaccacugcggcaccguggccaacgggguccugcagacguucaugcggauggccuggggcggcagcuacaucgcgcuggacuccgggcacggcaagugggacugcaucaugaccagcuaccaguaccucaucauccagaacaccaccugggaggaccacugccaguucucccgccccagccccaucggguaccugggccugcucucccagcggacgcgcgacaucuacaucagccggcgccugcugggcaccuucaccuggacccucagcgacuccgaggggaaggacacgccgggcggguacugccugacccgguggaugcugaucgaggccgagcucaagugcuucggcaacaccgccguggccaagugcaacgagaagcacgacgaggaguucugcgacaugcugcgccuguucgacuucugcaagcaggccauccagcggcucaaggcgcccgcccagaugagcauccagcugaucaacaaggccgugaacgcccugaucaacgaccagcucaucaugaagaaccaccuccgcgacaucauggggauccccuacugcaacuacuccaaguacugcuaccugaaccacaccacgaccggcaagaccagccugcccaagugcugccuggucuccaacggcagcuaccugaacgagacccacuucuccgacgacaucgagcagcaggccgacaacaugaucacggagaugcuccagaaggaguacauggagcggcaggggaagaccccgcugggccugguggaccuguucguguucagcaccuccuucuaccucaucagcaucuuccugcaccuggucaagauccccacccaccgccacaucguggggaaguccugccccaagccccaccggcucaaccacaugggcaucugcagcugcgggcuguacaagcagccgggcgugcccguccgcuggaagcggugaggacuaguuauaagacugacuagcccgaugggccucccaacgggcccuccuccccuccuugcaccgagauuaauaaaaaaaaaaaaaaaaaaaaaaaaaaaaaaaaaaaaaaaaaaaaaaaaaaaaaaaaaaaaaaaaaaaaaaaaaaaaaaaaaaaaaaaaaaaaaaaaaaaa

SEQ ID NO: 34755 - RNA, 1665 nt, Artificial Sequence
  mRNA product Design i-3 (A100) comprising derived and/or modified sequence from LASV(Mad39;Clade IV)__ANH09722__GPCmut8 (opt1)
aggagaaagcuuaccaugggccagaucgugaccuucuuccaggaggucccccacgugaucgaggaggugaugaacaucguccugaucgcccucagcauccuggccgugcugaaggggcucuacaacguggcgaccugcggccugaucgggcuggucacguuccuccugcugugcggccgcuccugcaccaccacccucuacaaggggguguacgagcugcaggcccuggagcucaacauggagacgcugaacaugugcaugccgcugagcugcaccaagaacaacucccaccacuacauccgggugggcaacgagaccggccucgagcugacccugacgaacaccagccucaucaaccacaaguucugcaaccuguccgacgcccacaagaagaaccuguacgaccacgcccucaugagcaucaucuccaccuuccaccugagcauccccaacuucaaccaguacgaggccauguccugcgacuucaacgacgggaagaucagcguccaguacaaccugucccacaccuacgcgggcgacacggccaaccacugcgggaccguggccaacggcgugcuccagaccuucaugcgcauggccuggggcgggagcuacaucgcgcuggacuccggccgcgggggcugggacugcaucaugaccagcuaccaguaccugaucauccagaacacgaccugggaggaccacugccaguucucccggcccagccccaucggguaccucggccugcugucccagcggacccgcgacaucuacaucagccggcgccuccugggcaccuucacguggacccuguccgacagcgaggggaaggacaccccgggcggguacugccucacccgguggaugcugaucgaggccgagcugaagugcuucggcaacacggccgucgccaagugcaacgagaagcacgacgaggaguucugcgacaugcuccgccuguucgacuucugcaagcaggccauccagcggcugaaggcgcccgcccagaugagcauccagcucaucaacaaggccgugaacgcccugaucaacgaccagcugaucaugaagaaccaccuccgcgacaucauggggauccccuacugcaacuacuccaaguacugcuaccugaaccacaccgugaccggcaagaccagccugcccaagugcugccucgucuccaacggcagcuaccugaacgagacgcacuucuccgacgacaucgagcagcaggccgacaacaugaucaccgagaugcugcagaaggaguacauggagcggcaggggaagaccccgcugggccucguggaccuguucguguucagcaccuccuucuaccugaucagcaucuuccuccaccuggucaagauccccacgcaccgccacgugguggggaagcccugccccaagccgcaccggcugaaccacaugggcaucugcuccugcggguucuacaagcagcccggcguccccgugcgcuggaagcggugaggacuaguuauaagacugacuagcccgaugggccucccaacgggcccuccuccccuccuugcaccgagauuaauaaaaaaaaaaaaaaaaaaaaaaaaaaaaaaaaaaaaaaaaaaaaaaaaaaaaaaaaaaaaaaaaaaaaaaaaaaaaaaaaaaaaaaaaaaaaaaaaaaaa

SEQ ID NO: 34756 - RNA, 1665 nt, Artificial Sequence
  mRNA product Design i-3 (A100) comprising derived and/or modified sequence from LASV(Z0947-SLE-2011;Clade IV)__AIT17840__GPCmut8 (opt1)
aggagaaagcuuaccaugggccagaucgugaccuucuuccaggaggucccccacgugaucgaggaggugaugaacaucguccugaucgcccucagcauccuggccgugcugaaggggcucuacaacuucgcgaccugcggccugguggggcuggucacguuccuccugcugugcggccgcuccugcaccaucagccucuacaaggggguguacgagcugcagacccuggagcucaacauggagacccugaacaugugcaugccgcuguccugcacgaagaacaacagccaccacuacaucauggugggcaacgagaccggccucgagcugacccugaccaacacguccaucaucaaccacaaguucugcaaccucagcgacgcccacaagaagaaccuguacgaccacgcccugauguccaucaucagcaccuuccaccucuccauccccaacuucaaccaguacgaggccaugagcugcgacuucaacgggggcaagaucuccguccaguacaaccugagccacuccuacgccggggacgcggccaaccacugcggcaccguggccaacggggugcugcagaccuucaugcggauggccuggggcggcagcuacaucgcgcucgacuccgggcgcgaccggugggacugcaucaugacgagcuaccaguaccugaucauccagaacaccaccugggaggaccacugccaguucucccgccccagccccaucggcuaccuggggcuccugucccagcggacccgcgacaucuacaucagccggcgccugcucggcacguucaccuggacccugagcgacuccgagggcaaggacacccccgggggcuacugccugacgcgguggaugcucaucgaggccgagcugaagugcuucgggaacaccgccgucgccaagugcaacgagaagcacgacgaggaguucugcgacaugcugcgccucuucgacuucugcaagcaggccauccagcggcugaaggcgccggcccagaugagcauccagcugaucaacaaggccgugaacgcccucaucaacgaccagcugaucaugaagaaccaccuccgcgacaucaugggcauccccuacugcaacuacuccaaguacugcuaccugaaccacaccaccacggggaagaccagccugcccaagugcugccugguguccaacggcagcuaccucaacgagacccacuucuccgacgacaucgagcagcaggccgacaacaugaucaccgagaugcugcagaaggaguacauggagcggcagggcaagacgccgcuggggcuggucgaccucuucguguucagcaccuccuucuaccugaucagcaucuuccugcaccucgugaagauccccacccaccgccacaucgucggcaagcccugccccaagccgcaccggcugaaccacauggggaucugcuccugcggccuguacaagcagcccggggugcccgugaaguggaagcgcugaggacuaguuauaagacugacuagcccgaugggccucccaacgggcccuccuccccuccuugcaccgagauuaauaaaaaaaaaaaaaaaaaaaaaaaaaaaaaaaaaaaaaaaaaaaaaaaaaaaaaaaaaaaaaaaaaaaaaaaaaaaaaaaaaaaaaaaaaaaaaaaaaaaa

SEQ ID NO: 34757 - RNA, 1665 nt, Artificial Sequence
  mRNA product Design i-3 (A100) comprising derived and/or modified sequence from LASV(Josiah;Clade IV)__NP_694870__GPCmut8 (opt4)
aggagaaagcuuaccaugggccagaucgugaccuucuuccaggaggugccccacgugaucgaggaggugaugaacaucgugcugaucgcccugagcgugcuggccgugcugaagggccuguacaacuucgccaccugcggccuggugggccuggugaccuuccugcugcugugcggcagaagcugcaccaccagccuguacaagggcguguacgagcugcagacccuggagcugaacauggagacccugaacaugugcaugccccugagcugcaccaagaacaacagccaccacuacaucauggugggcaacgagaccggccuggagcugacccugaccaacaccagcaucaucaaccacaaguucugcaaccugagcgacgcccacaagaagaaccuguacgaccacgcccugaugagcaucaucagcaccuuccaccugagcauccccaacuucaaccaguacgaggccaugagcugcgacuucaacggcggcaagaucagcgugcaguacaaccugagccacagcuacgccggcgacgccgccaaccacugcggcaccguggccaacggcgugcugcagaccuucaugagaauggccuggggcggcagcuacaucgcccuggacagcggcagaggcaacugggacugcaucaugaccagcuaccaguaccugaucauccagaacaccaccugggaggaccacugccaguucagcagacccagccccaucggcuaccugggccugcugagccagagaaccagagacaucuacaucagcagaagacugcugggcaccuucaccuggacccugagcgacagcgagggcaaggacacccccggcggcuacugccugaccagauggaugcugaucgaggccgagcugaagugcuucggcaacaccgccguggccaagugcaacgagaagcacgacgaggaguucugcgacaugcugagacuguucgacuucugcaagcaggccauccagagacugaaggcccccgcccagaugagcauccagcugaucaacaaggccgugaacgcccugaucaacgaccagcugaucaugaagaaccaccugagagacaucaugggcauccccuacugcaacuacagcaaguacugcuaccugaaccacaccaccaccggcagaaccagccugcccaagugcugccuggugagcaacggcagcuaccugaacgagacccacuucagcgacgacaucgagcagcaggccgacaacaugaucaccgagaugcugcagaaggaguacauggagagacagggcaagaccccccugggccugguggaccuguucguguucagcaccagcuucuaccugaucagcaucuuccugcaccuggugaagauccccacccacagacacaucgugggcaagagcugccccaagccccacagacugaaccacaugggcaucugcagcugcggccuguacaagcagcccggcgugcccgugaaguggaagagaugaggacuaguuauaagacugacuagcccgaugggccucccaacgggcccuccuccccuccuugcaccgagauuaauaaaaaaaaaaaaaaaaaaaaaaaaaaaaaaaaaaaaaaaaaaaaaaaaaaaaaaaaaaaaaaaaaaaaaaaaaaaaaaaaaaaaaaaaaaaaaaaaaaaa

SEQ ID NO: 34758 - RNA, 1662 nt, Artificial Sequence
  mRNA product Design i-3 (A100) comprising derived and/or modified sequence from LASV(LP;Clade I)__AAF86701__GPCmut8 (opt4)
aggagaaagcuuaccaugggccagaucaucaccuucuuccaggaggugccccacgugaucgaggaggugaugaacaucgugcugaucgcccugagccugcuggccauccugaagggccuguacaacaucgccaccugcggcaucaucggccugguggccuuccuguuccugugcggcaagagcugcagccugacccugaagggcggcuacgagcugcagacccuggagcugaacauggagacccugaacaugugcaugccccugagcugcaccaagaacagcagccaccacuacaucagagugggcaacgagaccggccuggagcugacccugaccaacaccagcaucaucaaccacaaguucugcaaccugagcgacgcccacaagaagaaccuguacgaccacgcccugaugagcaucaucagcaccuuccaccugagcauccccaacuucaaccaguacgaggccaugagcugcgacuucaacggcggcaagaucagcgugcaguacaaccugagccacagcuacgccggcgacgccgccgagcacugcggcaccguggccaacggcgugcugcagaccuucaugagaauggccuggggcggcagauacaucgcccuggacagcggcaagggcaacugggacugcaucaugaccagcuaccaguaccugaucauccagaacaccaccugggaggaccacugccaguucagcagacccagccccaucggcuaccugggccugcugagccagagaaccagagacaucuacaucagcagaagacugcugggcaccuucaccuggacccugagcgacagcgagggcaacgagacccccggcggcuacugccugaccagauggaugcugaucgaggccgagcugaagugcuucggcaacaccgccguggccaagugcaacgagaagcacgacgaggaguucugcgacaugcugagacuguucgacuucugcaagcaggccaucagaagacugaaggcccccgcccagaugagcauccagcugaucaacaaggccgugaacgcccugaucaacgaccagcugaucaugaagaaccaccugagagacaucaugggcauccccuacugcaacuacagcaaguacugcuaccugaaccacaccagcagcggcagaaccagccugcccaagugcugccugaucagcaacggcagcuaccugaacgagacccaguucagcgacgacaucgagcagcaggccgacaacaugaucaccgagaugcugcagaaggaguacaucgagagacagggcaagaccccccugggccugguggacaucuucaucuucagcaccagcuucuaccugaucagcaucuuccugcaccugaucaagauccccacccacagacacaucgugggcaagcccugccccaagccccacagacugaaccacaugggcgugugcagcugcggccuguacaagcaccccggcgugcccaccaaguggaagagaugaggacuaguuauaagacugacuagcccgaugggccucccaacgggcccuccuccccuccuugcaccgagauuaauaaaaaaaaaaaaaaaaaaaaaaaaaaaaaaaaaaaaaaaaaaaaaaaaaaaaaaaaaaaaaaaaaaaaaaaaaaaaaaaaaaaaaaaaaaaaaaaaaaaa

SEQ ID NO: 34759 - RNA, 1662 nt, Artificial Sequence
  mRNA product Design i-3 (A100) comprising derived and/or modified sequence from LASV(803213;Clade II)__AAF86703__GPCmut8 (opt4)
aggagaaagcuuaccaugggccagaucaucaccuucuuccaggaggugccccacgugaucgaggaggugaugaacaucgugcugaucgcccugagccugcuggccauccugaagggcaucuacaacguggccaccugcggccuguucggccugaucagcuuccugcugcugugcggcagaagcugcagcgugaccuacaagggcguguacgagcugcagacccuggagcugaacauggccaaccugaacaugugcaugccccugagcugcaccaagaacaacagccaccacuacaucauggugggcaacgagaccggccuggagcugacccugaccaacaccagcaucaucaaccacaaguucugcaaccugagcgacgcccacaagaagaaccuguacgaccacgcccugaugagcaucaucagcaccuuccaccugagcauccccaacuucaaccaguacgaggccaugagcugcgacuucaacggcggcaagaucagcgugcaguacaaccugagccacagcuucgccguggacgccgccaaccacugcggcaccaucgccaacggcgugcugcagaccuucaugagaauggccuggggcggcagcuacaucgcccuggacagcggcaagggcaacugggacugcaucaugaccagcuaccaguaccugaucauccagaacaccaccugggaggaccacugccaguucagcagacccagccccaucggcuaccugggccugcugagccagagaaccagagacaucuacaucagcagaagacugcugggcaccuucaccuggacccugagcgacagcgagggcaacgaggcccccggcggcuacugccugaccagauggaugcugaucgaggccgagcugaagugcuucggcaacaccgccguggccaagugcaacgagaagcacgacgaggaguucugcgacaugcugagacuguucgacuucugcaagcaggccaucaagagacugaagacccccgcccagaugagcauccagcugaucaacaaggccgugaacgcccugaucaacgaccagcugaucaugaagaaccaccugagagacaucaugggcauccccuacugcaacuacagcagauacugcuaccugaaccacaccgugaccggcaagaccagccugcccagaugcugccuggugagcaacggcagcuaccugaacgagacccacuucagcgacgacaucgagcagcaggccgacaacaugaucaccgagaugcugcagaaggaguacauggacagacagggcaagaccccccugggccugguggaccuguucguguucagcaccagcuucuaccugaucagcaucuuccugcaccuggugaagauccccacccacagacacaucgugggcaagcccugccccaagccccacagacugaaccacaugggcaucugcagcugcggccuguacaagcaccccggcgugcccgugaaguggaagagaugaggacuaguuauaagacugacuagcccgaugggccucccaacgggcccuccuccccuccuugcaccgagauuaauaaaaaaaaaaaaaaaaaaaaaaaaaaaaaaaaaaaaaaaaaaaaaaaaaaaaaaaaaaaaaaaaaaaaaaaaaaaaaaaaaaaaaaaaaaaaaaaaaaaa

SEQ ID NO: 34760 - RNA, 1662 nt, Artificial Sequence
  mRNA product Design i-3 (A100) comprising derived and/or modified sequence from LASV(GA391;Clade III)__CAA36645__GPCmut8 (opt4)
aggagaaagcuuaccaugggccagaucgugaccuucuuccaggaggugccccacgugaucgaggaggugaugaacaucgugcugaucgcccugagcauccuggccauccugaagggccuguacaacguggccaccugcggccugaucggccuggugaccuuccugcugcugagcggcagaagcugcagccugaucuacaagggcaccuacgagcugcagacccuggagcugaacauggagacccugaacaugugcaugccccugagcugcaccaagaacaacagccaccacuacaucagagugggcaacgagaccggccuggagcugacccugaccaacaccagcauccugaaccacaaguucugcaaccugagcgacgcccacaagagaaaccuguacgaccacagccugaugagcaucaucagcaccuuccaccugagcauccccaacuucaaccaguacgaggccaugagcugcgacuucaacggcggcaagaucaccgugcaguacaaccugagccacagcuucgccguggacgccgccggccacugcggcacccuggccaacggcgugcugcagaccuucaugagaauggccuggggcggcagcuacaucgcccuggacagcggcagaggcaacugggacugcaucaugaccagcuaccaguaccugaucauccagaacaccaccugggacgaccacugccaguucagcagacccagccccaucggcuaccugggccugcugagccagagaaccagagacaucuacaucagcagaagacugcugggcaccuucaccuggacccugagcgacagcgagggcaacgagacccccggcggcuacugccugaccagauggaugcugaucgaggccgagcugaagugcuucggcaacaccgccguggccaagugcaacgagaagcacgacgaggaguucugcgacaugcugagacuguucgacuucugcaagcaggccaucagaagacugaagacccccgcccagaugagcauccagcugaucaacaaggccgugaacgcccugaucaacgaccagcugaucaugaagaaccaccugagagacaucaugggcauccccuacugcaacuacagcagauacugcuaccugaaccacaccagcaccggcaagaccagccugcccagaugcugccugaucagcaacggcagcuaccugaacgagaccaaguucagcgacgacaucgagcagcaggccgacaacaugaucaccgagaugcugcagaaggaguacaucgacagacagggcaagaccccccugggccugguggaccuguucguguucagcaccagcuucuaccugaucagcaucuuccugcaccuggugaagauccccacccacagacacaucgugggcaagcccugccccaagccccacagacugaaccacaugggcaucugcagcugcggccuguacaagcagcccggcgugcccgugagauggaagagaugaggacuaguuauaagacugacuagcccgaugggccucccaacgggcccuccuccccuccuugcaccgagauuaauaaaaaaaaaaaaaaaaaaaaaaaaaaaaaaaaaaaaaaaaaaaaaaaaaaaaaaaaaaaaaaaaaaaaaaaaaaaaaaaaaaaaaaaaaaaaaaaaaaaa

SEQ ID NO: 34761 - RNA, 1665 nt, Artificial Sequence
  mRNA product Design i-3 (A100) comprising derived and/or modified sequence from LASV(AV;Clade V)__CCA30314__GPCmut8 (opt4)
aggagaaagcuuaccaugggccagaucgugaccuucuuccaggaggugccccacgugaucgaggaggugaugaacaucgugcugaucgcccugagcauccuggccgugcugaagggccuguacaacaucgccaccugcggccugaucggccugaucaccuuccugcugcugugcggcagaagcugcagcagcaaccuguacaagggcguguacgagcugcagagccuggaccugaacauggagacccugaacaugugcaugccccugagcugcaccaagaacaacagccaccacuacaucagagugggcaacgacaccggccuggagcugacccugaccaacaccagcauccugaaccacaaguucugcaaccugagcgacgcccacaagaaggaccuguacgaccacgcccugaugagcaucaucagcaccuuccaccugagcauccccaacuucaaccaguacgaggccaugagcugcgacuucaacggcggcaagaucagcgugcaguacaaccugagccacagcuacgccaucgacgccgccaaccacugcggcaccguggccaacggcauccugcagaccuucaugagaauggccuggggcggcagcuacaucgcccuggacagcggcagaggcaacugggacugcaucaugaccagcuaccaguaccugaucauccagaacaccaccugggagaaccacugccaguucagcagacccagccccaucggcuaccugggccugcugagccagagaaccagagacaucuacaucagcagaagacugcugggcaccuucaccuggacccugagcgacagcgagggcaacgccacccccggcggcuacugccugaccagauggaugcugaucgaggccgagcugaagugcuucggcaacaccgccguggccaagugcaacgagaagcacgacgaggaguucugcgacaugcugagacuguucgacuucugcaagcaggccaucagcagacugaagagccccgcccagaugagcauccagcugaucaacaaggccgugaacgcccugaucaacgaccagcugaucaugaagaaccaccugagagacaucaugggcauccccuacugcaacuacagcaaguacugcuaccugaaccacaccaucaccggcaagaccagccugcccaagugcugccuggugagcaacggcagcuaccugaacgagacccacuucagcgacgacaucgagcagcaggccgacaacaugaucaccgagaugcugcagaaggaguacauggagagacagggcaagaccccccugggccugguggaccuguucguguucagcaccagcuucuaccugaucagcaucuuccugagacuggugaagauccccacccacagacacaucgugggcaagcccugccccaagccccacagacugaaccacaugggcaucugcagcugcggccuguacaagcagcccggcgugcccgugagauggaagagaugaggacuaguuauaagacugacuagcccgaugggccucccaacgggcccuccuccccuccuugcaccgagauuaauaaaaaaaaaaaaaaaaaaaaaaaaaaaaaaaaaaaaaaaaaaaaaaaaaaaaaaaaaaaaaaaaaaaaaaaaaaaaaaaaaaaaaaaaaaaaaaaaaaaa

SEQ ID NO: 34762 - RNA, 1662 nt, Artificial Sequence
  mRNA product Design i-3 (A100) comprising derived and/or modified sequence from LASV(Togo/2016/7082;Clade VI)__AMR44577__GPCmut8 (opt4)
aggagaaagcuuaccaugggccagaucaucaccuucuuccaggaggugccccacgugaucgaggaggugaugaacaucgugcugaucgcccugagccugcuggccauccugaagggcguguacaacguggccaccugcggcaucaucggccuggugaccuuccuguuccugugcggcagaagcugcagccugaucuacaagggcagcuacgagcugcagacccuggagcugaacauggagacccugaacaugugcaugccccugagcugcaccaagaacagcagccaccacuacaucagagugggcaacgagaccggccuggagcugacccugaccaacaccagcaucaucaaccacaaguucugcaaccugagcgacgcccacaagagaaaccuguacgaccacgcccugaugagcauccugagcaccuuccaccugagcauccccaacuucaaccaguacgaggccaugagcugcgacuucaacggcggcaagaucagcgugcaguacaaccugagccacgccuacgccguggacgccgccgagcacugcggcaccguggccaacggcgugcugcagaccuucaugagaauggccuggggcggcagcuacaucgcccuggacagcggcagaggcaacugggacugcaucaugaccagcuaccaguaccugaucauccagaacaccaccugggaggaccacugccaguucagcagacccagccccaucggcuaccugggccugcugagccagagaaccagagacaucuacaucagcagaagacugcugggcaccuucaccuggacccugagcgacagcgagggcaacgagacccccggcggcuacugccugaccagauggaugcugaucgaggccgagcugaagugcuucggcaacaccgccguggccaagugcaacgagaagcacgacgaggaguucugcgacaugcugagacuguucgacuucugcaagcaggccauccagagacugaagagccccgcccagaugagcauccagcugaucaacaaggccgugaacgcccugaucaacgaccagcugaucaugaagaaccaccugagagacaugaugggcauccccuacugcaacuacagcaaguacugcuaccugaaccacaccagcagcggcagaaccagccugcccaagugcugccuggugagcaacggcagcuaccugaacgagacccacuucagcgacgacaucgagcagcaggccgacaacaugaucaccgagaugcugcagaaggaguacaucgacagacagggcaagaccccccugggccugguggaccuguucguguucagcaccagcuucuaccugaucagcaucuuccugcaccugaucaagauccccacccacagacacaucgugggcaagcccugccccaagccccacagacugaaccacaugggcaucugcagcugcggccuguacaagcagcccggcgugcccaccagauggaagagaugaggacuaguuauaagacugacuagcccgaugggccucccaacgggcccuccuccccuccuugcaccgagauuaauaaaaaaaaaaaaaaaaaaaaaaaaaaaaaaaaaaaaaaaaaaaaaaaaaaaaaaaaaaaaaaaaaaaaaaaaaaaaaaaaaaaaaaaaaaaaaaaaaaaa

SEQ ID NO: 34763 - RNA, 1662 nt, Artificial Sequence
  mRNA product Design i-3 (A100) comprising derived and/or modified sequence from LASV(KAK-428;Clade n.d. (VII))__ANH09740__GPCmut8 (opt4)
aggagaaagcuuaccaugggccagaucgugaccuucuuccaggaggugccccacgugaucgaggaggugaugaacaucgugcugaucgcccugagccugcuggccauccugaagggccuguacaacuucgccaccugcggcgugaucggccugaucaccuuccugcugcugugcggcagaagcugcagcgccaccuacaagggccaguacgagcugcagacccuggagcugaacauggagagccugaacaugugcaugccccugagcugcaccaagaacaacagccaccacuacaucagagccggcaacaacaccggccuggagcugacccugaccaacaccagcaucaucagccacaaguucugcaaccugagcgacgcccacaagaagaaccuguacgaccacacccugaugagcaucaucaccaccuuccaccugagcauccccaacuucaaccaguacgaggccaugagcugcgacuucaacggcggcaagaucagcauccaguacaaccugagccacagcuacgccggcgacgccgcccagcacugcggcaccguggccaacggcgugcugcagaccuucaugagaauggccuggggcggcagcuaccuggcccuggacagcggcagaagaggcugggacugcaucaucagcagcuaccaguaccugaucauccagaacaccaccugggacgaccacugccaguucagcagacccagccccaucggcuaccugggcuucgugagccagaagaccagagacaucuacaucagcagaagacugcugggcaccuucaccuggacccugagcgacagcgagggccacgacaugcccggcggcuacugccugaccagauggaugcugaucgaggccgaccugaagugcuucggcaacaccgccguggccaagugcaacgagaagcacgacgaggaguucugcgacauguggagacuguucgacuucugcaagcaggccauccagagacugaaggcccccgcccagaugaacauccagcugaucaacaaggccgugaacgcccugaucaacgaccagcugaugaugaagaaccaccugagagacaucaugggcauccccuacugcaacuacagcaaguucugcuaccugaacaacaccaccaccggcagaaccagccugcccagaugcugccugaucagcaacggcagcuaccugaacgagacccacuucagcgacgacaucgagcagcaggccgacaacaugaucaccgagaugcugcagaaggaguacauggacagacagggcaagaccccccugggccugguggaccuguucguguucagcaccagcuucuaccugaucaccaucuuccugcaccuggugaagauccccacccacagacacaucgugggcaagcccugccccaagccccacagacugaaccacaugggcaucugcagcugcggccuguacaagcagcccggcgugcccgugagauggaagagaugaggacuaguuauaagacugacuagcccgaugggccucccaacgggcccuccuccccuccuugcaccgagauuaauaaaaaaaaaaaaaaaaaaaaaaaaaaaaaaaaaaaaaaaaaaaaaaaaaaaaaaaaaaaaaaaaaaaaaaaaaaaaaaaaaaaaaaaaaaaaaaaaaaaa

SEQ ID NO: 34764 - RNA, 1662 nt, Artificial Sequence; identical to SEQ ID NO: 34758
  mRNA product Design i-3 (A100) comprising derived and/or modified sequence from LASV(Pinneo-NIG-1969;Clade I)__AIT17836__GPCmut8 (opt4)

SEQ ID NO: 34765 - RNA, 1662 nt, Artificial Sequence
  mRNA product Design i-3 (A100) comprising derived and/or modified sequence from LASV(ISTH0009-NIG-2011;Clade II)__AIT17404__GPCmut8 (opt4)
aggagaaagcuuaccaugggccagaucaucaccuucuuccaggaggugccccacgugaucgaggaggugaugaacaucgugcugaucgcccugagccugcuggccauccugaagggcaucuacaacguggccaccugcggccuguucggccuggugagcuuccugcugcugugcggcagaagcugcagcaccaccuacaagggcguguacgagcugcagacccuggagcuggacauggccagccugaacaugugcaugccccugagcugcaccaagaacaacagccaccacuacaucauggugggcaacgagaccggccuggagcugacccugaccaacaccagcaucaucaaccacaaguucugcaaccugagcgacgcccacaagaagaaccuguacgaccacgcccugaugagcaucaucagcaccuuccaccugagcauccccaacuucaaccaguacgaggccaugagcugcgacuucaacggcggcaagaucagcgugcaguacaaccugagccacgccuacgccguggacgccgccaaccacugcggcaccaucgccaacggcgugcugcagaccuucaugagaauggccuggggcggcagcuacaucgcccuggacagcggcaagggcagcugggacugcaucaugaccagcuaccaguaccugaucauccagaacaccaccugggaggaccacugccaguucagcagacccagccccaucggcuaccugggccugcugagccagagaaccagagacaucuacaucagcagaagacugcugggcaccuucaccuggacccugagcgacagcgagggcaacgagacccccggcggcuacugccugaccagauggaugcugaucgaggccgagcugaagugcuucggcaacaccgccguggccaagugcaacgagaagcacgacgaggaguucugcgacaugcugagacuguucgacuucugcaagcaggccaucagaagacugaagacccccgcccagaugagcauccagcugaucaacaaggccgugaacgcccugaucaacgaccagcugaucaugaagaaccaccugagagacaucaugggcauccccuacugcaacuacagcaaguacugcuaccugaaccacaccgugaccggcaagaccagccugcccagaugcugccuggugagcaacggcagcuaccugaacgagacccacuucagcgacgacaucgagcagcaggccgacaacaugaucaccgagcugcugcagaaggaguacauggacagacagggcaagaccccccugggccugguggaccuguucguguucagcaccagcuucuaccugaucagcaucuuccugcaccugaucaagauccccacccacagacacaucaccggcaagcccugccccaagccccacagacugaaccacaugggcaucugcagcugcggccuguacaagcaccccggcgugcccgugaaguggaagagaugaggacuaguuauaagacugacuagcccgaugggccucccaacgggcccuccuccccuccuugcaccgagauuaauaaaaaaaaaaaaaaaaaaaaaaaaaaaaaaaaaaaaaaaaaaaaaaaaaaaaaaaaaaaaaaaaaaaaaaaaaaaaaaaaaaaaaaaaaaaaaaaaaaaa

SEQ ID NO: 34766 - RNA, 1662 nt, Artificial Sequence
  mRNA product Design i-3 (A100) comprising derived and/or modified sequence from LASV(ISTH2010-NIG-2012;Clade II)__AIT17482__GPCmut8 (opt4)
aggagaaagcuuaccaugggccagaucaucaccuucuuccaggaggugccccacgugaucgaggaggugaugaacaucgugcugaucgcccugagccugcuggccauccugaagggcaucuacaacguggccaccugcggccuguucggccuggugagcuuccugcugcugugcggcagaagcugcagcaccaccuacaagggcguguacgagcugcagacccuggagcuggacauggccagccugaacaugugcaugccccugagcugcaccaagaacaacagccaccacuacaucauggugggcaacgagaccggccuggagcugacccugaccaacaccagcaucaucaaccacaaguucugcaaccugagcgacgcccacaagaagaaccuguacgaccacgcccugaugagcaucaucagcaccuuccaccugagcauccccaacuucaaccaguacgaggccaugagcugcgacuucaacggcggcaagaucagcgugcaguacaaccugagccacgccuacgccguggacgccgccaaccacugcggcaccaucgccaacggcgugcugcagaccuucaugagaauggccuggggcggcagcuacaucgcccuggacagcggcaagggcagcugggacugcaucaugaccagcuaccaguaccugaucauccagaacaucaccugggaggaccacugccaguucagcagacccagccccaucggcuaccugggccugcugagccagagaaccagagacaucuacaucagcagaagacugcugggcaccuucaccuggacccugagcgacagcgagggcaacgagacccccggcggcuacugccugaccagauggaugcugaucgaggccgagcugaagugcuucggcaacaccgccguggccaagugcaacgagaagcacgacgaggaguucugcgacaugcugagacuguucgacuucugcaagcaggccaucagaagacugaagacccccgcccagaugagcauccagcugaucaacaaggccgugaacgcccugaucaacgaccagcugaucaugaagaaccaccugagagacaucaugggcauccccuacugcaacuacagcaaguacugcuaccugaaccacaccgugaccggcaagaccagccugcccagaugcugccuggugagcaacggcagcuaccugaacgagacccacuucagcgacgacaucgagcagcaggccgacaacaugaucaccgagcugcugcagaaggaguacaucgacagacagggcaagaccccccugggccugguggaccuguucguguucagcaccagcuucuaccugaucagcaucuuccugcaccuggugaagauccccacccacagacacguggugggcaagcccugccccaagccccacagacugaaccacaugggcaucugcagcugcggccuguacaagcaccccggcgugcccgugaaguggaagagaugaggacuaguuauaagacugacuagcccgaugggccucccaacgggcccuccuccccuccuugcaccgagauuaauaaaaaaaaaaaaaaaaaaaaaaaaaaaaaaaaaaaaaaaaaaaaaaaaaaaaaaaaaaaaaaaaaaaaaaaaaaaaaaaaaaaaaaaaaaaaaaaaaaaa

SEQ ID NO: 34767 - RNA, 1662 nt, Artificial Sequence
  mRNA product Design i-3 (A100) comprising derived and/or modified sequence from LASV(Lassa virus/H.sapiens-wt/NGA/2015/ISTH_0543;Clade II)__AVO03639__GPCmut8 (opt4)
aggagaaagcuuaccaugggccagaucaucaccuucuuccaggaggugccccacgugaucgaggaggugaugaacaucgugcugaucgcccugagccugcuggccauccugaagggcaucuacaacguggccaccugcggccuguucggccuggugagcuuccugcugcugugcggcagaagcugcagcaccaccuacaagggcguguacgagcugcagacccuggagcuggacauggccaaccugaacaugugcaugccccugagcugcaccaagaacaacagccaccacuacaucauggugggcaacgagaccggccuggagcugacccugaccaacaccagcaucaucaaccacaaguucugcaaccugagcgacgcccacaagaagaaccuguacgaccacgcccugaugagcaucaucagcaccuuccaccugagcauccccaacuucaaccaguacgaggccaugagcugcgacuucaacggcggcaagaucagcgugcaguacaaccugagccacaccuacgccguggacgccgccaaccacugcggcaccaucgccaacggcgugcugcagaccuucaugagaauggccuggggcggcagcuacaucgcccuggacagcggcaagggcagcugggacugcaucaugaccagcuaccaguaccuggugauccagaacaccaccugggaggaccacugccaguucagcagacccagccccaucggcuaccugggccugcugagccagagaaccagagacaucuacaucagcagaagacugcugggcaccuucaccuggacccugagcgacagcgagggcaacgagacccccggcggcuacugccugaccagauggaugcugaucgaggccgagcugaagugcuucggcaacaccgccguggccaagugcaacgagaagcacgacgaggaguucugcgacaugcugagacuguucgacuucugcaagcaggccaucagaagacugaagacccccgcccagaugagcauccagcugaucaacaaggccgugaacgcccugaucaacgaccagcugaucaugaagaaccaccugagagacaucaugggcauccccuacugcaacuacagcaaguacugcuaccugaaccacaccgugaccggcaagaccagccugcccagaugcugccuggugagcaacggcagcuaccugaacgagacccacuucagcgacgacaucgagcagcaggccgacaacaugaucaccgagcugcugcagaaggaguacaucgacagacagggcaagaccccccugggccugguggaccuguucguguucagcaccagcuucuaccugaucagcaucuuccugcaccuggugaagauccccacccacagacacaucaccggcaagcccugccccaagccccacagacugaaccacaugggcaucugcagcugcggccuguacaagcaccccggcgugcccgugaaguggaagagaugaggacuaguuauaagacugacuagcccgaugggccucccaacgggcccuccuccccuccuugcaccgagauuaauaaaaaaaaaaaaaaaaaaaaaaaaaaaaaaaaaaaaaaaaaaaaaaaaaaaaaaaaaaaaaaaaaaaaaaaaaaaaaaaaaaaaaaaaaaaaaaaaaaaa

SEQ ID NO: 34768 - RNA, 1662 nt, Artificial Sequence
  mRNA product Design i-3 (A100) comprising derived and/or modified sequence from LASV(Lassa virus/H.sapiens-wt/NGA/2016/ISTH_0009;Clade II)__AVO03571__GPCmut8 (opt4)
aggagaaagcuuaccaugggccagaucaucaccuucuuccaggaggugccccacgugaucgaggaggugaugaacaucgugcugaucgcccugagccugcuggccauccugaagggcaucuacaacguggccaccugcggccugcugggccuggugagcuuccugcugcugugcggcagaagcugcagcaccaccuacaagggcguguacgagcugcagacccuggagcuggacauggccagccugaacaugugcaugccccugagcugcaccaagaacaacagccaccacuacaucauggugggcaacgagaccggccuggagcugacccugaccaacaccagcaucaucaaccacaaguucugcaaccugagcgacgcccacaagaagaaccuguacgaccacgcccugaugagcaucaucagcaccuuccaccugagcauccccaacuucaaccaguacgaggccaugagcugcgacuucaacggcggcagaaucagcgugcaguacaaccugagccacagcuacgccguggacgccgccaaccacugcggcaccaucgccaacggcgugcugcagaccuucaugagaauggccuggggcggcagcuacaucgcccuggacagcggcaagggcagcugggacugcaucaugaccagcuaccaguaccugaucauccagaacaccaccugggaggaccacugccaguucagcagacccagccccaucggcuaccugggccugcugagccagagaaccagagacaucuacaucagcagaagacugcugggcaccuucaccuggacccugagcgacagcgagggcaacgagacccccggcggcuacugccugaccagauggaugcugaucgaggccgagcugaagugcuucggcaacaccgccguggccaagugcaacgagaagcacgacgaggaguucugcgacaugcugagacuguucgacuucugcaagcaggccaucagaagacugaagacccccgcccagaugagcauccagcugaucaacaaggccgugaacgcccugaucaacgaccagcugaucaugaagaaccaccugagagacaucaugggcauccccuacugcaacuacagcaaguacugcuaccugaaccacaccgugaccggcaagaccagccugcccagaugcugccuggugagcaacggcagcuaccugaacgagacccacuucagcgacgacaucgagcagcaggccgacaacaugaucaccgagcugcugcagaaggaguacaucgacagacagggcaagaccccccugggccugguggaccuguucguguucagcaccagcuucuaccugaucagcaucuuccugcaccuggugaagauccccacccacagacacaucaccggcaagcccugccccaagccccacagacugaaccacaugggcaucugcagcugcggccuguacaaccaccccggcgugcccgugaaguggaagagaugaggacuaguuauaagacugacuagcccgaugggccucccaacgggcccuccuccccuccuugcaccgagauuaauaaaaaaaaaaaaaaaaaaaaaaaaaaaaaaaaaaaaaaaaaaaaaaaaaaaaaaaaaaaaaaaaaaaaaaaaaaaaaaaaaaaaaaaaaaaaaaaaaaaa

SEQ ID NO: 34769 - RNA, 1662 nt, Artificial Sequence
  mRNA product Design i-3 (A100) comprising derived and/or modified sequence from LASV(Lassa virus/H.sapiens-wt/NGA/2016/ISTH_0017;Clade II)__AVO03567__GPCmut8 (opt4)
aggagaaagcuuaccaugggccagaucaucaccuucuuccaggaggugccccacgugaucgaggaggugaugaacaucgugcugaucgcccugagccugcuggccauccugaagggcaucuacaacguggccaccugcggccuguucggccuggugagcuuccugcugcugugcggcagaagcugcagcaccaccuacaagggcguguacgagcugcagacccuggagcuggacauggccagccugaacaugugcaugccccugagcugcaccaagaacaacagccaccacuacaucauggugggcaacgagaccggccuggagcugacccugaccaacaccagcaucaucaaccacaaguucugcaaccugagcgacgcccacaagaagaaccuguacgaccacgcccugaugagcaucaucagcaccuuccaccugagcauccccaacuucaaccaguacgaggccaugagcugcgacuucaacggcggcaagaucagcgugcaguacaaccugagccacaccuacgccaucgacgccgccaaccacugcggcaccaucgccaacggcgugcugcagaccuucaugagaauggccuggggcggcagcuacaucgcccuggacagcggcaagggcagcugggacugcaucaugaccagcuaccaguaccugaucauccagaacaccaccugggaggaccacugccaguucagcagacccagccccaucggcuaccugggccugcugagccagagaaccagagacaucuacaucagcagaagacugcugggcaccuucaccuggacccugagcgacagcgagggcaacgagacccccggcggcuacugccugaccagauggaugcugaucgaggccgagcugaagugcuucggcaacaccgccguggccaagugcaacgagaagcacgacgaggaguucugcgacaugcugagacuguucgacuucugcaagcaggccaucagaagacugaagacccccgcccagaugagcauccagcugaucaacaaggccgugaacgcccugaucaacgaccagcugaucaugaagaaccaccugagagacaucaugggcauccccuacugcaacuacagcaaguacugcuaccugaaccacaccgugaccggcaagaccagccugcccagaugcugccuggugagcaacggcagcuaccugaacgagacccacuucagcgacgacaucgagcagcaggccgacaacaugaucaccgagcugcugcagaaggaguacauggacagacagggcaagaccccccugggccugguggaccuguucguguucagcaccagcuucuaccugaucagcaucuuccugcaccuggugagaauccccacccacagacacgugaucggcaagcccugccccaagccccacagacugaaccacaugggcaucugcagcugcggccuguacaagcaccccggcgugcccgugaaguggaagagaugaggacuaguuauaagacugacuagcccgaugggccucccaacgggcccuccuccccuccuugcaccgagauuaauaaaaaaaaaaaaaaaaaaaaaaaaaaaaaaaaaaaaaaaaaaaaaaaaaaaaaaaaaaaaaaaaaaaaaaaaaaaaaaaaaaaaaaaaaaaaaaaaaaaa

SEQ ID NO: 34770 - RNA, 1662 nt, Artificial Sequence
  mRNA product Design i-3 (A100) comprising derived and/or modified sequence from LASV(Lassa virus/H.sapiens-wt/NGA/2018/ISTH_0959;Clade II)__AVV65099__GPCmut8 (opt4)
aggagaaagcuuaccaugggccagaucaucaccuucuuccaggaggugccccacgugaucgaggaggugaugaacaucgugcugaucgcccugagccugcuggccauccugaagggcaucuacaacguggugaccugcggccuguucggccuggugagcuuccugcugcugugcggcagaagcugcagcaccaccuacaagggcguguacgagcugcagacccuggagcuggacauggccagccugaacaugugcaugccccugagcugcaccaagaacaacagccaccacuacaucauggugggcaacgagaccggccuggagcugacccugaccaacaccagcaucaucaaccacaaguucugcaaccugagcgacgcccacaagaagaaccuguacgaccacgcccugaugagcaucaucagcaccuuccaccugagcauccccaacuucaaccaguacgaggccaugagcugcgacuucaacggcggcaagaucagcgugcaguacaaccugagccacgccuacgccaucgacgccgccaaccacugcggcaccaucgccaacggcgugcugcagaccuucaugagaauggccuggggcggcagcuacaucgcccuggacagcggcaagggcagcugggacugcaucaugaccagcuaccaguaccugaucauccagaacaccaccugggaggaccacugccaguucagcagacccagccccaucggcuaccugggccugcugagccagagaaccagagacaucuacaucagcagaagacugcugggcaccuucaccuggacccugagcgacagcgagggcaacgagacccccggcggcuacugccugaccagauggaugcugaucgaggccgagcugaagugcuucggcaacaccgccguggccaagugcaacgagaagcacgacgaggaguucugcgacaugcugagacuguucgacuucugcaagcaggccaucagaagacugaagacccccgcccagaugagcauccagcugaucaacaaggccgugaacgcccugaucaacgaccagcugaucaugaagaaccaccugagagacaucaugggcauccccuacugcaacuacagcaaguacugcuaccugaaccacaccgugaccggcaagaccagccugcccagaugcugccuggugagcaacggcagcuaccugaacgagacccacuucagcgacgacaucgagcagcaggccgacaacaugaucaccgagcugcugcagaaggaguacaucgacagacagggcaagaccccccugggccugguggaccuguucguguucagcaccagcuucuaccugaucagcaucuuccugcaccuggugaagauccccacccacagacacgugaucggcaagcccugccccaagccccacagacugaaccacaugggcaucugcagcugcggccuguacaagcaccccggcgugcccgugaaguggaagagaugaggacuaguuauaagacugacuagcccgaugggccucccaacgggcccuccuccccuccuugcaccgagauuaauaaaaaaaaaaaaaaaaaaaaaaaaaaaaaaaaaaaaaaaaaaaaaaaaaaaaaaaaaaaaaaaaaaaaaaaaaaaaaaaaaaaaaaaaaaaaaaaaaaaa

SEQ ID NO: 34771 - RNA, 1662 nt, Artificial Sequence
  mRNA product Design i-3 (A100) comprising derived and/or modified sequence from LASV(LASV003-NIG-2008;Clade II)__AIT17580__GPCmut8 (opt4)
aggagaaagcuuaccaugggccagaucaucaccuucuuccaggaggugccccacgugaucgaggaggugaugaacaucgugcugaucgcccugagccugcuggccauccugaagggcaucuacaacguggccaccugcggccuguucggccuggugagcuuccugcugcugugcggcagaagcugcagcaccaccuacaagggcguguacgagcugcagacccuggagcuggacauggccagccugaacaugugcaugccccugagcugcaccaagaacaacagccaccacuacaucauggugggcaacgagaccggccuggagcugacccugaccaacaccagcaucaucaaccacaaguucugcaaccugagcgacgcccacaagaagaaccuguacgaccacgcccugaugagcaucaucagcaccuuccaccugagcauccccaacuucaaccaguacgaggccaugagcugcgacuucaacggcggcaagaucagcgugcaguacaaccugagccacaccuacgccguggacgccgccaaccacugcggcaccaucgccaacggcgugcugcagaccuucaugagaauggccuggggcggcagcuacaucgcccuggacagcggcaagggcagcugggacugcaucaugaccagcuaccaguaccugaucauccagaacaccaccugggaggaccacugccaguucagcagacccagccccaucggcuaccugggccugcugagccagagaaccagagacaucuacaucagcagaagacugcugggcaccuucaccuggacccugagcgacagcgagagcaacgagacccccggcggcuacugccugaccagauggaugcugaucgaggccgagcugaagugcuucggcaacaccgccguggccaagugcaacgagaagcacgacgaggaguucugcgacaugcugagacuguucgacuucugcaagcaggccaucagaagacugaaggcccccgcccagaugagcauccagcugaucaacaaggccgugaacgcccugaucaacgaccagcugaucaugaagaaccaccugagagacaucaugggcauccccuacugcaacuacagcaaguacugcuaccugaaccacaccgugaccggcagaaccagccugcccagaugcugccuggugagcaacggcagcuaccugaacgagacccacuucagcgacgacaucgagcagcaggccgacaacaugaucaccgagcugcugcagaaggaguacauggacagacagggcaagaccccccugggccugguggaccuguucguguucagcaccagcuucuaccugaucagcaucuuccugcaccuggugaagauccccacccacagacacgugaucggcaagcccugccccaagccccacagacugaaccacaugggcaucugcagcugcggccuguacaagcaccccggcgugcccgugaaguggaagagaugaggacuaguuauaagacugacuagcccgaugggccucccaacgggcccuccuccccuccuugcaccgagauuaauaaaaaaaaaaaaaaaaaaaaaaaaaaaaaaaaaaaaaaaaaaaaaaaaaaaaaaaaaaaaaaaaaaaaaaaaaaaaaaaaaaaaaaaaaaaaaaaaaaaa

SEQ ID NO: 34772 - RNA, 1662 nt, Artificial Sequence
  mRNA product Design i-3 (A100) comprising derived and/or modified sequence from LASV(LASV035-NIG-2009;Clade II)__AIT17588__GPCmut8 (opt4)
aggagaaagcuuaccaugggccagaucaucaccuucuuccaggaggugccccacgugaucgaggaggugaugaacaucgugcugaucgcccugagccugcuggccauccugaagggcaucuacaacguggccaccugcggccuguucggccuggugagcuuccugcugcugugcggcagaagcugcagcaccaccuacaagggcguguacgagcugcagacccuggagcuggacauggccagccugaacaugugcaugccccugagcugcaccaagaacaacagccaccacuacaucauggugggcaacgagaccggccuggagcugacccugaccaacaccagcaucaucaaccacaaguucugcaaccugagcgacgcccacaagaagaaccuguacgaccacgcccugaugagcaucaucagcaccuuccaccugagcauccccaacuucaaccaguacgaggccaugagcugcgacuucaacggcggcaagaucagcgugcaguacaaccugagccacgccuacgccguggacgccgccaaccacugcggcaccaucgccaacggcgugcugcagaccuucaugagaauggccuggggcggcagcuacaucgcccuggacagcggcaagggcagcugggacugcaucaugaccagcuaccaguaccugaucauccagaacaccaccugggaggaccacugccaguucagcagacccagccccaucggcuaccugggccugcugagccagagaaccagagacaucuacaucagcagaagacugcugggcaccuucaccuggacccugagcgacagcgagggcaacgagacccccggcggcuacugccugaccagauggaugcugaucgaggccgagcugaagugcuucggcaacaccgccguggccaagugcaacgagaagcacgacgaggaguucugcgacaugcugagacuguucgacuucugcaagcaggccaucagaagacugaaggcccccgcccagaugagcauccagcugaucaacaaggccgugaacgcccugaucaacgaccagcugaucaugaagaaccaccugagagacaucaugggcauccccuacugcaacuacagcaaguacugcuaccugaaccacaccgugaccggcaagaccagccugcccagaugcugccuggugagcaacggcagcuaccugaacgagacccacuucagcgacgacaucgagcagcaggccgacaacaugaucaccgagcugcugcagaaggaguacaucgacagacagggcaagaccccccugggccugguggaccuguucguguucagcaccagcuucuaccugaucagcaucuuccugcaccuggugaagauccccacccacagacacgugaucggcaagcccugccccaagccccacagacugaaccacaugggcaucugcagcugcggccuguacaagcaccccggcgugcccgugaaguggaagagaugaggacuaguuauaagacugacuagcccgaugggccucccaacgggcccuccuccccuccuugcaccgagauuaauaaaaaaaaaaaaaaaaaaaaaaaaaaaaaaaaaaaaaaaaaaaaaaaaaaaaaaaaaaaaaaaaaaaaaaaaaaaaaaaaaaaaaaaaaaaaaaaaaaaa

SEQ ID NO: 34773 - RNA, 1662 nt, Artificial Sequence
  mRNA product Design i-3 (A100) comprising derived and/or modified sequence from LASV(LASV1000-NIG-2009;Clade II)__AIT17782__GPCmut8 (opt4)
aggagaaagcuuaccaugggccagaucaucaccuucuuccaggaggugccccacgugaucgaggaggugaugaacaucgugcugaucgcccugagccugcuggccauccugaagggcaucuacaacguggccaccugcggccuguucggccuggugagcuuccugcugcugugcggcagaagcugcagcaccaccuacaagggcguguacgagcugcagacccuggagcuggacauggccagccugaacaugugcaugccccugagcugcaccaagaacaacagccaccacuacaucauggugggcaacgagaccggccuggagcugacccugaccaacaccagcaucaucaaccacaaguucugcaaccugagcgacgcccacaagaagaaccuguacgaccacgcccugaugagcaucaucagcaccuuccaccugagcauccccaacuucaaccaguacgaggccaugagcugcgacuucaacggcggcaagaucagcgugcaguacaaccugagccacaccuacgccguggacgccgccaaccacugcggcaccaucgccaacggcgugcugcagaccuucaugagaauggccuggggcggcagcuacaucgcccuggacagcggcaagggcagcugggacugcaucaugaccagcuaccaguaccugaucauccagaacaccaccugggaggaccacugccaguucagcagacccagccccaucggcuaccugggccugcugagccagagaaccagagacaucuacaucagcagaagacugcugggcaccuucaccuggacccugagcgacagcgagggcaacgagacccccggcggcuacugccugaccagauggaugcugaucgaggccgagcugaagugcuucggcaacaccgccguggccaagugcaacgagaagcacgacgaggaguucugcgacaugcugagacuguucgacuucugcaagcaggccaucaagagacugaagacccccgcccagaugagcauccagcugaucaacaaggccgugaacgcccugaucaacgaccagcugaucaugaagaaccaccugagagacaucaugggcauccccuacugcaacuacagcaaguacugcuaccugaaccacaccgugaccggcaagaccagccugcccagaugcugccuggugagcaacggcagcuaccugaacgagacccacuucagcgacgacaucgagcagcaggccgacaacaugaucaccgagcugcugcagaaggaguacaucgacagacagggcaagaccccccugggccugguggaccuguucguguucagcaccagcuucuaccugaucagcaucuuccugcaccuggugaagauccccacccacagacacguggugggcaagcccugccccaagccccacagacugaaccacaugggcaucugcagcugcggccuguacaagcaccccggcgugcccgugaaguggaagagaugaggacuaguuauaagacugacuagcccgaugggccucccaacgggcccuccuccccuccuugcaccgagauuaauaaaaaaaaaaaaaaaaaaaaaaaaaaaaaaaaaaaaaaaaaaaaaaaaaaaaaaaaaaaaaaaaaaaaaaaaaaaaaaaaaaaaaaaaaaaaaaaaaaaa

SEQ ID NO: 34774 - RNA, 1662 nt, Artificial Sequence
  mRNA product Design i-3 (A100) comprising derived and/or modified sequence from LASV(LASV221-NIG-2010;Clade II)__AIT17624__GPCmut8 (opt4)
aggagaaagcuuaccaugggccagaucaucaccuucuuccaggaggugccccacgugaucgaggaggugaugaacaucgugcugaucgcccugagccugcuggccauccugaagggcaucuacaacguggccaccugcggccuguucggccuggugagcuuccugcugcugugcggcagaagcugcagcaccaccuacaagggcguguacgagcugcagacccuggagcuggacauggccagccugaacaugugcaugccccugagcugcaccaagaacaacagccaccacuacaucauggugggcaacgagaccggccuggagcugacccugaccaacaccagcaucaucaaccacaaguucugcaaccugagcgacgcccacaagaagaaccuguacgaccacgcccugaugagcaucaucagcaccuuccaccugagcauccccaacuucaaccaguacgaggccaugagcugcgacuucaacggcggcaagaucagcgugcaguacaaccugagccacaccuacgccaucgacgccgccaaccacugcggcaccaucgccaacggcgugcugcagaccuucaugagaauggccuggggcggcagcuacaucgcccuggacagcggcaagggcagcugggacugcaucaugaccagcuaccaguaccugaucauccagaacaccaccugggaggaccacugccaguucagcagacccagccccaucggcuaccugggccugcugagccagagaaccagagacaucuacaucagcagaagacugcugggcaccuucaccuggacccugagcgacagcgagggcaacgagacccccggcggcuacugccugaccagauggaugcugaucgaggccgagcugaagugcuucggcaacaccgccguggccaagugcaacgagaagcacgacgaggaguucugcgacaugcugagacuguucgacuucugcaagcaggccaucagaagacugaagacccccgcccagaugagcauccagcugaucaacaaggccgugaacgcccugaucaacgaccagcugaucaugaagaaccaccugagagacaucaugggcauccccuacugcaacuacagcaaguacugcuaccugaaccacaccgugaccggcaagaccagccugcccagaugcugccuggugagcaacggcagcuaccugaacgagacccacuucagcgacgacaucgagcagcaggccgacaacaugaucaccgagaugcugcagaaggaguacauggacagacagggcaagaccccccugggccugguggaccuguucguguucagcaccagcuucuaccugaucagcaucuuccugcaccuggugaagauccccacccacagacacgugaucggcaagcccugccccaagccccacagacugaaccacaugggcaucugcagcugcggccuguacaagcaccccggcgugcccgugaaguggaagagaugaggacuaguuauaagacugacuagcccgaugggccucccaacgggcccuccuccccuccuugcaccgagauuaauaaaaaaaaaaaaaaaaaaaaaaaaaaaaaaaaaaaaaaaaaaaaaaaaaaaaaaaaaaaaaaaaaaaaaaaaaaaaaaaaaaaaaaaaaaaaaaaaaaaa

SEQ ID NO: 34775 - RNA, 1662 nt, Artificial Sequence
  mRNA product Design i-3 (A100) comprising derived and/or modified sequence from LASV(LASV237-NIG-2010;Clade II)__AIT17638__GPCmut8 (opt4)
aggagaaagcuuaccaugggccagaucaucaccuucuuccaggaggugccccacgugaucgaggaggugaugaacaucgugcugaucgcccugagccugcuggccauccugaagggcaucuacaacguggccaccugcggccuguucggccuggugagcuuccugcugcugugcggcagaagcugcagcaccaccuacaagggcguguacgagcugcagacccuggagcuggacauggccagccugaacaugugcaugccccugagcugcaccaagaacaacagccaccacuacaucauggugggcaacgagaccggccuggagcugacccugaccaacaccagcaucaucaaccacaaguucugcaaccugagcgacgcccacaagaaggaccuguacgaccacgcccugaugagcaucaucagcaccuuccaccugagcauccccaacuucaaccaguacgaggccaugagcugcgacuucaacggcggcaagaucagcgugcaguacaaccugagccacaccuacgccguggacgccgccaaccacugcggcaccaucgccaacggcgugcugcagaccuucaugagaauggccuggggcggcagcuacaucgcccuggacagcggcaagggcagcugggacugcaucaugaccagcuaccaguaccugaucauccagaacaccaccugggaggaccacugccaguucagcagacccagccccaucggcuaccugggccugcugagccagagaaccagagacaucuacaucagcagaagacugcugggcaccuucaccuggacccugagcgacagcgagggcaacgagacccccggcggcuacugccugaccagauggaugcugaucgaggccgagcugaagugcuucggcaacaccgccguggccaagugcaacgagaagcacgacgaggaguucugcgacaugcugagacuguucgacuucugcaagcaggccaucagaagacugaagacccccgcccagaugagcauccagcugaucaacaaggccgugaacgcccugaucaacgaccagcugaucaugaagaaccaccugagagacaucaugggcauccccuacugcaacuacagcaaguacugcuaccugaaccacaccgugaccggcaagaccagccugcccagaugcugccuggugagcaacggcagcuaccugaacgagacccacuucagcgacgacaucgagcagcaggccgacaacaugaucaccgagcugcugcagaaggaguacauggacagacagggcaagaccccccugggccugguggaccuguucguguucagcaccagcuucuaccugaucagcaucuuccugcaccugaucaagauccccacccacagacacaucaccggcaagcccugccccaagccccacagacugaaccacaugggcaucugcagcugcggccuguacaagcaccccggcgugcccgugaaguggaagagaugaggacuaguuauaagacugacuagcccgaugggccucccaacgggcccuccuccccuccuugcaccgagauuaauaaaaaaaaaaaaaaaaaaaaaaaaaaaaaaaaaaaaaaaaaaaaaaaaaaaaaaaaaaaaaaaaaaaaaaaaaaaaaaaaaaaaaaaaaaaaaaaaaaaa

SEQ ID NO: 34776 - RNA, 1662 nt, Artificial Sequence
  mRNA product Design i-3 (A100) comprising derived and/or modified sequence from LASV(LASV253-NIG-2011;Clade II)__AIT17670__GPCmut8 (opt4)
aggagaaagcuuaccaugggccagaucaucaccuucuuccaggaggugccccacgugaucgaggaggugaugaacaucgugcugaucgcccugagccugcuggccauccugaagggcaucuacaacguggccaccugcggccuguucggccuggugagcuuccugcugcugugcggcagaagcugcagcaccaccuacaagggcguguacgagcugcagacccuggagcuggacauggccagccugaacaugugcaugccccugagcugcaccaagaacaacagccaccacuacaucauggugggcaacgagaccggccuggagcugacccugaccaacaccagcaucaucaaccacaaguucugcaaccugagcgacgcccacaagaagaaccuguacgaccacgcccugaugagcaucaucagcaccuuccaccugagcauccccaacuucaaccaguacgaggccaugagcugcgacuucaacggcggcaagaucagcgugcaguacaaccugagccacaccuacgccguggacgccgccaaccacugcggcaccaucgccaacggcgugcugcagaccuucaugagaauggccuggggcggcagcuacaucgcccuggacagcggcaagggcagcugggacugcaucaugaccagcuaccaguaccugaucauccagaacaccaccugggaggaccacugccaguucagcagacccagccccaucggcuaccugggccugcugagccagagaaccagagacaucuacaucagcagaagacugcugggcaccuucaccuggacccugagcgacagcgagggcaacgagacccccggcggcuacugccugaccagauggaugcugaucgaggccgagcugaagugcuucggcaacaccgccguggccaagugcaacgagaagcacgacgaggaguucugcgacaugcugagacuguucgacuucugcaagcaggccaucagaagacugaaggcccccgcccagaugagcauccagcugaucaacaaggccgugaacgcccugaucaacgaccagcugaucaugaagaaccaccugagagacaucaugggcauccccuacugcaacuacagcaaguacugcuaccugaaccacaccgugaccggcagaaccagccugcccagaugcugccuggugagcaacggcagcuaccugaacgagacccacuucagcgacgacaucgagcagcaggccgacaacaugaucaccgagcugcugcagaaggaguacaucgacagacagggcaagaccccccugggccugguggaccuguucguguucagcaccagcuucuaccugaucagcaucuuccugcaccuggugaagauccccacccacagacacaucaucggcaagcccugccccaagccccacagacugaaccacaugggcaucugcagcugcggccuguacaagcaccccggcgugcccgugaaguggaagagaugaggacuaguuauaagacugacuagcccgaugggccucccaacgggcccuccuccccuccuugcaccgagauuaauaaaaaaaaaaaaaaaaaaaaaaaaaaaaaaaaaaaaaaaaaaaaaaaaaaaaaaaaaaaaaaaaaaaaaaaaaaaaaaaaaaaaaaaaaaaaaaaaaaaa

SEQ ID NO: 34777 - RNA, 1662 nt, Artificial Sequence
  mRNA product Design i-3 (A100) comprising derived and/or modified sequence from LASV(LASV254-NIG-2011;Clade II)__AIT17674__GPCmut8 (opt4)
aggagaaagcuuaccaugggccagaucaucaccuucuuccaggaggugccccacgugaucgaggaggugaugaacaucgugcugaucgcccugagccugcuggccauccugaagggcaucuacaacguggccaccugcggccuguucggccuggugagcuuccugcugcugugcggcagaagcugcagcaccaccuacaagggcguguacgagcugcagacccuggagcuggacaugaccaaccugaacaugugcaugccccugagcugcaccaagaacaacagccaccacuacaucauggugggcaacgagaccggccuggagcugacccugaccaacaccagcaucaucaaccacaaguucugcaaccugagcgacgcccacaagaagaaccuguacaaccacgcccugaugagcaucaucagcaccuuccaccugagcauccccaacuucaaccaguacgaggccaugagcugcgacuucaacggcggcaagaucagcgugcaguacaaccugagccacagcuacgccguggacgccgccaaccacugcggcaccaucgccaacggcgugcugcagaccuucaugagaauggccuggggcggcagcuacaucgcccuggacagcggcaagggcaacugggacugcaucaugaccagcuaccaguaccugaucauccagaacaccaccugggaggaccacugccaguucagcagacccagccccaucggcuaccugggccugcugagccagagaaccagagacaucuacaucagcagaagacugcugggcaccuucaccuggacccugagcgacagcgagggcaacgagacccccggcggcuacugccugaccagauggaugcugaucgaggccgagcugaagugcuucggcaacaccgccguggccaagugcaacgagaagcacgacgaggaguucugcgacaugcugagacuguucgacuucugcaagcaggccaucagaagacugaagacccccgcccaggccaacauccagcugaucaacaaggccgugaacgcccugaucaacgaccagcugaucaugaagaaccaccugagagacaucaugggcauccccuacugcaacuacagcaaguacugcuaccugaaccacaccgugaccggcaagaccagccugcccagaugcugccuggugagcaacggcagcuaccugaacgagacccacuucagcgacgacaucgagcagcaggccgacaacaugaucaccgagcugcugcagaaggaguacauggacagacagggcaagaccccccugggccugguggaccuguucguguucagcaccagcuucuaccugaucagcaucuuccugcaccuggugaagauccccacccacagacacgugaucggcaagcccugccccaagccccacagacugaaccacaugggcaucugcagcugcggccuguacaagcaccccggcgugcccgugaaguggaagagaugaggacuaguuauaagacugacuagcccgaugggccucccaacgggcccuccuccccuccuugcaccgagauuaauaaaaaaaaaaaaaaaaaaaaaaaaaaaaaaaaaaaaaaaaaaaaaaaaaaaaaaaaaaaaaaaaaaaaaaaaaaaaaaaaaaaaaaaaaaaaaaaaaaaa

SEQ ID NO: 34778 - RNA, 1662 nt, Artificial Sequence
  mRNA product Design i-3 (A100) comprising derived and/or modified sequence from LASV(Nig08-A19;Clade III)__ADU56618__GPCmut8 (opt4)
aggagaaagcuuaccaugggccagaucgugaccuucuuccaggaggugccccacgugaucgaggaggugaugaacaucgugcugaucgcccugagcauccuggccauccugaagggccuguacaacaucgccaccugcggccugaucggccuggugaccuuccugcugcugagcggcagaagcugcagcaugaccuacaagggcguguacgagcugcagacccuggagcugaacaugaacacccugaacaugugcaugccccugagcugcaccaagaacaacagccaccacuacaucauggugggcaacgagaccggccuggagcugacccugaccaacaccagccugcugcaccacaaguucugcaaccugagcgacgcccacaagaagaaccuguacgaccacacccugaugagcaucaucagcaccuuccaccugagcauccccaacuucaaccaguacgaggccaugagcugcgacuucaacggcggcaagaucaccgugcaguacaaccugagccacagcuacgccaucgacgccgccaaccacugcggcaccguggccaacggcgugcugcagaccuucaugagaauggccuggggcggcagcuacaucgcccuggacagcggcagaggcaagugggacugcaucaugaccagcuaccaguaccugaucauccagaacaccaccugggaggaccacugccaguucagcagacccagccccaucggcuaccugggccugcugagccagagaaccagagacaucuacaucagcagaagacugcugggcaccuucaccuggacccugagcgacagcgagggcaacgagacccccggcggcuacugccugaccagauggaugcugaucgaggccgagcugaagugcuucggcaacaccgccguggccaagugcaacgagaagcacgacgaggaguucugcgacaugcugagacuguucgacuucugcaagcaggccaucagaagacugaaggcccccgcccagaugagcauccagcugaucaacaaggccgugaacgcccugaucaacgaccagcugaucaugaagaaccaccugagagacaucaugggcauccccuacugcaacuacagcaaguacugcuaccugaaccacaccagcaccggcagaaccagccugcccagaugcugccuggugagcaacggcagcuaccugaacgagacccacuucagcgacgacaucgagcagcaggccgacaacaugaucaccgagaugcugcagaaggaguaccuggacagacagggcaagaccccccugggccugguggaccuguucguguucagcaccagcuucuaccugaucagcaucuuccugcaccuggugaagauccccacccacagacacaucgugggcaagcccugccccaagccccacagacugaaccacaugggcaucugcagcugcggccuguacaagcagcccggcgugcccgugagauggaagagaugaggacuaguuauaagacugacuagcccgaugggccucccaacgggcccuccuccccuccuugcaccgagauuaauaaaaaaaaaaaaaaaaaaaaaaaaaaaaaaaaaaaaaaaaaaaaaaaaaaaaaaaaaaaaaaaaaaaaaaaaaaaaaaaaaaaaaaaaaaaaaaaaaaaa

SEQ ID NO: 34779 - RNA, 1665 nt, Artificial Sequence
  mRNA product Design i-3 (A100) comprising derived and/or modified sequence from LASV(G1180-SLE-2010;Clade IV)__AIT17168__GPCmut8 (opt4)
aggagaaagcuuaccaugggccagaucgugaccuucuuccaggaggugccccacgugaucgaggaggugaugaacaucgugcugaucgcccugagcauccuggccgugcugaagggccuguacaacuucgccaccugcggccuggugggccugcugaccuuccugcugcugugcggcagaagcugcaccgccagcagauacaagggcguguacgagcugcagacccuggagcugaacauggagacccugaacaugugcaugccccugagcugcaccaagaacaacagccaccacuacaucauggugggcaacgagaccggccuggagcugacccugaccaacaccagcaucaucaaccacaaguucugcaaccugagcgacgcccacaagaagaaccuguacgaccacgcccugaugagcaucaucagcaccuuccaccugagcauccccaacuucaaccaguacgaggccaugagcugcgacuucaacggcggcaagaucagcgugcaguacaaccugagccacagcuacgccggcgacgccgccaaccacugcggcaccguggccaacggcgugcugcagaccuucaugagaauggccuggggcggcagcuacaucgcccuggacagcggccacggcagcugggacugcaucaugaccagcuaccaguaccugaucauccagaacaccaccugggaggaccacugccaguucagcagacccagccccaucggcuaccugggccugcugagccagagaaccagagacaucuacaucagcagaagacugcugggcaccuucaccuggacccugagcgacagcgagggcaaggacacccccggcggcuacugccugaccagauggaugcugaucgaggccgagcugaagugcuucggcaacaccgccguggccaagugcaacgagaagcacgacgaggaguucugcgacaugcugagacuguucgacuucugcaagcaggccauccagagacugaaggcccccgcccagaugagcauccagcugaucaacaaggccgugaacgcccugaucaacgaccagcugaucaugaagaaccaccugagagacaucaugggcauccccuacugcaacuacagcaaguacugcuaccugaaccacaccaccaccggcaagaccagccugcccaagugcugccuggugagcaacggcagcuaccugaacgagacccacuucagcgacgacaucgagcagcaggccgacaacaugaucaccgagaugcugcagaaggaguacauggagagacagggcaagaccccccugggccugguggaccuguucguguucagcaccagcuucuaccugaucagcaucuuccugcaccuggugaagauccccacccacagacacaucgugggcaagagcugccccaagccccacagacugaaccacaugggcaucugcagcugcggccuguacaagcagcccggcgugcccgugaaguggaagagaugaggacuaguuauaagacugacuagcccgaugggccucccaacgggcccuccuccccuccuugcaccgagauuaauaaaaaaaaaaaaaaaaaaaaaaaaaaaaaaaaaaaaaaaaaaaaaaaaaaaaaaaaaaaaaaaaaaaaaaaaaaaaaaaaaaaaaaaaaaaaaaaaaaaa

SEQ ID NO: 34780 - RNA, 1665 nt, Artificial Sequence
  mRNA product Design i-3 (A100) comprising derived and/or modified sequence from LASV(G1442-SLE-2011;Clade IV)__AIT17180__GPCmut8 (opt4)
aggagaaagcuuaccaugggccagaucgugaccuucuuccaggaggugccccacgugaucgaggaggugaugaacaucgugcugaucgcccugagcauccuggccgugcugaagggccuguacaacguggccaccugcggccugaucggccuggugaccuuccugcugcugugcggcagaagcugcaccaccacccuguacaagggcguguacgagcugcagacccuggagcugaacauggagacccugaacaugugcaugccccugagcugcaccaagaacaacagccaccacuacaucagagugggcaacgagaccggccuggagcugacccugaccaacaccagcaucaucaaccacaaguucugcaaccugagcgacgcccacaagaagaaccuguacgaccacgcccugaugagcaucaucagcaccuuccaccugagcauccccaacuucaaccaguacgaggccaugagcugcgacuucaacggcggcaagaucagcgugcaguacaaccugagccacagcuacgccggcgacgccgccaaccacugcggcaccguggccaacggcgugcugcagaccuucaugagaauggccuggggcggcagcuacaucgcccuggacagcggcagaggcaacugggacugcaucaugaccagcuaccaguaccugaucauccagaacaccaccugggacgaccacugccaguucagcagacccagccccaucggcuaccugggccugcugagccagagaaccagagacguguacaucagcagaagacugcugggcaccuucaccuggacccugagcgacagcgagggcaaggacacccccggcggcuacugccugaccagauggaugcugaucgaggccgagcugaagugcuucggcaacaccgccguggccaagugcaacgagaagcacgacgaggaguucugcgacaugcugagacuguucgacuucugcaagcaggccauccagagacugaaggcccccgcccagaugagcauccagcugaucaacaaggccgugaacgcccugaucaacgaccagcugaucaugaagaaccaccugagagacaucaugggcauccccuacugcaacuacagcaaguacugcuaccugaacaacaccgccaccggcaagaccagccugcccaagugcugccugaucagcaacggcagcuaccugaacgagacccacuucagcgacgacaucgagcaggaggccgacaacaugaucaccgagaugcugcagaaggaguacauggagagacagggcaagaccccccugggccugguggaccuguucguguucagcaccagcuucuaccugaucagcaucuuccugcaccuggugaagauccccacccacagacacaucgugggcaagagcugccccaagccccacagacugaaccacaugggcaucugcagcugcggccuguacaagcagcccggcgugcccgugagauggaagagaugaggacuaguuauaagacugacuagcccgaugggccucccaacgggcccuccuccccuccuugcaccgagauuaauaaaaaaaaaaaaaaaaaaaaaaaaaaaaaaaaaaaaaaaaaaaaaaaaaaaaaaaaaaaaaaaaaaaaaaaaaaaaaaaaaaaaaaaaaaaaaaaaaaaa

SEQ ID NO: 34781 - RNA, 1665 nt, Artificial Sequence
  mRNA product Design i-3 (A100) comprising derived and/or modified sequence from LASV(G3010-SLE-2013;Clade IV)__AIT17344__GPCmut8 (opt4)
aggagaaagcuuaccaugggccagaucgugaccuucuuccaggaggugccccacgugaucgaggaggugaugaacaucgugcugaucgcccugagcauccuggccgugcugaagggccuguacaacuucgccaccugcggccuggugggccuggugaccuuccugcugcugugcggcagaagcugcaccaccagccuguacaagggcguguacgagcugcagacccuggagcugaacauggagacccugaacaugugcaugccccugagcugcaccaagaacaacagccaccacuacaucauggugggcaacgagaccggccuggagcugacccugaccaacaccagcaucaucaaccacaaguucugcaaccugagcgacgcccacaagaagaaccuguacaaccacgcccugaugagcaucaucagcaccuuccaccugagcauccccaacuucaaccaguacgaggccaugagcugcgacuucaacggcggcaagaucagcgugcaguacaaccugagccacagcuacgccggcgacgccgccagccacugcggcaccguggccaacggcgugcugcagaccuucaugagaauggccuggggcggcagcuacaucgcccuggacagcggcuacggcaagugggacugcaucaugaccagcuaccaguaccugaucauccagaacaccaccugggaggaccacugccaguucagcagacccagccccaucggcuaccugggccugcugagccagagaaccagagacaucuacaucagcagaagacugcugggcaccuucaccuggacccugagcgacagcgagggcaaggacacccccggcggcuacugccugaccagauggaugcugaucgaggccgagcugaagugcuucggcaacaccgccguggccaagugcaacgagaagcacgacgaggaguucugcgacaugcugagacuguucgacuucugcaagcaggccauccagagacugaagacccccgcccagaugagcauccagcugaucaacaaggccgugaacgcccugaucaacgaccagcugaucaugaagaaccaccugagagacaucaugggcauccccuacugcaacuacagcaaguacugcuaccugaaccacaccaccaccggcaagaccagccugcccaagugcugccuggugagcaacggcagcuaccugaacgagacccacuucagcgacgacaucgagcagcaggccgacaacaugaucaccgagaugcugcagaaggaguacauggagagacagggcaagaccccccugggccugguggaccuguucguguucagcaccagcuucuaccugaucagcaucuuccugcaccuggugaagauccccacccacagacacaucgugggcaagagcugccccaagccccacagacugaaccacaugggcaucugcagcugcggccuguacaagcagcccggcgugcccgugagauggaagagaugaggacuaguuauaagacugacuagcccgaugggccucccaacgggcccuccuccccuccuugcaccgagauuaauaaaaaaaaaaaaaaaaaaaaaaaaaaaaaaaaaaaaaaaaaaaaaaaaaaaaaaaaaaaaaaaaaaaaaaaaaaaaaaaaaaaaaaaaaaaaaaaaaaaa

SEQ ID NO: 34782 - RNA, 1665 nt, Artificial Sequence
  mRNA product Design i-3 (A100) comprising derived and/or modified sequence from LASV(G502-SLE-2009;Clade IV)__AIT17126__GPCmut8 (opt4)
aggagaaagcuuaccaugggccagaucgugaccuucuuccaggaggugccccacgugaucgaggaggugaugaacaucgugcugaucgcccugagcauccuggccgugcugaagggccuguacaacuucgccaccugcggccuggugggccugcugaccuuccugcugcugugcggcagaagcugcaccaccggccuguacaagggcguguacgagcugcagacccuggagcugaacauggagacccugaacaugugcaugccccugagcugcaccaagaacaacagccaccacuacaucauggugggcaacgagaccggccuggagcugacccugaccaacaccagcaucaucaaccacaaguucugcaaccugagcgacgcccacaagaagaaccuguacgaccacgcccugaugagcaucaucagcaccuuccaccugagcauccccaacuucaaccaguacgaggccaugagcugcgacuucaacggcggcaagaucagcgugcaguacaaccugagccacagcuacgccggcgacgccgccgaccacugcggcaccguggccaacggcgugcugcagaccuucaugagaauggccuggggcggcagcuacaucgcccuggacagcggcagaggcagaugggacugcaucaugaccagcuaccaguaccugaucauccagaacaccaccugggaggaccacugccaguucagcagacccagccccaucggcuaccugggccugcugagccagagaaccagagacaucuacaucagcagaagacugcugggcaccuucaccuggacccugagcgacagcgagggcaaggacacccccggcggcuacugccugaccagauggaugcugaucgaggccgagcugaagugcuucggcaacaccgccguggccaagugcaacgagaagcacgacgaggaguucugcgacaugcugagacuguucgacuucugcaagcaggccauccagagacugaaggcccccgcccagaugagcauccagcugaucaacaaggccgugaacgcccugaucaacgaccagcuggugaugaagaaccaccugagagacaucaugggcauccccuacugcaacuacagcagauacugcuaccugaaccacaccaccaccggcagaaccagccugcccaagugcugccuggugagcaacggcagcuaccugaacgagacccacuucagcgacgacaucgagcagcaggccgacaacaugaucaccgagaugcugcagaaggaguacauggagagacagggcaagaccccccugggccugguggaccuguucguguucagcaccagcuucuaccugaucagcaucuuccugcaccuggugaagauccccacccacagacacaucgugggcaagagcugccccaagccccacagacugaaccacaugggcaucugcagcugcggccuguacaagcagcccggcgugcccgugaaguggaagagaugaggacuaguuauaagacugacuagcccgaugggccucccaacgggcccuccuccccuccuugcaccgagauuaauaaaaaaaaaaaaaaaaaaaaaaaaaaaaaaaaaaaaaaaaaaaaaaaaaaaaaaaaaaaaaaaaaaaaaaaaaaaaaaaaaaaaaaaaaaaaaaaaaaaa

SEQ ID NO: 34783 - RNA, 1665 nt, Artificial Sequence
  mRNA product Design i-3 (A100) comprising derived and/or modified sequence from LASV(G733-SLE-2010;Clade IV)__AIT17154__GPCmut8 (opt4)
aggagaaagcuuaccaugggccagaucgugaccuucuuccaggaggugccccacgugaucgaggaggugaugaacaucgugcugaucgcccugagcauccuggccgugcugaagggccuguacaacuucgccaccugcggcaucgugggccuggugagcuuccugcugcugugcggcagaagcugcaccaccagccuguacaagggcguguacgagcugcagacccuggagcugaacauggagacccugaacaugugcaugccccugagcugcaccaagaacaacagccaccacuacaucauggugggcaacgagaccggccuggagcugacccugaccaacaccagcaucaucaaccacaaguucugcaaccugagcgacgcccacaagaagaaccuguacgaccacgcccugaugagcaucaucagcaccuuccaccugagcauccccaacuucaaccaguacgaggccaugagcugcgacuucaacggcggcaagaucagcgugcaguacaaccugagccacagcuacgccggcgacgccgccaaccacugcggcaccaucgccaacggcgugcugcagaccuucaugagaauggccuggggcggcagcuacaucgcccuggacagcggcagagacagaugggacugcaucaugaccagcuaccaguaccugaucauccagaacaccaccugggaggaccacugccaguucagcagacccagccccaucggcuaccugggccugcugagccagagaaccagagacaucuacaucagcagaagacugcugggcaccuucaccuggacccugagcgacagcgagggcaaggacacccccggcggcuacugccugaccagauggaugcugaucgaggccgagcugaagugcuucggcaacaccgccguggccaagugcaacgagaagcacgacgaggaguucugcgacaugcugagacuguucgacuucugcaagcaggccauccagagacugaaggcccccgcccagaugagcauccagcugaucaacaaggccgugaacgcccugaucaacgaccagcugaucaugaagaaccaccugagagacaucaugggcauccccuacugcaacuacagcaaguacugcuaccugaaccacaccaccaccggcaagaccagccugcccaagugcugccuggugagcaacggcagcuaccugaacgagacccacuucagcgacgacaucgagcagcaggccgacaacaugaucaccgagaugcugcagaaggaguacauggagagacagggcaagaccccccugggccugguggaccuguucguguucagcaccagcuucuaccugaucagcaucuuccugcaccuggugaagauccccacccacagacacguggugggcaagagcugccccaagccccacagacugaaccacaugggcaucugcagcugcggccuguacggccagcccggcgugcccgugaaguggaagagaugaggacuaguuauaagacugacuagcccgaugggccucccaacgggcccuccuccccuccuugcaccgagauuaauaaaaaaaaaaaaaaaaaaaaaaaaaaaaaaaaaaaaaaaaaaaaaaaaaaaaaaaaaaaaaaaaaaaaaaaaaaaaaaaaaaaaaaaaaaaaaaaaaaaa

SEQ ID NO: 34784 - RNA, 1665 nt, Artificial Sequence
  mRNA product Design i-3 (A100) comprising derived and/or modified sequence from MOPV/LASV reassortant(IGS-1;Clade IV)__AFY05576__GPCmut8 (opt4)
aggagaaagcuuaccaugggccagaucgugaccuucuuccaggaggugccccacgugaucgaggaggugaugaacaucgugcugaucgcccugagcgugcuggccgugcugaagggccuguacaacuucgccaccugcggccuggugggccuggugaccuuccugcugcugugcggcagaagcugcaccaccagccuguacaagggcguguacgagcugcagacccuggagcugaacauggagacccugaacaugugcaugccccugagcugcaccaagaacaacagccaccacuacaucauggugggcaacgagaccggccuggagcugacccugaccaacaccagcaucaucaaccacaaguucugcaaccugagcgacgcccacaagaagaaccuguacgaccacgcccugaugagcaucaucagcaccuuccaccugagcauccccaacuucaaccaguacgaggccaugagcugcgacuucaacggcggcaagaucagcgugcaguacaaccugagccacagcuacgccggcgacgccgccaaccacugcggcaccguggccaacggcgugcugcagaccuucaugagaauggccuggggcggcagcuacaucgcccuggacagcggcagaggcaacugggacugcaucaugaccagcuaccaguaccugaucauccagaacaccaccugggaggaccacugccaguucagcagacccagccccaucggcuaccugggccugcugagccagagaaccagagacaucuacaucagcagaagacugcugggcaccuucaccuggacccugagcgacagcgagggcgaggacacccccggcggcuacugccugaccagauggaugcugaucgaggccgagcugaagugcuucggcaacaccgccguggccaagugcaacgagaagcacgacgaggaguucugcgacaugcugagacuguucgacuucugcaagcaggccauccagagacugaaggcccccgcccagaugagcauccagcugaucaacaaggccgugaacgcccugaucaacgaccagcugaucaugaagaaccaccugagagacaucaugggcauccccuacugcaacuacagcaaguacugcuaccugaaccacaccaccaccggcagaaccagccugcccaagugcugccuggugagcaacggcagcuaccugaacgagacccacuucagcgacgacaucgagcagcaggccgacaacaugaucaccgagaugcugcagaaggaguacauggagagacagggcaagaccccccugggccugguggaccuguucguguucagcaccagcuucuaccugaucagcaucuuccugcaccuggugaagauccccacccacagacacaucgugggcaagagcugccccaagccccacagacugaaccacaugggcaucugcagcugcggccuguacaagcagcccggcgugcccgugaaguggaagagaugaggacuaguuauaagacugacuagcccgaugggccucccaacgggcccuccuccccuccuugcaccgagauuaauaaaaaaaaaaaaaaaaaaaaaaaaaaaaaaaaaaaaaaaaaaaaaaaaaaaaaaaaaaaaaaaaaaaaaaaaaaaaaaaaaaaaaaaaaaaaaaaaaaaa

SEQ ID NO: 34785 - RNA, 1665 nt, Artificial Sequence
  mRNA product Design i-3 (A100) comprising derived and/or modified sequence from LASV(LM765-SLE-2012;Clade IV)__AIT17814__GPCmut8 (opt4)
aggagaaagcuuaccaugggccagaucgugaccuucuuccaggaggugccccacgugaucgaggaggugaugaacaucgugcugaucgcccugagcauccuggccgugcugaagggccuguacaacuucgccaccugcggccuggugggccuggugaccuuccugcugcugugcggcagaagcugcaccaccagccuguacaagggcguguacgagcugcagacccuggagcugaacauggagacccugaacaugugcaugccccugagcugcaccaagaacaacagccaccacuacaucauggugggcaacgagaccggccuggagcugacccugaccaacaccagcaucaucgaccacaaguucugcaaccugagcgacgcccacagaaagaaccuguacgaccacgcccugaugagcaucaucagcaccuuccaccugagcauccccaacuucaaccaguacgaggccaugagcugcgacuucaacggcggcaagaucagcgugcaguacaaccugagccacagcuacgccaaggacgccgccgaccacugcggcaccguggccaacggcgugcugcagaccuucaugagaauggccuggggcggcagcuacaucgcccuggacagcggcagaggcagaugggacugcaucaugaccagcuaccaguaccugaucauccagaacaccaccugggaggaccacugccaguucagcagacccagccccaucggcuaccugggccugcugagccagagaaccagagacaucuacaucagcagaagacugcugggcaccuucaccuggacccugagcgacagcgagggcaaggacacccccggcggcuacugccugaccagauggaugcugaucgaggccgagcugaagugcuucggcaacaccgccguggccaagugcaacgagaagcacgacgaggaguucugcgacaugcugagacuguucgacuucugcaagcaggccauccagagacugaaggcccccgcccagaugagcauccagcugaucaacaaggccgugaacgcccugaucaacgaccagcugaucaugaagaaccaccugagagacaucaugggcauccccuacugcaacuacagcaaguacugcuaccugaaccacaccaccaccggcaagaccagccugcccaagugcugccuggugagcaacggcagcuaccugaacgagacccacuucagcgacgacaucgagcagcaggccgacaacaugaucaccgagaugcugcagaaggaguacauggagagacagggcaagaccccccugggccugguggaccuguucguguucagcaccagcuucuaccugaucagcaucuuccugcaccuggugaagauccccacccacagacacaucgugggcaagcccugccccaagccccacagacugaaccacaugggcaucugcagcugcggccuguacaagcagcccggcgugcccgugaaguggaagagaugaggacuaguuauaagacugacuagcccgaugggccucccaacgggcccuccuccccuccuugcaccgagauuaauaaaaaaaaaaaaaaaaaaaaaaaaaaaaaaaaaaaaaaaaaaaaaaaaaaaaaaaaaaaaaaaaaaaaaaaaaaaaaaaaaaaaaaaaaaaaaaaaaaaa

SEQ ID NO: 34786 - RNA, 1665 nt, Artificial Sequence
  mRNA product Design i-3 (A100) comprising derived and/or modified sequence from LASV(LM776-SLE-2012;Clade IV)__AIT17824__GPCmut8 (opt4)
aggagaaagcuuaccaugggccagaucgugaccuucuuccaggaggugccccacgugaucgaggaggugaugaacaucgugcugaucgcccugagcauccuggccgugcugaagggccuguacaacuucgccaccugcggccuggugggccuggugaccuuccugcugcugugcggcagaagcugcaccaccagcguguacaagggcguguacgagcugcagacccuggagcugaacauggagacccugaacaugugcaugccccugagcugcaccaagaacaacagccaccacuacaucauggugggcaacgagaccggccuggagcugacccugaccaacaccagcaucaucaaccacaaguucugcaaccugagcgacgcccacaagaagaaccuguacgaccacgcccugaugagcaucaucagcaccuuccaccugagcauccccaacuucaaccaguacgaggccaugagcugcgacuucaacggcggcaagaucagcgugcaguacaaccugagccacagcuacgccggcgacgccgccaaccacugcggcaccguggccaacggcgugcugcagaccuucaugagaauggccuggggcggcagcuacaucgcccuggacagcggccacggcaagugggacugcaucaugaccagcuaccaguaccugaucauccagaacaccaccugggaggaccacugccaguucagcagacccagccccaucggcuaccugggccugcugagccagagaaccagagacaucuacaucagcagaagacugcugggcaccuucaccuggacccugagcgacagcgagggcaaggacacccccggcggcuacugccugaccagauggaugcugaucgaggccgagcugaagugcuucggcaacaccgccguggccaagugcaacgagaagcacgacgaggaguucugcgacaugcugagacuguucgacuucugcaagcaggccauccagagacugaaggcccccgcccagaugagcauccagcugaucaacaaggccgugaacgcccugaucaacgaccagcugaucaugaagaaccaccugagagacaucaugggcauccccuacugcaacuacagcaaguacugcuaccugaaccacaccaccaccggcaagaccagccugcccaagugcugccuggugagcaacggcagcuaccugaacgagacccacuucagcgacgacaucgagcagcaggccgacaacaugaucaccgagaugcugcagaaggaguacauggagagacagggcaagaccccccugggccugguggaccuguucguguucagcaccagcuucuaccugaucagcaucuuccugcaccuggugaagauccccacccacagacacaucgugggcaagagcugccccaagccccacagacugaaccacaugggcaucugcagcugcggccuguacaagcagcccggcgugcccgugagauggaagagaugaggacuaguuauaagacugacuagcccgaugggccucccaacgggcccuccuccccuccuugcaccgagauuaauaaaaaaaaaaaaaaaaaaaaaaaaaaaaaaaaaaaaaaaaaaaaaaaaaaaaaaaaaaaaaaaaaaaaaaaaaaaaaaaaaaaaaaaaaaaaaaaaaaaa

SEQ ID NO: 34787 - RNA, 1665 nt, Artificial Sequence
  mRNA product Design i-3 (A100) comprising derived and/or modified sequence from LASV(Mad39;Clade IV)__ANH09722__GPCmut8 (opt4)
aggagaaagcuuaccaugggccagaucgugaccuucuuccaggaggugccccacgugaucgaggaggugaugaacaucgugcugaucgcccugagcauccuggccgugcugaagggccuguacaacguggccaccugcggccugaucggccuggugaccuuccugcugcugugcggcagaagcugcaccaccacccuguacaagggcguguacgagcugcaggcccuggagcugaacauggagacccugaacaugugcaugccccugagcugcaccaagaacaacagccaccacuacaucagagugggcaacgagaccggccuggagcugacccugaccaacaccagccugaucaaccacaaguucugcaaccugagcgacgcccacaagaagaaccuguacgaccacgcccugaugagcaucaucagcaccuuccaccugagcauccccaacuucaaccaguacgaggccaugagcugcgacuucaacgacggcaagaucagcgugcaguacaaccugagccacaccuacgccggcgacaccgccaaccacugcggcaccguggccaacggcgugcugcagaccuucaugagaauggccuggggcggcagcuacaucgcccuggacagcggcagaggcggcugggacugcaucaugaccagcuaccaguaccugaucauccagaacaccaccugggaggaccacugccaguucagcagacccagccccaucggcuaccugggccugcugagccagagaaccagagacaucuacaucagcagaagacugcugggcaccuucaccuggacccugagcgacagcgagggcaaggacacccccggcggcuacugccugaccagauggaugcugaucgaggccgagcugaagugcuucggcaacaccgccguggccaagugcaacgagaagcacgacgaggaguucugcgacaugcugagacuguucgacuucugcaagcaggccauccagagacugaaggcccccgcccagaugagcauccagcugaucaacaaggccgugaacgcccugaucaacgaccagcugaucaugaagaaccaccugagagacaucaugggcauccccuacugcaacuacagcaaguacugcuaccugaaccacaccgugaccggcaagaccagccugcccaagugcugccuggugagcaacggcagcuaccugaacgagacccacuucagcgacgacaucgagcagcaggccgacaacaugaucaccgagaugcugcagaaggaguacauggagagacagggcaagaccccccugggccugguggaccuguucguguucagcaccagcuucuaccugaucagcaucuuccugcaccuggugaagauccccacccacagacacguggugggcaagcccugccccaagccccacagacugaaccacaugggcaucugcagcugcggcuucuacaagcagcccggcgugcccgugagauggaagagaugaggacuaguuauaagacugacuagcccgaugggccucccaacgggcccuccuccccuccuugcaccgagauuaauaaaaaaaaaaaaaaaaaaaaaaaaaaaaaaaaaaaaaaaaaaaaaaaaaaaaaaaaaaaaaaaaaaaaaaaaaaaaaaaaaaaaaaaaaaaaaaaaaaaa

SEQ ID NO: 34788 - RNA, 1665 nt, Artificial Sequence
  mRNA product Design i-3 (A100) comprising derived and/or modified sequence from LASV(Z0947-SLE-2011;Clade IV)__AIT17840__GPCmut8 (opt4)
aggagaaagcuuaccaugggccagaucgugaccuucuuccaggaggugccccacgugaucgaggaggugaugaacaucgugcugaucgcccugagcauccuggccgugcugaagggccuguacaacuucgccaccugcggccuggugggccuggugaccuuccugcugcugugcggcagaagcugcaccaucagccuguacaagggcguguacgagcugcagacccuggagcugaacauggagacccugaacaugugcaugccccugagcugcaccaagaacaacagccaccacuacaucauggugggcaacgagaccggccuggagcugacccugaccaacaccagcaucaucaaccacaaguucugcaaccugagcgacgcccacaagaagaaccuguacgaccacgcccugaugagcaucaucagcaccuuccaccugagcauccccaacuucaaccaguacgaggccaugagcugcgacuucaacggcggcaagaucagcgugcaguacaaccugagccacagcuacgccggcgacgccgccaaccacugcggcaccguggccaacggcgugcugcagaccuucaugagaauggccuggggcggcagcuacaucgcccuggacagcggcagagacagaugggacugcaucaugaccagcuaccaguaccugaucauccagaacaccaccugggaggaccacugccaguucagcagacccagccccaucggcuaccugggccugcugagccagagaaccagagacaucuacaucagcagaagacugcugggcaccuucaccuggacccugagcgacagcgagggcaaggacacccccggcggcuacugccugaccagauggaugcugaucgaggccgagcugaagugcuucggcaacaccgccguggccaagugcaacgagaagcacgacgaggaguucugcgacaugcugagacuguucgacuucugcaagcaggccauccagagacugaaggcccccgcccagaugagcauccagcugaucaacaaggccgugaacgcccugaucaacgaccagcugaucaugaagaaccaccugagagacaucaugggcauccccuacugcaacuacagcaaguacugcuaccugaaccacaccaccaccggcaagaccagccugcccaagugcugccuggugagcaacggcagcuaccugaacgagacccacuucagcgacgacaucgagcagcaggccgacaacaugaucaccgagaugcugcagaaggaguacauggagagacagggcaagaccccccugggccugguggaccuguucguguucagcaccagcuucuaccugaucagcaucuuccugcaccuggugaagauccccacccacagacacaucgugggcaagcccugccccaagccccacagacugaaccacaugggcaucugcagcugcggccuguacaagcagcccggcgugcccgugaaguggaagagaugaggacuaguuauaagacugacuagcccgaugggccucccaacgggcccuccuccccuccuugcaccgagauuaauaaaaaaaaaaaaaaaaaaaaaaaaaaaaaaaaaaaaaaaaaaaaaaaaaaaaaaaaaaaaaaaaaaaaaaaaaaaaaaaaaaaaaaaaaaaaaaaaaaaa

SEQ ID NO: 34789 - RNA, 1665 nt, Artificial Sequence
  mRNA product Design i-3 (A100) comprising derived and/or modified sequence from LASV(Josiah;Clade IV)__NP_694870__GPCmut8 (opt5)
aggagaaagcuuaccaugggccagaucgugaccuucuuucaagaggucccccacguuauugaagaggugaugaacaucgugcugauugcccucagcguccuggcugugcuuaaggggcuguacaauuucgccacaugcggacucguuggccuggugacguuucuucugcucugugggagauccugcaccacaucucuguauaaaggagucuacgaacugcagacccucgagcugaacauggaaacacuuaauauguguaugccucugagcugcaccaagaacaauucccaucacuauaucauggugggcaacgagacagggcucgagcugacccuuacgaauaccucuauuaucaaccauaaauucuguaaucugagcgacgcgcacaagaaaaaccucuacgaucaugcucugauguccaucauuucuacauuucaccugagcaucccgaauuucaaccaguaugaagccauguccugcgacuuuaauggaggcaagauuagcguucaguacaaccucucucacuccuaugccggcgaugcugccaaucauugugggaccguggcuaacggaguccugcaaacauucaugcggauggccuggggcgggagcuacaucgcgcuugacucuggacgcggcaacugggauugcauuaugaccuccuaccaguaucugaucauucagaauacgacaugggaggaccacugucaguuuagcagacccucuccuaucggguaccucggacugcuuucccaacggacccgcgauaucuauauuagcagacggcugcucggcacauucaccuggacccuguccgacucugaaggcaaggauacacccgggggauacugccugacgcgcuggaugcucaucgaggccgagcugaaauguuuuggcaacaccgcuguggccaagugcaaugaaaaacaugacgaggaguucugcgauaugcuuagacuguuugacuucuguaagcaggcuauucagcggcucaaagccccugcgcagaugagcauccaacugauuaacaaggccgugaaugcucuuaucaacgaucagcugaucaugaagaaucaccuccgcgacauuauggggauccccuauugcaacuacuccaaauauuguuaccugaaucacacaaccacaggaagaaccagccugccuaagugcugucucgucucuaacggcuccuaccugaaugaaacgcauuucagcgacgauauugaacagcaagccgacaacaugaucacagagaugcuucagaaagaguauauggaacggcaggggaagaccccgcugggacucguugaucuguuuguguucucuaccagcuuuuaccugauuuccaucuuccuucaccucgugaaaauccccacacaucgccacauugucggcaagucuugcccuaaaccccauagacugaaucacaugggcaucuguagcugcgggcuguauaagcagccuggagugcccguuaaguggaaacggugaggacuaguuauaagacugacuagcccgaugggccucccaacgggcccuccuccccuccuugcaccgagauuaauaaaaaaaaaaaaaaaaaaaaaaaaaaaaaaaaaaaaaaaaaaaaaaaaaaaaaaaaaaaaaaaaaaaaaaaaaaaaaaaaaaaaaaaaaaaaaaaaaaaa

SEQ ID NO: 34790 - RNA, 1662 nt, Artificial Sequence
  mRNA product Design i-3 (A100) comprising derived and/or modified sequence from LASV(LP;Clade I)__AAF86701__GPCmut8 (opt5)
aggagaaagcuuaccaugggccagaucauuaccuucuuucaagaggugccccacgucaucgaagagguuaugaacauugugcugaucgcccucagccugcuugcuauucugaaggggcucuacaauaucgccacaugcggaaucauuggccugguggcguuccuuuuucugugugggaaauccugcucucucacgcugaagggaggcuaugaacugcagacccucgagcugaacauggaaacacuuaauauguguaugccucugagcugcaccaaaaacuccucucaucacuacaucagagucgggaaugagacaggacucgagcugacccuuacaaacaccagcauuaucaaucauaaguucuguaaccuguccgacgcucacaaaaagaaucucuaugaucaugcccugaugucuauuaucagcacguuucaccuguccauuccgaacuucaaucaguacgaagccaugagcugcgacuuuaacggcggcaagaucucugugcaguauaaucucucccacagcuacgcuggggaugccgcugagcauuguggaaccguugccaacggcgugcugcaaacauucaugcggauggcguggggagggcgcuauaucgcccuugacucuggcaaagggaauugggauugcauuaugaccuccuaccaguaccugaucauucagaacacaaccugggaagaccacugucaguuuagcagacccucuccuaucggauaucucggccugcuuucccaacggacgcgcgauauuuacaucagcagacggcugcucggcacauucaccuggacacuguccgacucugaggggaacgagacccccggaggcuauugccugacccgcuggaugcucaucgaagcugagcugaaguguuuugggaauacagccgucgcuaaaugcaacgaaaagcaugaugaggaguucugcgacaugcuuagacuguuugauuucuguaaacaggccauucggcgccucaaggcgccugcccagaugagcauccagcugauuaauaaggcugugaacgcccuuaucaaugaccaacugauuaugaaaaaccaccucagagauaucaugggaauccccuacugcaauuauuccaaguacuguuaucugaaccacacgagcucuggccggaccucccugccuaaaugcugucucauuagcaaugggucuuaccugaacgaaacacaguucagcgacgacaucgagcagcaagcugauaauaugauuaccgaaaugcuucagaaggaguacaucgaacgccagggaaaaacaccgcugggccucguugacauuuuuaucuucuccaccucuuuuuaucugauuagcaucuuccugcaucuuaucaagauucccacgcacagacauaucgugggcaaaccuugccccaagccucaccggcucaaccauaugggggucuguuccugcggacuguacaagcaccccggcgugccgacaaaauggaagcgcugaggacuaguuauaagacugacuagcccgaugggccucccaacgggcccuccuccccuccuugcaccgagauuaauaaaaaaaaaaaaaaaaaaaaaaaaaaaaaaaaaaaaaaaaaaaaaaaaaaaaaaaaaaaaaaaaaaaaaaaaaaaaaaaaaaaaaaaaaaaaaaaaaaaa

SEQ ID NO: 34791 - RNA, 1662 nt, Artificial Sequence
  mRNA product Design i-3 (A100) comprising derived and/or modified sequence from LASV(803213;Clade II)__AAF86703__GPCmut8 (opt5)
aggagaaagcuuaccaugggccagaucauuaccuucuuucaagaggugccccacgucaucgaagagguuaugaacauugugcugaucgcccucagccugcuugcuauucugaaggggaucuacaauguggccacaugcggacucuucggccugaucuccuuucuucugcucugugggagaucuugcagcgucacguauaaaggaguguacgaacugcagacccuggagcucaacauggcgaaucugaacauguguaugccucuuuccugcacaaagaauaacucucaucacuauauuaugguuggcaaugaaaccgggcuggagcucacacugaccaacacaagcaucauuaaucauaaauucuguaaccuuuccgacgcucacaagaaaaaucuguacgaucaugcccucaugucuaucauuagcaccuuucaccuguccaucccgaacuucaaucaguaugaggccaugagcugcgacuuuaacggaggcaagauuucugugcaguacaaucugucccacagcuucgcugucgaugccgcuaaccauuguggcacgaucgccaacggggugcuccaaaccuuuaugcggauggcguggggaggcucuuauaucgcccuggacuccgggaagggaaauugggauugcauuaugacaagcuaccaguaccuuaucauucagaacaccacaugggaagaccacugucaguucucucgccccuccccuaucggcuaucuggggcuccugagccaaagaacccgggauauuuacaucucccgcagacuucugggaacguuuacauggacccucucugacagcgagggcaaugaagcucccggcggguauugccugacacgguggaugcugaucgaggccgagcucaaauguuucggaaacaccgcuguugccaagugcaaugaaaaacaugaugaggaauuuugcgacaugcugcgccuuuucgauuucuguaagcaggcgauuaaaagacugaagaccccugcccagauguccauccagcucauuaacaaggcugugaaugcccugaucaacgaccaacuuauuaugaaaaaucaucugcgggauaucaugggcauccccuacugcaacuauagccgcuacuguuaucucaaucacacagucacggggaagaccucucugccuagaugcugucugguguccaacggaagcuaccucaaugagacacacuuuucugacgacauugaacagcaggcugauaacaugaucaccgagaugcugcaaaaagaguacauggaccggcagggcaagacaccgcuugggcugguggaucucuucgucuuuagcaccuccuucuaucugauuucuaucuuucugcaccuuguuaaaauucccacgcaucgccacaucgugggaaagccuugccccaaaccucauagacucaaucacaugggcauuuguagcugcggccuguacaagcaccccggggugccggucaaguggaaacggugaggacuaguuauaagacugacuagcccgaugggccucccaacgggcccuccuccccuccuugcaccgagauuaauaaaaaaaaaaaaaaaaaaaaaaaaaaaaaaaaaaaaaaaaaaaaaaaaaaaaaaaaaaaaaaaaaaaaaaaaaaaaaaaaaaaaaaaaaaaaaaaaaaaa

SEQ ID NO: 34792 - RNA, 1662 nt, Artificial Sequence
  mRNA product Design i-3 (A100) comprising derived and/or modified sequence from LASV(GA391;Clade III)__CAA36645__GPCmut8 (opt5)
aggagaaagcuuaccaugggccagaucgugaccuucuuucaagaggucccccacguuauugaagaggugaugaacaucgugcugauugcccucagcauccuggcuauucuuaaggggcuguacaaugucgccacaugcggacucaucggccuggugacguuccuucugcucuccgggagaucuuguagccugaucuauaaaggaaccuacgaacugcagacacucgagcugaacauggaaacccuuaauaugugcaugccucuguccuguacaaagaacaauucucaucacuauauucggguuggcaacgagaccgggcucgagcugacacuuaccaauacgagcauccugaaccauaaauuuugcaaucucuccgacgcgcacaagcgcaaccuguacgaucauucucugaugagcauuaucuccaccuuccaccucagcauuccgaauuuuaaccaguaugaagcuaugucuugugacuucaauggaggcaaaaucacagugcaguacaaccugucccacagcuuugccgucgaugccgcuggccauugcgggacccuugccaauggagugcugcaaacauucaugagaauggcuuggggcgggucuuauauugcccucgacuccggacggggcaacugggauuguaucaugaccagcuaccaguaccugaucauucagaacacgacaugggacgaucacugccaguuuucucgccccuccccuaucggguaucuuggacugcucagccaaagaacccgggacauuuacaucucccgcagacugcugggcacauucaccuggacccucucugauagcgagggcaaugaaacacccgggggauauugucugacgcgguggaugcuuauugaggcggagcugaagugcuuuggcaacaccgccguugcuaaguguaaugaaaaacaugacgaggaguucugcgauaugcuccgccuguuugacuucugcaagcaggccaucagacggcuuaaaaccccugcucagauguccauccagcugauuaacaaggccgugaaugcgcucaucaacgaucaacugauuaugaaaaaucaucugcgcgacaucauggggauucccuacuguaacuauagcagauacugcuaucucaaucacacaucuacaggaaagaccucccugccucgguguugccuuaucagcaacggcucuuaccugaaugaaacgaaguucagcgacgauaucgaacagcaggccgacaacaugauuacagagaugcuccaaaaagaguacaucgaucgccaggggaagaccccgcugggacuggucgaccuuuuuguguucuccaccucuuuuuaucucauuagcaucuuccugcaccuggugaaaauucccacacacagacauaucgucggcaagccuugucccaaaccucaccggcucaaucauaugggcauuugcuccugugggcuguacaagcagcccggaguuccggugagauggaaacgcugaggacuaguuauaagacugacuagcccgaugggccucccaacgggcccuccuccccuccuugcaccgagauuaauaaaaaaaaaaaaaaaaaaaaaaaaaaaaaaaaaaaaaaaaaaaaaaaaaaaaaaaaaaaaaaaaaaaaaaaaaaaaaaaaaaaaaaaaaaaaaaaaaaaa

SEQ ID NO: 34793 - RNA, 1665 nt, Artificial Sequence
  mRNA product Design i-3 (A100) comprising derived and/or modified sequence from LASV(AV;Clade V)__CCA30314__GPCmut8 (opt5)
aggagaaagcuuaccaugggccagaucgugaccuucuuucaagaggucccccacguuauugaagaggugaugaacaucgugcugauugcccucagcauccuggcuguccuuaaggggcuguacaauauugccacaugcggacucaucggccugaucacguuccuucugcucugugggagauccugcucuagcaaccuguauaaaggaguguacgaacugcagucccucgaccugaauauggagacccuuaacauguguaugccucugucuugcacaaagaauaacagccaucacuauauucggguuggcaaugauaccgggcucgaacugacacuuaccaacacauccauccugaaucauaaauuuuguaaccucucugacgcgcacaagaaagaucuguacgaccaugcucugaugagcauuaucuccaccuuccaccucagcauuccgaauuuuaaccaguaugaggccaugucuugcgauuucaauggaggcaagaucuccgugcaguacaaccugagccacucuuaugccauugacgcugccaaucauuguggcacggucgcuaacgggauccuucaaaccuuuaugcgcauggccuggggaggcuccuacaucgcgcuggauagcgggagaggaaacugggacugcauuaugacaucuuaccaguaucucaucauucagaauaccacaugggagaaccacugucaguucucccggcccagcccuaucggcuaccuggggcuucugucccaacgcaccagagauauuuauaucucucggcgccuccugggaacguuuacauggacccugagcgacuccgaaggcaaugccacacccggcggguacugccucaccagauggaugcugaucgaggcugaacuuaaguguuucggaaacaccgccguggcuaaaugcaaugagaagcaugaugaggaauuuugcgacaugcugcgccucuucgauuuuuguaaacaggccauuagccggcugaagucuccugcgcagauguccauccagcuuauuaacaaagccguuaaugcucugaucaacgaccaacucauuaugaagaaucaccugagagacaucaugggcauccccuauugcaacuacagcaaguauuguuaccugaaucacacaauuacggggaaaaccucucucccuaagugcugucuggugagcaacggauccuaccuuaaugagacacauuucucugaugacaucgaacagcaggccgauaacaugauuaccgagaugcugcaaaaagaauauauggagcggcagggcaagacaccgcucgggcuggucgaccuguucguguuuagcaccuccuucuaccuuaucagcauuuuucuccgccuggugaaaauccccacgcacagacauauugucggaaagccuugccccaaaccucaccggcugaaucauaugggcaucuguucuugcggccucuauaagcagcccgggguuccggugcgcuggaagagaugaggacuaguuauaagacugacuagcccgaugggccucccaacgggcccuccuccccuccuugcaccgagauuaauaaaaaaaaaaaaaaaaaaaaaaaaaaaaaaaaaaaaaaaaaaaaaaaaaaaaaaaaaaaaaaaaaaaaaaaaaaaaaaaaaaaaaaaaaaaaaaaaaaaa

SEQ ID NO: 34794 - RNA, 1662 nt, Artificial Sequence
  mRNA product Design i-3 (A100) comprising derived and/or modified sequence from LASV(Togo/2016/7082;Clade VI)__AMR44577__GPCmut8 (opt5)
aggagaaagcuuaccaugggccagaucauuaccuucuuucaagaggugccccacgucaucgaagagguuaugaacauugugcugaucgcccucagccugcuugcuauucugaaggggguguacaaugucgccacaugcggaaucaucggccucgugacguuccuguuucuuugugggagauccugcucucugauuuauaaaggaagcuacgaacuccagacccuggagcugaacauggaaacacucaauauguguaugccucuguccugcaccaagaacucuagccaucacuauauccggguuggcaaugagacagggcuugagcugacccucacaaacaccuccauuaucaaucauaaauucuguaaccugucugacgcgcacaagcgcaaucuuuacgaucaugcucugaugagcauucucuccacguuucaccugagcaucccgaacuucaaucaguaugaagccaugucuugcgacuuuaacggaggcaaaauuuccgugcaguacaaucugagccacgccuaugcugucgaugccgcugagcauuguggcaccguggccaacgggguucuccaaacauucaugagaauggcguggggaggcucuuacaucgcccuggacuccgggcggggaaauugggauugcaucaugaccagcuaccaguaucuuauuauccagaacacaaccugggaagaccacugucaguuuucucgccccuccccuauuggcuaccuggggcuccugagccaaagaacgcgggauaucuauauuucccgcagacuucugggaacauucaccuggacacucucugacagcgagggcaacgagacccccggcggguacugccugacccgguggaugcugaucgaagcugagcucaaguguuuuggaaauacagccguggcuaagugcaacgaaaaacaugaugaggaguucugcgacaugcugcgccuuuuugauuucuguaagcaggccauccagagacugaaauccccugcgcagaugagcauucaacucaucaauaaggccgucaacgcucugauuaaugaccagcuuaucaugaaaaaccaucugcgggauaugaugggcauucccuauugcaauuacucuaaguauuguuaccucaaccacacguccagcgggcgcaccucucugccuaagugcugucuggugagcaauggauccuaccucaacgaaacacacuucucugacgacaucgagcagcaagccgauaauaugaucaccgaaaugcugcagaaagaguauauugacagacagggcaagacaccgcuugggcugguggaucucuuugucuucagcaccuccuuuuaccugaucagcauuuuccugcaccuuaucaaaauucccacgcaucggcacaucguuggaaagccuugccccaaaccucaucgccucaaccacaugggcauuuguucuugcggccuguauaagcagcccggggugccgacaagauggaaacggugaggacuaguuauaagacugacuagcccgaugggccucccaacgggcccuccuccccuccuugcaccgagauuaauaaaaaaaaaaaaaaaaaaaaaaaaaaaaaaaaaaaaaaaaaaaaaaaaaaaaaaaaaaaaaaaaaaaaaaaaaaaaaaaaaaaaaaaaaaaaaaaaaaaa

SEQ ID NO: 34795 - RNA, 1662 nt, Artificial Sequence
  mRNA product Design i-3 (A100) comprising derived and/or modified sequence from LASV(KAK-428;Clade n.d. (VII))__ANH09740__GPCmut8 (opt5)
aggagaaagcuuaccaugggccagaucgugaccuucuuucaagaggucccccacguuauugaagaggugaugaacaucgugcugauugcccucagccugcuugcuauccugaaggggcucuacaauuucgccacaugcggagucauuggccugaucacguuucuucugcucugugggagauccugcucugcgaccuauaaaggacaguacgaacugcagacacuggagcucaacauggaaagccugaauauguguaugccucuuuccugcaccaagaacaauucucaucacuauauccgggcuggcaacaauacagggcuggagcucacccugacaaacaccagcauuaucucccauaaauucuguaaucuuucugacgcccacaagaaaaaccuguacgaucauacgcucaugagcauuaucaccacauuucaccuguccauuccgaauuucaaccaguaugaggccaugagcugcgacuuuaauggaggcaagaucucuauucaauacaaccugucccacagcuaugcuggcgaugccgcucagcauugugggaccguggccaauggaguucuccagacauucaugcgcauggcguggggcgggucuuaccuggcccuugacuccggaagacggggcugggauugcaucaucagcucuuaccaguaucugauuauccaaaacaccacgugggacgaucacugucaguuuucccgccccagcccuauuggguaccucggauucgugucccagaagacaagagacaucuauauuucucggcgccugcuuggcaccuuuacauggacccugagcgauuccgaaggccaugacaugcccgggggauacugccucaccagauggaugcugaucgaggcugaucugaaauguuucggcaacacagccgucgcuaagugcaaugaaaaacacgacgaggaguuuugcgauauguggcgccucuucgacuucuguaagcaggccauccaacggcugaaagcgccugcccagaugaacauucagcuuaucaauaaggcugugaacgcccugauuaaugaccaacucaugaugaagaaccaccugagagauaucauggggauucccuauugcaauuacagcaaauuuuguuaucuuaacaauacgaccacaggacggaccucucugccucgcugcugucucaucuccaacggcagcuaccugaaugaaacacauuucucugacgauaucgagcagcaggcugacaacaugauuaccgaaaugcugcagaaggaguacauggauagacaagggaaaacgccgcucggacugguugaccuuuuuguguucagcacauccuuuuaucugaucaccauuuuccuccaccuggucaagauccccacccaucggcacauugugggcaaaccuugccccaagccucaucgccugaaucacaugggcaucuguucuugcgggcuuuacaaacagcccggagugccggucagauggaagcggugaggacuaguuauaagacugacuagcccgaugggccucccaacgggcccuccuccccuccuugcaccgagauuaauaaaaaaaaaaaaaaaaaaaaaaaaaaaaaaaaaaaaaaaaaaaaaaaaaaaaaaaaaaaaaaaaaaaaaaaaaaaaaaaaaaaaaaaaaaaaaaaaaaaa

SEQ ID NO: 34796 - RNA, 1662 nt, Artificial Sequence; identical to SEQ ID NO: 34790
  mRNA product Design i-3 (A100) comprising derived and/or modified sequence from LASV(Pinneo-NIG-1969;Clade I)__AIT17836__GPCmut8 (opt5)

SEQ ID NO: 34797 - RNA, 1662 nt, Artificial Sequence
  mRNA product Design i-3 (A100) comprising derived and/or modified sequence from LASV(ISTH0009-NIG-2011;Clade II)__AIT17404__GPCmut8 (opt5)
aggagaaagcuuaccaugggccagaucauuaccuucuuucaagaggugccccacgucaucgaagagguuaugaacauugugcugaucgcccucagccugcuugcuauucugaaggggaucuacaauguggccacaugcggacucuucggccuggucuccuuucuucugcucugugggagaucuugcagcacgaccuauaaaggaguguacgaacugcagacacuggagcucgacauggcgucccugaacauguguaugccucuuucuugcaccaagaauaacagccaucacuauaucaugguuggcaaugaaacagggcuggagcucacccugacaaacaccuccauuaucaaucauaaauucuguaaccuuucugaugcucacaagaaaaaucuguacgaccaugcccucaugagcauuaucuccacguuucaccugagcauuccgaacuucaaucaguaugaggccaugucuugcgauuuuaacggaggcaagaucuccgugcaguacaaucugagccacgcuuaugccgucgacgcugccaaccauuguggcaccauugcgaauggggugcuccaaacauucaugcggauggccuggggaggcucuuacaucgcucuggauuccgggaagggaagcugggacugcaucaugaccucuuaccaguaucuuauuauccagaacacaaccugggaagaucacugucaguuuucccgccccagcccuauuggcuaccuggggcuccugucccaaagaacgcgggacaucuauauuucucgcagacuucugggaacauucaccuggacacucagcgauuccgagggcaacgaaacccccggcggguacugccugacccgguggaugcugaucgaggccgagcucaaauguuuuggaaauacagcuguugccaagugcaacgaaaaacaugacgaggaguucugcgauaugcugcgccuuuuugacuucuguaagcaggcgaucagacggcugaaaacgccugcccagaugagcauucagcucaucaauaaggcugugaacgcccugauuaaugaucaacuuaucaugaagaaccaucugcgcgacauuaugggcauccccuauugcaauuacucuaaauauuguuaccucaaccacaccgucacagggaagaccucccugccuagaugcugucuggugagcaauggaucuuaccucaacgaaacacacuucagcgacgauaucgaacagcaggcugacaauaugauuaccgagcugcuucaaaaagaguauauggaucggcagggcaagacgccgcuggggcucguggaccuguuugucuucuccacaucuuuuuaccugaucagcauuuuccuucaccucaucaaaauucccacccaucgccacaucaccggaaagccuugccccaaaccucauagacugaaccacaugggcauuuguuccugcggccuguauaagcaccccgggguuccggugaaguggaaacggugaggacuaguuauaagacugacuagcccgaugggccucccaacgggcccuccuccccuccuugcaccgagauuaauaaaaaaaaaaaaaaaaaaaaaaaaaaaaaaaaaaaaaaaaaaaaaaaaaaaaaaaaaaaaaaaaaaaaaaaaaaaaaaaaaaaaaaaaaaaaaaaaaaaa

SEQ ID NO: 34798 - RNA, 1662 nt, Artificial Sequence
  mRNA product Design i-3 (A100) comprising derived and/or modified sequence from LASV(ISTH2010-NIG-2012;Clade II)__AIT17482__GPCmut8 (opt5)
aggagaaagcuuaccaugggccagaucauuaccuucuuucaagaggugccccacgucaucgaagagguuaugaacauugugcugaucgcccucagccugcuugcuauucugaaggggaucuacaauguggccacaugcggacucuucggccuggucuccuuucuucugcucugugggagaucuugcagcacgaccuauaaaggaguguacgaacugcagacacuggagcucgacauggcgucccugaacauguguaugccucuuucuugcaccaagaauaacagccaucacuauaucaugguuggcaaugaaacagggcuggagcucacccugacaaacaccuccauuaucaaucauaaauucuguaaccuuucugaugcucacaagaaaaaucuguacgaccaugcccucaugagcauuaucuccacguuucaccugagcauuccgaacuucaaucaguaugaggccaugucuugcgauuuuaacggaggcaagaucuccgugcaguacaaucugagccacgcuuaugccgucgacgcugccaaccauuguggcaccauugcgaauggggugcuccaaacauucaugcggauggccuggggaggcucuuacaucgcucuggauuccgggaagggaagcugggacugcaucaugaccucuuaccaguaucuuauuauccagaacauuacaugggaagaucacugucaguuuucccgccccagcccuaucggcuaccuggggcuccugucccaaagaacccgggacauuuauaucucucgcagacuucugggaacguucacauggacccucagcgauuccgagggcaacgaaacacccggcggguacugccugacccgguggaugcugaucgaggccgagcucaaauguuuuggaaauaccgcuguugccaagugcaacgaaaaacaugacgaggaguucugcgauaugcugcgccuuuuugacuucuguaagcaggcgauuagacggcugaaaacgccugcccagaugagcauccagcucauuaauaaggcugugaacgcccugaucaaugaucaacuuauuaugaagaaccaucugcgcgacaucaugggcauccccuauugcaauuacucuaaauauuguuaccucaaccacacagucaccgggaagacaucccugccuagaugcugucuggugagcaauggaucuuaccucaacgaaacccacuucagcgacgauauugaacagcaggcugacaauaugaucacagagcugcuucaaaaagaguauauugaucggcagggcaagaccccgcuggggcucguggaccuguuugucuucuccacgucuuuuuaccugaucagcauuuuccuucaccucguuaaaauccccacacaucgccacguggugggaaagccuugccccaaaccucauagacugaaccacaugggcauuuguuccugcggccuguauaagcaccccggggucccggugaaguggaaacggugaggacuaguuauaagacugacuagcccgaugggccucccaacgggcccuccuccccuccuugcaccgagauuaauaaaaaaaaaaaaaaaaaaaaaaaaaaaaaaaaaaaaaaaaaaaaaaaaaaaaaaaaaaaaaaaaaaaaaaaaaaaaaaaaaaaaaaaaaaaaaaaaaaaa

SEQ ID NO: 34799 - RNA, 1662 nt, Artificial Sequence
  mRNA product Design i-3 (A100) comprising derived and/or modified sequence from LASV(Lassa virus/H.sapiens-wt/NGA/2015/ISTH_0543;Clade II)__AVO03639__GPCmut8 (opt5)
aggagaaagcuuaccaugggccagaucauuaccuucuuucaagaggugccccacgucaucgaagagguuaugaacauugugcugaucgcccucagccugcuugcuauucugaaggggaucuacaauguggccacaugcggacucuucggccuggucuccuuucuucugcucugugggagaucuugcagcacgaccuauaaaggaguguacgaacugcagacacuggagcucgacauggcgaaccugaauauguguaugccucuuuccugcaccaagaacaauucucaucacuauaucaugguuggcaacgaaacagggcuggagcucacccugacaaauaccagcauuaucaaccauaaauucuguaaucuuuccgaugcucacaagaaaaaccuguacgaccaugcccucaugucuauuaucagcacguuucaccuguccauuccgaauuucaaccaguaugaggccaugagcugcgauuuuaauggaggcaagaucucugugcaguacaaccugucccacaccuaugcugucgacgccgcuaaucauuguggcacaauugccaacggggugcuccaaaccuucaugcggauggcguggggaggcagcuacaucgcccuggauucugggaagggauccugggacugcaucaugacaagcuaccaguaucuuguuauucagaacaccacgugggaagaucacugucaguuuucucgccccuccccuaucggcuaccuggggcuccugagccaaagaacacgggacauuuauaucucccgcagacuucugggaaccuucacauggacccucucugauagcgagggcaaugaaacccccggcggguacugccugacacgguggaugcugauugaggcugagcucaaauguuuuggaaacacggccguggcuaagugcaaugaaaaacaugacgaggaguucugcgauaugcugcgccuuuuugacuucuguaagcaggccaucagacggcugaaaaccccugcgcagauguccauccagcucauuaacaaggccgucaaugcucugaucaacgaucaacuuauuaugaagaaucaucugcgcgacaucaugggcauucccuauugcaacuacagcaaauauuguuaccucaaucacacagugaccgggaagacaucucugccuagaugcugucugguguccaacggaagcuaccucaaugaaacccacuucucugacgauaucgaacagcaggccgacaacaugaucacggagcugcuucaaaaagaguauauugaucggcagggcaagacaccgcuggggcucgucgaccuguuuguuuucagcaccuccuuuuaccugaucucuauuuuccuucaccucgugaaaauccccacccaucgccacauuacaggaaagccuugccccaaaccucauagacugaaucacaugggcaucuguagcugcggccuguauaagcaccccggggugccggucaaguggaaacggugaggacuaguuauaagacugacuagcccgaugggccucccaacgggcccuccuccccuccuugcaccgagauuaauaaaaaaaaaaaaaaaaaaaaaaaaaaaaaaaaaaaaaaaaaaaaaaaaaaaaaaaaaaaaaaaaaaaaaaaaaaaaaaaaaaaaaaaaaaaaaaaaaaaa

SEQ ID NO: 34800 - RNA, 1662 nt, Artificial Sequence
  mRNA product Design i-3 (A100) comprising derived and/or modified sequence from LASV(Lassa virus/H.sapiens-wt/NGA/2016/ISTH_0009;Clade II)__AVO03571__GPCmut8 (opt5)
aggagaaagcuuaccaugggccagaucauuaccuucuuucaagaggugccccacgucaucgaagagguuaugaacauugugcugaucgcccucagccugcuugcuauucugaaggggaucuacaauguggccacaugcggacuccugggccuugucuccuuccugcuccugugugggagaucuugcagcacgaccuauaaaggaguguacgaacugcagacacucgagcuggacauggcgucccuuaacauguguaugccucugucuugcaccaagaauaacagccaucacuauaucaugguuggcaaugaaacagggcucgagcugacccuuacaaacaccuccauuaucaaucauaaauuuuguaaccugucugaugcucacaagaaaaaucucuacgaccaugcccugaugagcauuaucuccacguuccaccugagcauuccgaacuuuaaucaguaugaggccaugucuugcgauuucaacggaggccggaucuccgugcaguacaaucucagccacucuuaugcugucgacgccgcuaaccauuguggcaccauugccaauggggugcugcaaacauuuaugcgcauggcguggggaggcuccuacaucgcccuugauagcgggaagggaucuugggacugcaucaugaccuccuaccaguaucugauuauccagaacacaaccugggaagaucacugucaguucagcagacccuccccuauuggcuaccucgggcugcuuucucaacggacgcgcgacaucuauauuagcagacggcugcucggaacauuuaccuggacacuguccgauagcgagggcaacgaaacccccggcggguacugccugacccgcuggaugcucaucgaggcugagcugaaguguuucggaaauacagccguugcuaaaugcaacgaaaagcaugacgaggaauuuugcgauaugcuuagacuguucgacuuuuguaaacaggccauccggcgccucaagacgccugcgcagaugucuauucagcugaucaauaaagccgugaacgcucuuauuaaugaucaacugaucaugaagaaccaccucagagacauuaugggcauccccuauugcaauuacuccaaguauuguuaccugaaccacaccgucacagggaaaaccagccugccucggugcugucucgugucuaauggaagcuaccugaacgagacacauuucuccgacgauaucgaacagcaggccgacaauaugauuaccgagcuucugcaaaaggaguauaucgaucgccagggcaaaacgccgcucgggcugguggaccuguucgucuuuucuaccagcuucuaccuuauuuccaucuuucuccaccugguuaagauucccacacauagacacaucaccggaaaaccuugccccaagccucaucggcugaaccacaugggcauuuguagcugcggccucuauaaucaccccggggugccggugaaauggaagcgcugaggacuaguuauaagacugacuagcccgaugggccucccaacgggcccuccuccccuccuugcaccgagauuaauaaaaaaaaaaaaaaaaaaaaaaaaaaaaaaaaaaaaaaaaaaaaaaaaaaaaaaaaaaaaaaaaaaaaaaaaaaaaaaaaaaaaaaaaaaaaaaaaaaaa

SEQ ID NO: 34801 - RNA, 1662 nt, Artificial Sequence
  mRNA product Design i-3 (A100) comprising derived and/or modified sequence from LASV(Lassa virus/H.sapiens-wt/NGA/2016/ISTH_0017;Clade II)__AVO03567__GPCmut8 (opt5)
aggagaaagcuuaccaugggccagaucauuaccuucuuucaagaggugccccacgucaucgaagagguuaugaacauugugcugaucgcccucagccugcuugcuauucugaaggggaucuacaauguggccacaugcggacucuucggccuggucuccuuucuucugcucugugggagaucuugcagcacgaccuauaaaggaguguacgaacugcagacacuggagcucgacauggcgucccugaacauguguaugccucuuucuugcaccaagaauaacagccaucacuauaucaugguuggcaaugaaacagggcuggagcucacccugacaaacaccuccauuaucaaucauaaauucuguaaccuuucugaugcucacaagaaaaaucuguacgaccaugcccucaugagcauuaucuccacguuucaccugagcauuccgaacuucaaucaguaugaggccaugucuugcgauuuuaacggaggcaagaucuccgugcaguacaaucugagccacaccuaugcuauugacgccgcuaaccauuguggcacaaucgccaaugggguccuccaaaccuucaugcggauggcguggggaggcucuuacaucgcccuggauuccgggaagggaagcugggacugcauuaugacaucuuaccaguaucuuaucauucagaacaccacgugggaagaucacugucaguuuucccgccccagcccuaucggcuaccuggggcuccugucccaaagaacacgggacauuuauaucucucgcagacuucugggaaccuucacauggacccucagcgauuccgagggcaacgaaacccccggcggguacugccugacacgguggaugcugaucgaggcugagcucaaauguuuuggaaauacggccguggcuaagugcaacgaaaaacaugacgaggaguucugcgauaugcugcgccuuuuugacuucuguaagcaggccauuagacggcugaaaaccccugcgcagaugagcauccagcucauuaauaaggccguuaacgcucugaucaaugaucaacuuauuaugaagaaccaucugcgcgacaucaugggcauccccuauugcaauuacucuaaauauuguuaccucaaccacacagugaccgggaagacaucccugccuagaugcugucuggucagcaauggaucuuaccucaacgaaacccacuucagcgacgauauugaacagcaggccgacaauaugaucacggagcugcuucaaaaagaguauauggaucggcagggcaagacaccgcuggggcucguggaccuguuuguguucuccaccucuuuuuaccugauuagcaucuuccuucaccucguccgcauucccacccauagacacguuaucggaaaaccuugccccaagccucaucggcugaaccacaugggcauuuguuccugcggccuguauaaacaccccggggugccggugaaguggaagcgcugaggacuaguuauaagacugacuagcccgaugggccucccaacgggcccuccuccccuccuugcaccgagauuaauaaaaaaaaaaaaaaaaaaaaaaaaaaaaaaaaaaaaaaaaaaaaaaaaaaaaaaaaaaaaaaaaaaaaaaaaaaaaaaaaaaaaaaaaaaaaaaaaaaaa

SEQ ID NO: 34802 - RNA, 1662 nt, Artificial Sequence
  mRNA product Design i-3 (A100) comprising derived and/or modified sequence from LASV(Lassa virus/H.sapiens-wt/NGA/2018/ISTH_0959;Clade II)__AVV65099__GPCmut8 (opt5)
aggagaaagcuuaccaugggccagaucauuaccuucuuucaagaggugccccacgucaucgaagagguuaugaacauugugcugaucgcccucagccugcuugcuauucugaaggggaucuacaauguggucacaugcggacucuucggccugguguccuuucuucugcucugugggagaucuugcagcacgaccuauaaaggaguuuacgaacugcagacacuggagcucgacauggccucccugaacauguguaugccucuuucuugcaccaagaauaacagccaucacuauaucauggugggcaaugaaacagggcuggagcucacccugacaaacaccuccauuaucaaucauaaauucuguaaccuuucugaugcgcacaagaaaaaucuguacgaccaugcucucaugagcauuaucuccacguuucaccugagcauuccgaacuucaaucaguaugaggccaugucuugcgauuuuaacggaggcaagaucuccguccaguacaaucugagccacgccuaugcuauugacgccgcuaaccauuguggcaccaucgccaauggggugcuccaaacauucaugcggauggcguggggaggcucuuacaucgcccuggauuccgggaagggaagcugggacugcauuaugaccucuuaccaguaucuuaucauucagaacacaaccugggaagaucacugucaguuuucccgccccagcccuaucggcuaccuggggcuccugucccaaagaacgcgggacauuuauaucucucgcagacuucugggaacauucaccuggacacucagcgauuccgagggcaacgaaacccccggcggguacugccugacccgguggaugcugaucgaggcugagcucaaauguuuuggaaauacagccguugcuaagugcaacgaaaaacaugacgaggaguucugcgauaugcugcgccuuuuugacuucuguaagcaggccauuagacggcugaaaacgccugcgcagaugagcauccagcucauuaauaaggccgugaacgcucugaucaaugaucaacuuauuaugaagaaccaucugcgcgacaucaugggcauccccuauugcaauuacucuaaauauuguuaccucaaccacaccgucacagggaagaccucccugccuagaugcugucuggugagcaauggaucuuaccucaacgaaacacacuucagcgacgauauugaacagcaggccgacaauaugaucaccgagcugcuucaaaaagaguauauugaucggcagggcaagacgccgcuggggcucguggaccuguuugucuucuccacaucuuuuuaccugaucagcauuuuccuucaccucguuaaaauccccacccaucgccacgugauuggaaagccuugccccaaaccucauagacugaaccacaugggcaucuguuccugcggccuguauaagcaccccggggugccggucaaguggaaacggugaggacuaguuauaagacugacuagcccgaugggccucccaacgggcccuccuccccuccuugcaccgagauuaauaaaaaaaaaaaaaaaaaaaaaaaaaaaaaaaaaaaaaaaaaaaaaaaaaaaaaaaaaaaaaaaaaaaaaaaaaaaaaaaaaaaaaaaaaaaaaaaaaaaa

SEQ ID NO: 34803 - RNA, 1662 nt, Artificial Sequence
  mRNA product Design i-3 (A100) comprising derived and/or modified sequence from LASV(LASV003-NIG-2008;Clade II)__AIT17580__GPCmut8 (opt5)
aggagaaagcuuaccaugggccagaucauuaccuucuuucaagaggugccccacgucaucgaagagguuaugaacauugugcugaucgcccucagccugcuugcuauucugaaggggaucuacaauguggccacaugcggacucuucggccuggucuccuuucuucugcucugugggagaucuugcagcacgaccuauaaaggaguguacgaacugcagacacuggagcucgacauggcgucccugaacauguguaugccucuuucuugcaccaagaauaacagccaucacuauaucaugguuggcaaugaaacagggcuggagcucacccugacaaacaccuccauuaucaaucauaaauucuguaaccuuucugaugcucacaagaaaaaucuguacgaccaugcccucaugagcauuaucuccacguuucaccugagcauuccgaacuucaaucaguaugaggccaugucuugcgauuuuaacggaggcaagaucuccgugcaguacaaucugagccacaccuaugcugucgacgccgcuaaccauuguggcacaauugccaauggggugcuccaaaccuucaugcggauggcguggggaggcucuuacaucgcccuggauuccgggaagggaagcugggacugcaucaugacaucuuaccaguaucuuauuauccagaacaccacgugggaagaucacugucaguuuucccgccccagcccuauuggcuaccuggggcuccugucccaaagaacacgggacaucuauauuucucgcagacuucugggaaccuucacauggacccucagcgauuccgagagcaacgaaacccccggcggcuacugccugacacgguggaugcugaucgaggcugagcucaaauguuuugggaauacggccguugcuaagugcaacgaaaaacaugacgaggaguucugcgauaugcugcgccuuuuugacuucuguaagcaggccaucagacggcugaaagcgccugcccagaugucuauucagcucaucaauaaggcugugaacgcccugauuaaugaucaacuuaucaugaagaaccaucugcgcgacauuaugggaauccccuauugcaauuacuccaaauauuguuaccucaaccacaccgucacaggcagaaccagccugccucggugcugucuggugucuaaugggagcuaccucaacgaaacacacuucuccgacgauaucgaacagcaggcugacaauaugauuaccgagcugcuucaaaaggaguauauggaucgccagggaaaaacgccgcugggccucguggaccuguuugucuucucuaccagcuuuuaccugaucuccauuuuccuucaccucguuaagauccccacacauagacacgugauugggaaaccuugccccaagccucaucggcugaaccacaugggaaucuguagcugcggccuguauaaacaccccggcgugccggucaaguggaagcgcugaggacuaguuauaagacugacuagcccgaugggccucccaacgggcccuccuccccuccuugcaccgagauuaauaaaaaaaaaaaaaaaaaaaaaaaaaaaaaaaaaaaaaaaaaaaaaaaaaaaaaaaaaaaaaaaaaaaaaaaaaaaaaaaaaaaaaaaaaaaaaaaaaaaa

SEQ ID NO: 34804 - RNA, 1662 nt, Artificial Sequence
  mRNA product Design i-3 (A100) comprising derived and/or modified sequence from LASV(LASV035-NIG-2009;Clade II)__AIT17588__GPCmut8 (opt5)
aggagaaagcuuaccaugggccagaucauuaccuucuuucaagaggugccccacgucaucgaagagguuaugaacauugugcugaucgcccucagccugcuugcuauucugaaggggaucuacaauguggccacaugcggacucuucggccuggucuccuuucuucugcucugugggagaucuugcagcacgaccuauaaaggaguguacgaacugcagacacuggagcucgacauggcgucccugaacauguguaugccucuuucuugcaccaagaauaacagccaucacuauaucaugguuggcaaugaaacagggcuggagcucacccugacaaacaccuccauuaucaaucauaaauucuguaaccuuucugaugcucacaagaaaaaucuguacgaccaugcccucaugagcauuaucuccacguuucaccugagcauuccgaacuucaaucaguaugaggccaugucuugcgauuuuaacggaggcaagaucuccgugcaguacaaucugagccacgcuuaugccgucgacgcugccaaccauuguggcaccauugcgaauggggugcuccaaacauucaugcggauggccuggggaggcucuuacaucgcucuggauuccgggaagggaagcugggacugcaucaugaccucuuaccaguaucuuauuauccagaacacaaccugggaagaucacugucaguuuucccgccccagcccuauuggcuaccuggggcuccugucccaaagaacgcgggacaucuauauuucucgcagacuucugggaacauucaccuggacacucagcgauuccgagggcaacgaaacccccggcggguacugccugacccgguggaugcugaucgaggccgagcucaaauguuuuggaaauacagcuguugccaagugcaacgaaaaacaugacgaggaguucugcgauaugcugcgccuuuuugacuucuguaagcaggcgaucagacggcugaaagccccugcucagaugagcauucagcucaucaauaaggccgugaacgcucugauuaaugaucaacuuaucaugaagaaccaucugcgcgacauuaugggcauccccuauugcaauuacucuaaauauuguuaccucaaccacacggucaccgggaagacaucccugccuagaugcugucuggugagcaauggaucuuaccucaacgaaacccacuucagcgacgauaucgaacagcaggccgacaauaugauuacagagcugcuucaaaaagaguauaucgaucggcagggcaagaccccgcuggggcucguggaccuguuugucuucuccacgucuuuuuaccugauuagcaucuuccuucaccucguuaaaauucccacacaucgccacgugaucggaaagccuugccccaaaccucauagacugaaccacaugggcauuuguuccugcggccuguauaagcaccccggggugccggucaaguggaaacggugaggacuaguuauaagacugacuagcccgaugggccucccaacgggcccuccuccccuccuugcaccgagauuaauaaaaaaaaaaaaaaaaaaaaaaaaaaaaaaaaaaaaaaaaaaaaaaaaaaaaaaaaaaaaaaaaaaaaaaaaaaaaaaaaaaaaaaaaaaaaaaaaaaaa

SEQ ID NO: 34805 - RNA, 1662 nt, Artificial Sequence
  mRNA product Design i-3 (A100) comprising derived and/or modified sequence from LASV(LASV1000-NIG-2009;Clade II)__AIT17782__GPCmut8 (opt5)
aggagaaagcuuaccaugggccagaucauuaccuucuuucaagaggugccccacgucaucgaagagguuaugaacauugugcugaucgcccucagccugcuugcuauucugaaggggaucuacaauguggccacaugcggacucuucggccuggucuccuuucuucugcucugugggagaucuugcagcacgaccuauaaaggaguguacgaacugcagacacuggagcucgacauggcgucccugaacauguguaugccucuuucuugcaccaagaauaacagccaucacuauaucaugguuggcaaugaaacagggcuggagcucacccugacaaacaccuccauuaucaaucauaaauucuguaaccuuucugaugcucacaagaaaaaucuguacgaccaugcccucaugagcauuaucuccacguuucaccugagcauuccgaacuucaaucaguaugaggccaugucuugcgauuuuaacggaggcaagaucuccgugcaguacaaucugagccacaccuaugcugucgacgccgcuaaccauuguggcacaauugccaauggggugcuccaaaccuucaugcggauggcguggggaggcucuuacaucgcccuggauuccgggaagggaagcugggacugcaucaugacaucuuaccaguaucuuauuauccagaacaccacgugggaagaucacugucaguuuucccgccccagcccuauuggcuaccuggggcuccugucccaaagaacacgggacaucuauauuucucgcagacuucugggaaccuucacauggacccucagcgauuccgagggcaacgaaacccccggcggguacugccugacacgguggaugcugaucgaggcugagcucaaauguuuuggaaauacggccguugcuaagugcaacgaaaaacaugacgaggaguucugcgauaugcugcgccuuuuugacuucuguaagcaggccaucaaaagacugaagaccccugcgcagaugagcauucagcucaucaauaaggccgugaacgcucugauuaaugaucaacuuaucaugaaaaaccaucugcgggacauuaugggcauccccuauugcaauuacucuaaguauuguuaccucaaccacacagucaccgggaaaacaucccugccucgcugcugucuggugagcaauggaucuuaccucaacgaaacccacuucagcgacgauaucgaacagcaggccgacaauaugauuacggagcugcuucaaaaggaguauaucgauagacagggcaaaacaccgcuggggcucguggaccuguuugucuucuccaccucuuuuuaccugauuagcaucuuccuucaccucguuaagauucccacccaucggcacguggugggaaaaccuugccccaagccucaucgccugaaccacaugggcaucuguuccugcggccuguauaagcaccccggggucccggugaaauggaagagaugaggacuaguuauaagacugacuagcccgaugggccucccaacgggcccuccuccccuccuugcaccgagauuaauaaaaaaaaaaaaaaaaaaaaaaaaaaaaaaaaaaaaaaaaaaaaaaaaaaaaaaaaaaaaaaaaaaaaaaaaaaaaaaaaaaaaaaaaaaaaaaaaaaaa

SEQ ID NO: 34806 - RNA, 1662 nt, Artificial Sequence
  mRNA product Design i-3 (A100) comprising derived and/or modified sequence from LASV(LASV221-NIG-2010;Clade II)__AIT17624__GPCmut8 (opt5)
aggagaaagcuuaccaugggccagaucauuaccuucuuucaagaggugccccacgucaucgaagagguuaugaacauugugcugaucgcccucagccugcuugcuauucugaaggggaucuacaauguggccacaugcggacucuucggccuggucuccuuucuucugcucugugggagaucuugcagcacgaccuauaaaggaguguacgaacugcagacacuggagcucgacauggcgucccugaacauguguaugccucuuucuugcaccaagaauaacagccaucacuauaucaugguuggcaaugaaacagggcuggagcucacccugacaaacaccuccauuaucaaucauaaauucuguaaccuuucugaugcucacaagaaaaaucuguacgaccaugcccucaugagcauuaucuccacguuucaccugagcauuccgaacuucaaucaguaugaggccaugucuugcgauuuuaacggaggcaagaucuccgugcaguacaaucugagccacaccuaugcuauugacgccgcuaaccauuguggcacaaucgccaaugggguccuccaaaccuucaugcggauggcguggggaggcucuuacaucgcccuggauuccgggaagggaagcugggacugcauuaugacaucuuaccaguaucuuaucauucagaacaccacgugggaagaucacugucaguuuucccgccccagcccuaucggcuaccuggggcuccugucccaaagaacacgggacauuuauaucucucgcagacuucugggaaccuucacauggacccucagcgauuccgagggcaacgaaacccccggcggguacugccugacacgguggaugcugaucgaggcugagcucaaauguuuuggaaauacggccguggcuaagugcaacgaaaaacaugacgaggaguucugcgauaugcugcgccuuuuugacuucuguaagcaggccauuagacggcugaaaaccccugcgcagaugagcauccagcucauuaauaaggccguuaacgcucugaucaaugaucaacuuauuaugaagaaccaucugcgcgacaucaugggcauccccuauugcaauuacucuaaauauuguuaccucaaccacacagugaccgggaagacaucccugccuagaugcugucuggucagcaauggaucuuaccucaacgaaacccacuucagcgacgauauugaacagcaggccgacaauaugaucacggagaugcugcaaaaagaguauauggaucggcagggcaagacaccgcuugggcugguggaccucuuuguguucuccaccucuuuuuaccugauuagcaucuuccugcaccuugucaaaauucccacccaucgccacguuaucggaaagccuugccccaaaccucauagacucaaccacaugggcauuuguuccugcggccuguauaagcaccccggggugccggugaaguggaaacggugaggacuaguuauaagacugacuagcccgaugggccucccaacgggcccuccuccccuccuugcaccgagauuaauaaaaaaaaaaaaaaaaaaaaaaaaaaaaaaaaaaaaaaaaaaaaaaaaaaaaaaaaaaaaaaaaaaaaaaaaaaaaaaaaaaaaaaaaaaaaaaaaaaaa

SEQ ID NO: 34807 - RNA, 1662 nt, Artificial Sequence
  mRNA product Design i-3 (A100) comprising derived and/or modified sequence from LASV(LASV237-NIG-2010;Clade II)__AIT17638__GPCmut8 (opt5)
aggagaaagcuuaccaugggccagaucauuaccuucuuucaagaggugccccacgucaucgaagagguuaugaacauugugcugaucgcccucagccugcuugcuauucugaaggggaucuacaauguggccacaugcggacucuucggccuggucuccuuucuucugcucugugggagaucuugcagcacgaccuauaaaggaguguacgaacugcagacacuggagcucgacauggcgucccugaacauguguaugccucuuucuugcaccaagaauaacagccaucacuauaucaugguuggcaaugaaacagggcuggagcucacccugacaaacaccuccauuaucaaucauaaauucuguaaccuuucugaugcucacaagaaagaccuguacgaucaugcccucaugagcauuaucuccacguuucaccugagcauuccgaauuucaaccaguaugaggccaugucuugcgacuuuaauggaggcaagaucuccgugcaguacaaccugagccacaccuaugcugucgaugccgcuaaucauuguggcacaauugccaacggggugcuccaaaccuucaugcggauggcguggggaggcucuuacaucgcccuggacuccgggaagggaagcugggauugcaucaugacaucuuaccaguaucuuauuauccagaauaccacgugggaagaccacugucaguuuucccgccccagcccuauuggcuaccuggggcuccugucccaaagaacacgggauaucuauauuucucgcagacuucugggaaccuucacauggacccucagcgacuccgagggcaacgaaacccccggcggguacugccugacacgguggaugcugaucgaggcugagcucaaauguuuuggaaacacggccguugcuaagugcaaugaaaaacaugaugaggaguucugcgacaugcugcgccuuuuugauuucuguaagcaggccaucagacggcugaaaaccccugcgcagaugagcauucagcucaucaacaaggccgugaaugcucugauuaacgaccaacuuaucaugaagaaucaucugcgcgacauuaugggcauccccuauugcaacuacucuaaauauuguuaccucaaucacacagucaccgggaagacaucccugccuagaugcugucuggugagcaacggaucuuaccucaaugaaacccacuucagcgaugacaucgaacagcaggccgauaacaugauuacggagcugcuucaaaaagaguauauggaccggcagggcaagacaccgcuggggcucguggaucuguuugucuucuccaccucuuuuuaccugaucagcauuuuccuucaccucaucaaaauucccacccaucgccacaucacaggaaagccuugccccaaaccucauagacugaaucacaugggcauuuguuccugcggccuguauaagcaccccgggguuccggugaaguggaaacggugaggacuaguuauaagacugacuagcccgaugggccucccaacgggcccuccuccccuccuugcaccgagauuaauaaaaaaaaaaaaaaaaaaaaaaaaaaaaaaaaaaaaaaaaaaaaaaaaaaaaaaaaaaaaaaaaaaaaaaaaaaaaaaaaaaaaaaaaaaaaaaaaaaaa

SEQ ID NO: 34808 - RNA, 1662 nt, Artificial Sequence
  mRNA product Design i-3 (A100) comprising derived and/or modified sequence from LASV(LASV253-NIG-2011;Clade II)__AIT17670__GPCmut8 (opt5)
aggagaaagcuuaccaugggccagaucauuaccuucuuucaagaggugccccacgucaucgaagagguuaugaacauugugcugaucgcccucagccugcuugcuauucugaaggggaucuacaauguggccacaugcggacucuucggccuggucuccuuucuucugcucugugggagaucuugcagcacgaccuauaaaggaguguacgaacugcagacacuggagcucgacauggcgucccugaacauguguaugccucuuucuugcaccaagaauaacagccaucacuauaucaugguuggcaaugaaacagggcuggagcucacccugacaaacaccuccauuaucaaucauaaauucuguaaccuuucugaugcucacaagaaaaaucuguacgaccaugcccucaugagcauuaucuccacguuucaccugagcauuccgaacuucaaucaguaugaggccaugucuugcgauuuuaacggaggcaagaucuccgugcaguacaaucugagccacaccuaugcugucgacgccgcuaaccauuguggcacaauugccaauggggugcuccaaaccuucaugcggauggcguggggaggcucuuacaucgcccuggauuccgggaagggaagcugggacugcaucaugacaucuuaccaguaucuuauuauccagaacaccacgugggaagaucacugucaguuuucccgccccagcccuauuggcuaccuggggcuccugucccaaagaacacgggacaucuauauuucucgcagacuucugggaaccuucacauggacccucagcgauuccgagggcaacgaaacccccggcggguacugccugacacgguggaugcugaucgaggcugagcucaaauguuuuggaaauacggccguugcuaagugcaacgaaaaacaugacgaggaguucugcgauaugcugcgccuuuuugacuucuguaagcaggccaucagacggcugaaagcgccugcccagaugagcauucagcucaucaauaaggcugugaacgcccugauuaaugaucaacuuaucaugaagaaccaucugcgcgacauuaugggcauccccuauugcaauuacucuaaauauuguuaccucaaccacaccgucacagggagaaccucccugccucggugcugucuggugagcaauggaucuuaccucaacgaaacacacuucagcgacgauaucgaacagcaggcugacaauaugauuaccgagcugcuucaaaaggaguauaucgaucgccagggcaaaacgccgcuggggcucguggaccuguuugucuucuccacaucuuuuuaccugauuagcaucuuccuucaccucguuaagauucccacccauagacacaucauuggaaaaccuugccccaagccucaucggcugaaccacaugggcaucuguuccugcggccuguauaaacaccccggggugccggugaaguggaagcgcugaggacuaguuauaagacugacuagcccgaugggccucccaacgggcccuccuccccuccuugcaccgagauuaauaaaaaaaaaaaaaaaaaaaaaaaaaaaaaaaaaaaaaaaaaaaaaaaaaaaaaaaaaaaaaaaaaaaaaaaaaaaaaaaaaaaaaaaaaaaaaaaaaaaa

SEQ ID NO: 34809 - RNA, 1662 nt, Artificial Sequence
  mRNA product Design i-3 (A100) comprising derived and/or modified sequence from LASV(LASV254-NIG-2011;Clade II)__AIT17674__GPCmut8 (opt5)
aggagaaagcuuaccaugggccagaucauuaccuucuuucaagaggugccccacgucaucgaagagguuaugaacauugugcugaucgcccucagccugcuugcuauucugaaggggaucuacaauguggccacaugcggacucuucggccuggucuccuuucuucugcucugugggagaucuugcagcacgaccuauaaaggaguguacgaacugcagacacuggagcucgacaugaccaaccugaauauguguaugccucuuuccugcacaaagaacaauucucaucacuauaucaugguuggcaacgaaaccgggcuggagcucacacugaccaauacgagcauuaucaaccauaaauucuguaaucuuuccgaugcgcacaagaaaaaccuguacaaucaugcucucaugucuauuaucagcaccuuucaccuguccauuccgaacuucaaucaguaugaggccaugagcugcgacuuuaacggaggcaagaucucugugcaguacaaucugucccacagcuaugccgucgaugcugccaaccauuguggcacaauugcuaacggggugcuccaaaccuucaugcggauggccuggggaggcucuuacaucgcgcuggacuccgggaagggaaauugggauugcaucaugacaagcuaccaguaucuuauuauccagaacaccacgugggaagaccacugucaguuuucucgccccuccccuauuggcuaccuggggcuccugagccaaagaacacgggauaucuauauuucccgcagacuucugggaaccuucacauggacccucucugacagcgagggcaaugaaacccccggcggguacugccugacacgguggaugcugaucgaggccgagcucaaauguuuuggaaacacggcuguugccaagugcaaugaaaaacaugaugaggaguucugcgacaugcugcgccuuuuugauuucuguaagcaggcuaucagacggcugaaaaccccugcccaggcgaacauucagcucaucaauaaggccgugaacgcucugauuaaugaccaacuuaucaugaagaaccaucugcgcgauauuaugggcauccccuauugcaauuacuccaaauauuguuaccucaaccacacagucaccgggaagacaagccugccuagaugcugucuggugucuaauggauccuaccucaacgaaacccacuucagcgacgacaucgaacagcaggccgauaauaugauuacggagcugcuucaaaaagaguauauggaccggcagggcaagacaccgcuggggcucguggaucuguuugucuucucuaccagcuuuuaccugaucuccauuuuccuucaccucguuaaaauccccacccaucgccacgugauuggaaagccuugccccaaaccucauagacugaaccacaugggcaucuguucuugcggccuguauaagcaccccggggugccggucaaguggaaacggugaggacuaguuauaagacugacuagcccgaugggccucccaacgggcccuccuccccuccuugcaccgagauuaauaaaaaaaaaaaaaaaaaaaaaaaaaaaaaaaaaaaaaaaaaaaaaaaaaaaaaaaaaaaaaaaaaaaaaaaaaaaaaaaaaaaaaaaaaaaaaaaaaaaa

SEQ ID NO: 34810 - RNA, 1662 nt, Artificial Sequence
  mRNA product Design i-3 (A100) comprising derived and/or modified sequence from LASV(Nig08-A19;Clade III)__ADU56618__GPCmut8 (opt5)
aggagaaagcuuaccaugggccagaucgugaccuucuuucaagaggucccccacguuauugaagaggugaugaacaucgugcugauugcccucagcauccuggcuauucuuaaggggcuguacaauaucgccacaugcggacucaucggccuggucacguuccuucugcucuccgggagaucuuguagcaugaccuauaaaggaguguacgaacugcagacacuggagcucaacaugaauacccugaacaugugcaugccucuuuccuguacaaagaauaacucucaucacuauauuaugguuggcaaugaaaccgggcuggagcucacacugaccaacacgagccuucugcaucacaaauuuugcaaucucuccgacgcgcauaagaaaaaccuguacgaucacacccugaugucuaucauuagcacauuccaccucuccaucccgaauuuuaaccaguaugaggcuaugagcugugacuucaauggaggcaagauuaccgugcaguacaaccugucucauuccuaugccaucgaugccgcuaaucacugcggcacagucgccaacggggugcuucaaaccuuuaugcggauggcuuggggaggcagcuacauugcccuggacucugggcgcggaaagugggauuguaucaugacguccuaccaguaucucaucauucagaacacaaccugggaagaccauugccaguucagcagacccucuccuaucggcuaccuggggcuucugucccaacggacacgcgauauuuauaucagcagacggcuccugggaaccuuuaccuggacacuguccgacucugagggcaaugaaacgcccggcggguacugucucacccgcuggaugcugauugaggcggagcuuaaaugcuucggaaacacagccguugcuaaguguaaugaaaaacacgaugaggaauuuugcgacaugcugagacucuucgauuuuugcaagcaggccauccggcgccugaaagcuccugcccagaugagcauccagcuuauuaacaaggcggugaaugcccugaucaacgaccaacucauuaugaagaaucaccugagagauaucaugggcauucccuauuguaacuacuccaaauauugcuaccugaaucauaccagcacagggcggaccucucucccucgcuguugccuggucuccaacggaagcuaccuuaaugagacgcacuucucugacgacaucgaacagcaggcugauaacaugaucacagagaugcugcaaaaggaguaucucgacagacagggcaaaaccccgcuggggcugguggaucuuuucguguuuagcaccuccuucuaccucauuucuaucuuucugcaucuggucaagauucccacacaccggcauaucguuggaaaaccuugucccaagccucaccgccucaaucacaugggcauuugcagcuguggccuguauaaacagcccggggugccggugagauggaagcggugaggacuaguuauaagacugacuagcccgaugggccucccaacgggcccuccuccccuccuugcaccgagauuaauaaaaaaaaaaaaaaaaaaaaaaaaaaaaaaaaaaaaaaaaaaaaaaaaaaaaaaaaaaaaaaaaaaaaaaaaaaaaaaaaaaaaaaaaaaaaaaaaaaaa

SEQ ID NO: 34811 - RNA, 1665 nt, Artificial Sequence
  mRNA product Design i-3 (A100) comprising derived and/or modified sequence from LASV(G1180-SLE-2010;Clade IV)__AIT17168__GPCmut8 (opt5)
aggagaaagcuuaccaugggccagaucgugaccuucuuucaagaggucccccacguuauugaagaggugaugaacaucgugcugauugcccucagcauccuggcuguccuuaaggggcuguacaauuucgccacaugcggacucgugggccugcuuacguuucugcuccugugugggagauccugcaccgcgucucgguauaaaggaguuuacgaacugcagacacucgagcugaacauggaaacccuuaauauguguaugccucugagcugcacaaagaacaauucccaucacuauauuauggugggcaacgagaccgggcucgagcugacacuuaccaauacgucuaucaucaaccauaaauucuguaaucugagcgacgcucacaagaaaaaccucuacgaucaugcccugauguccauuaucucuaccuuucaccugagcauuccgaauuucaaccaguaugaagccauguccugcgacuuuaauggaggcaagaucagcguccaguacaaccucucucacuccuaugcuggcgaugccgcuaaucauugugggacaguggccaacggaguucugcaaaccuucaugcgcauggcguggggcgggagcuacauugcccuugacucuggacacggcuccugggauugcaucaugacaagcuaccaguaucugauuauccagaacaccacgugggaggaccauugucaguuuucuagacccuccccuaucggguaccucggacugcuuagccaacggacacgcgauauuuauaucuccagacggcugcucggcaccuucacauggacccugucugacagcgaaggcaaggauacccccgggggauacugccugacacgcuggaugcucauugaggcugagcugaaauguuuuggcaauacggccguggcuaagugcaacgaaaaacacgacgaggaguucugcgauaugcuuagacuguuugacuucuguaagcaggccauccagcggcucaaagcgccugcccagauguccauucaacugaucaauaaggcugucaacgcccuuaucaaugaucagcugauuaugaagaaccaccuccgcgacaucauggggauucccuauugcaauuacagcaaauauuguuaccugaaccauaccacaaccggaaagacaucucugccuaaaugcugucucguguccaauggcagcuaccugaacgaaacccacuucucugacgauaucgaacagcaagcugacaauaugauuacggagaugcuucagaaggaguauauggaaagacaggggaaaacaccgcugggacucguggaucuguuugucuucagcaccuccuuuuaccugaucucuaucuuccuucaucucguuaagauucccacccaccggcauaucgugggcaaaagcugcccuaagccccaccgccugaaccacaugggcauuuguuccugcgggcuguauaagcagccuggagugcccgucaaauggaagagaugaggacuaguuauaagacugacuagcccgaugggccucccaacgggcccuccuccccuccuugcaccgagauuaauaaaaaaaaaaaaaaaaaaaaaaaaaaaaaaaaaaaaaaaaaaaaaaaaaaaaaaaaaaaaaaaaaaaaaaaaaaaaaaaaaaaaaaaaaaaaaaaaaaaa

SEQ ID NO: 34812 - RNA, 1665 nt, Artificial Sequence
  mRNA product Design i-3 (A100) comprising derived and/or modified sequence from LASV(G1442-SLE-2011;Clade IV)__AIT17180__GPCmut8 (opt5)
aggagaaagcuuaccaugggccagaucgugaccuucuuucaagaggucccccacguuauugaagaggugaugaacaucgugcugauugcccucagcauccuggcuguccuuaaggggcuguacaauguggccacaugcggacucauuggccugguuacguuccuucugcucugugggagauccugcaccacaacccuguauaaaggaguguacgaacugcagacacucgagcugaacauggaaacccuuaauauguguaugccucugucuugcacaaagaacaauagccaucacuauauccgggucggcaacgagaccgggcucgagcugacgcuuaccaauacauccaucauuaaccauaaauuuuguaaucugucugacgcgcacaagaaaaaccucuacgaucaugcucugaugagcaucauuuccaccuuccaccugucuaucccgaauuuuaaccaguaugaagccaugagcugcgacuucaauggaggcaagauuuccgugcaguacaaccucagccacucuuaugccggcgaugcugccaaucauugugggacaguugcuaacggagugcugcaaaccuuuaugcgcauggccuggggcggguccuacaucgcgcuugacagcggaagaggcaacugggauugcauuaugacgucuuaccaguaucugaucauccagaauacaaccugggacgaucacugucaguucucccggcccagcccuauuggguaccucggacugcuuucucaacgcacaagagacgucuauaucucccggcgccugcucggcaccuuuaccuggacacugagcgauuccgagggcaaggacacgcccgggggauacugccugaccagauggaugcucauugaagccgagcugaaauguuucggcaacacagcuguggccaagugcaaugagaaacaugaugaagaguuuugcgacaugcuucggcuguucgauuuuuguaagcaggcuauccagcgccucaaagccccugcgcagaugucuauucaacugaucaacaaggccgugaaugcucuuaucaacgaccagcugauuaugaagaaucaccucagagacaucauggggauucccuauugcaacuacagcaaauauuguuaccugaauaacaccgccacaggaaagaccucccugccuaaaugcugucucaucagcaauggcucuuaccugaacgaaacgcacuucuccgaugacauugagcaggaagcugauaauaugaucacagagaugcuucaaaaggaguauauggaacggcaggggaaaaccccgcugggacucgucgaccuguucguuuuuagcaccucuuucuaccugaucagcauuuuucuucaucucgugaagauccccacacaccgccauauugugggcaaauccugcccuaagccccacagacugaaccauaugggcaucuguucuugcgggcuguauaagcagccuggaguccccgugcgguggaaacgcugaggacuaguuauaagacugacuagcccgaugggccucccaacgggcccuccuccccuccuugcaccgagauuaauaaaaaaaaaaaaaaaaaaaaaaaaaaaaaaaaaaaaaaaaaaaaaaaaaaaaaaaaaaaaaaaaaaaaaaaaaaaaaaaaaaaaaaaaaaaaaaaaaaaa

SEQ ID NO: 34813 - RNA, 1665 nt, Artificial Sequence
  mRNA product Design i-3 (A100) comprising derived and/or modified sequence from LASV(G3010-SLE-2013;Clade IV)__AIT17344__GPCmut8 (opt5)
aggagaaagcuuaccaugggccagaucgugaccuucuuucaagaggucccccacguuauugaagaggugaugaacaucgugcugauugcccucagcauccuggcuguccuuaaggggcuguacaauuucgccacaugcggacucgugggccugguuacguuucuucugcucugugggagauccugcaccacaucucuguauaaaggaguguacgaacugcagacccucgagcugaacauggaaacacuuaauauguguaugccucugagcugcaccaagaacaauucccaucacuauauuauggucggcaacgagacagggcucgagcugacccuuacgaauaccucuaucaucaaccauaaauucuguaaucugagcgacgcgcacaagaaaaaccucuacaaucaugcucugauguccauuaucucuacauuucaccugagcauuccgaacuucaaucaguaugaagccauguccugcgauuuuaacggaggcaagaucagcgugcaguacaaucucucucacuccuaugccggcgacgcugccagccauugugggaccguugcuaacggagugcugcaaacauucaugcggauggccuggggcgggucuuacauugcgcuugauuccggauacggcaagugggacugcaucaugaccagcuaucaguaccugauuauccagaacacgacaugggaggaucacugucaguuuucucgccccuccccuaucggguaucucggacugcuuagccaaagaacccgggacauuuacaucucccgcagacugcucggcacauucaccuggacccugucugauagcgaaggcaaagacacacccgggggauauugccugacgcgguggaugcucauugaggccgagcugaaguguuuuggcaauaccgcugucgccaaaugcaacgaaaagcaugaugaggaguucugcgacaugcuucgccuguuugauuucuguaaacaggcuauccagagacucaagaccccugcccagauguccauucaacugaucaauaaggcggugaacgcccuuaucaaugaccagcugauuaugaaaaaccaccuccgggauaucauggggauucccuacugcaauuauagcaaguacuguuaccugaaccacacaacaaccggaaaaacgucucugccuaagugcugucucguguccaauggcagcuaucugaacgaaacacauuucucugacgacaucgaacagcaagcugauaauaugauuaccgagaugcuucagaaagaguacauggaacgccaggggaagaccccgcugggacucgucgaccuguuuguuuucagcacauccuuuuaucugaucucuaucuuccuucaccucgugaaaauucccacccauagacacaucgugggcaagagcugcccuaagccccaucggcugaaccacaugggcauuuguuccugcgggcuguacaaacagccuggaguccccgugcgcuggaagagaugaggacuaguuauaagacugacuagcccgaugggccucccaacgggcccuccuccccuccuugcaccgagauuaauaaaaaaaaaaaaaaaaaaaaaaaaaaaaaaaaaaaaaaaaaaaaaaaaaaaaaaaaaaaaaaaaaaaaaaaaaaaaaaaaaaaaaaaaaaaaaaaaaaaa

SEQ ID NO: 34814 - RNA, 1665 nt, Artificial Sequence
  mRNA product Design i-3 (A100) comprising derived and/or modified sequence from LASV(G502-SLE-2009;Clade IV)__AIT17126__GPCmut8 (opt5)
aggagaaagcuuaccaugggccagaucgugaccuucuuucaagaggucccccacguuauugaagaggugaugaacaucgugcugauugcccucagcauccuggcuguccuuaaggggcuguacaauuucgccacaugcggacucgugggccugcuuacguuucugcuccugugugggagauccugcaccacaggacuguauaaaggcguuuacgaacuccagacccuggagcuuaacauggaaacacugaauauguguaugccucucucuugcaccaagaacaauagccaucacuauauuaugguggggaacgagacaggacuggagcuuacccugacgaauaccuccaucaucaaccauaaauucuguaaucucucugacgcgcacaagaaaaaccuguacgaucaugcucugaugagcauuaucuccacauuucaccucucuauuccgaauuucaaccaguaugaagccaugagcugcgacuuuaauggcggcaagaucuccguccaguacaaccugagccacucuuaugccggggaugcugccgaccauuguggaaccguggcuaauggcguucuucaaacauucaugcggauggccuggggaggguccuacauugcgcuggauagcggccgcgggagaugggacugcaucaugaccucuuaccaguaucucauuauccagaacacgacaugggaggaucacugucaguuuucccggcccagcccuaucggauaccugggccuucugucucaacgcaccagagacauuuauaucucccggcgccuccugggcacauucaccuggacccugagcgauuccgaagggaaggacacacccggaggcuacugccucacgagauggaugcugauugaggccgagcuuaaauguuuugggaacaccgcuguggccaagugcaaugaaaaacaugaugaggaguucugcgacaugcugcggcucuuugauuucuguaagcaggcuauccagcgccugaaagccccugcgcagaugucuauucaacuuaucaacaaggccgucaaugcucugaucaacgaccagcucgugaugaagaaucaccugagagacauuaugggaauccccuauugcaacuacagccgguauuguuaccugaaucacacaaccacaggccgcaccucccucccuaaaugcugucuggugagcaacgggucuuaccuuaaugaaacgcauuucuccgaugacauugaacagcaagccgauaacaugaucacagagaugcugcagaaggaguauauggaaagacagggaaaaaccccgcucggccuggucgaccuguuuguuuucagcaccucuuuuuaccuuauuagcaucuuccuccaccuggugaagauccccacacaucggcacauugugggcaaauccugcccuaagccccaucgccugaaucacauggggaucuguucuugcggacucuauaaacagccuggcguccccgugaaguggaagagaugaggacuaguuauaagacugacuagcccgaugggccucccaacgggcccuccuccccuccuugcaccgagauuaauaaaaaaaaaaaaaaaaaaaaaaaaaaaaaaaaaaaaaaaaaaaaaaaaaaaaaaaaaaaaaaaaaaaaaaaaaaaaaaaaaaaaaaaaaaaaaaaaaaaa

SEQ ID NO: 34815 - RNA, 1665 nt, Artificial Sequence
  mRNA product Design i-3 (A100) comprising derived and/or modified sequence from LASV(G733-SLE-2010;Clade IV)__AIT17154__GPCmut8 (opt5)
aggagaaagcuuaccaugggccagaucgugaccuucuuucaagaggucccccacguuauugaagaggugaugaacaucgugcugauugcccucagcauccuggcuguccuuaaggggcuguacaauuucgccacaugcggaauugugggccucguuuccuuucugcuucugugugggagaucuugcacgaccagccucuauaaaggaguguacgaacugcagacacuggagcucaacauggaaacccugaauauguguaugccucuuuccugcacaaagaacaauucucaucacuauaucauggucggcaacgagaccgggcuggagcucacacugaccaauacgagcaucauuaaccauaaauucuguaaucuuuccgacgcgcacaagaaaaaccuguacgaucaugcucucaugucuaucauuagcaccuuucaccuguccaucccgaauuucaaccaguaugaagccaugagcugcgacuuuaauggaggcaagauuucugugcaguacaaccugucccacagcuaugccggcgaugcugccaaucauugugggacaaucgcuaacggaguucuccaaaccuucaugcggauggccuggggcgggucuuacauugcgcuggacuccggacgcgauagaugggacugcaucaugacaagcuaccaguaucuuaucauucagaacaccacgugggaggaucacugucaguuuucucggcccuccccuaucggcuaccuggggcuccugagccaacgcacaagagacauuuauaucucccggcgccuucugggaaccuucacauggacccucucugauagcgaaggcaaggacacccccggcggguacugccugacaagauggaugcugauugaggccgagcucaaauguuuuggaaauacggcuguggccaagugcaacgaaaaacaugaugaggaguucugcgacaugcugcggcuuuuugauuucuguaagcaggcuauccagcgccugaaagccccugcgcagauguccauccaacucauuaauaaggccgucaacgcucugaucaaugaccagcuuauuaugaagaaccaccugagagacaucaugggcauucccuauugcaauuacagcaaauauuguuaccucaaccacaccacaaccgggaagacaucucugccuaaaugcugucugguguccaauggaagcuaccucaacgaaacccauuucucugaugacaucgaacagcaagccgauaauaugaucacggagaugcugcagaaggaguauauggaacggcagggcaaaacaccgcuugggcugguggaccucuuugucuucagcaccuccuuuuaccugauuucuaucuuccugcaccuuguuaagauucccacccaucgccacguggugggaaaaagcugcccuaagccccauagacucaaccacaugggcaucuguuccugcggccuguaugggcagccuggaguccccgugaaguggaaacggugaggacuaguuauaagacugacuagcccgaugggccucccaacgggcccuccuccccuccuugcaccgagauuaauaaaaaaaaaaaaaaaaaaaaaaaaaaaaaaaaaaaaaaaaaaaaaaaaaaaaaaaaaaaaaaaaaaaaaaaaaaaaaaaaaaaaaaaaaaaaaaaaaaaa

SEQ ID NO: 34816 - RNA, 1665 nt, Artificial Sequence
  mRNA product Design i-3 (A100) comprising derived and/or modified sequence from MOPV/LASV reassortant(IGS-1;Clade IV)__AFY05576__GPCmut8 (opt5)
aggagaaagcuuaccaugggccagaucgugaccuucuuucaagaggucccccacguuauugaagaggugaugaacaucgugcugauugcccucagcguccuggcugugcuuaaggggcuguacaauuucgccacaugcggacucguuggccuggugacguuucuucugcucugugggagauccugcaccacaucucuguauaaaggagucuacgaacugcagacccucgagcugaacauggaaacacuuaauauguguaugccucugagcugcaccaagaacaauucccaucacuauaucauggugggcaacgagacagggcucgagcugacccuuacgaauaccucuauuaucaaccauaaauucuguaaucugagcgacgcgcacaagaaaaaccucuacgaucaugcucugauguccaucauuucuacauuucaccugagcaucccgaauuucaaccaguaugaagccauguccugcgacuuuaauggaggcaagauuagcguucaguacaaccucucucacuccuaugccggcgaugcugccaaucauugugggaccguggcuaacggaguccugcaaacauucaugcggauggccuggggcgggagcuacaucgcgcuugacucuggacgcggcaacugggauugcauuaugaccuccuaccaguaucugaucauucagaauacgacaugggaggaccacugucaguuuagcagacccucuccuaucggguaccucggacugcuuucccaacggacccgcgauaucuauauuagcagacggcugcucggcacauucaccuggacccuguccgacucugaaggcgaggauacacccgggggauacugccugacgcgcuggaugcucaucgaggccgaacugaaguguuuuggcaacaccgcuguggccaaaugcaaugagaagcaugacgaagaguucugcgauaugcuuagacuguuugacuucuguaaacaggcuauucagcggcucaaggccccugcgcagaugagcauccaacugauuaacaaagccgugaaugcucuuaucaacgaucagcugaucaugaagaaucaccuccgcgacauuauggggauccccuauugcaacuacuccaaguauuguuaccugaaucacacaaccacaggaagaaccagccugccuaaaugcugucucgucucuaacggcuccuaccugaaugaaacgcauuucagcgacgauauugagcagcaagccgacaacaugaucacagagaugcuucagaaggaauauauggagcggcaggggaaaaccccgcugggacucguugaucuguuuguguucucuaccagcuuuuaccugauuuccaucuuccuucaccucgugaagauccccacacaucgccacauugucggcaaaucuugcccuaagccccauagacugaaucacaugggcaucuguagcugcgggcuguauaaacagccuggagugcccguuaaguggaagcggugaggacuaguuauaagacugacuagcccgaugggccucccaacgggcccuccuccccuccuugcaccgagauuaauaaaaaaaaaaaaaaaaaaaaaaaaaaaaaaaaaaaaaaaaaaaaaaaaaaaaaaaaaaaaaaaaaaaaaaaaaaaaaaaaaaaaaaaaaaaaaaaaaaaa

SEQ ID NO: 34817 - RNA, 1665 nt, Artificial Sequence
  mRNA product Design i-3 (A100) comprising derived and/or modified sequence from LASV(LM765-SLE-2012;Clade IV)__AIT17814__GPCmut8 (opt5)
aggagaaagcuuaccaugggccagaucgugaccuucuuucaagaggucccccacguuauugaagaggugaugaacaucgugcugauugcccucagcauccuggcuguccuuaaggggcuguacaauuucgccacaugcggacucgugggccugguuacguuucuucugcucugugggagauccugcaccacaucucuguauaaaggaguguacgaacugcagacccucgagcugaacauggaaacacuuaauauguguaugccucugagcugcaccaagaacaauucccaucacuauauuauggucggcaacgagacagggcucgagcugacccuuacgaauaccucuaucaucgaccauaaauucuguaaccugagcgaugcgcaccggaagaaucucuacgaccaugcucugauguccauuaucucuacauuucaccugagcauuccgaacuucaaucaguaugaagccauguccugcgauuuuaacggaggcaaaaucagcgugcaguacaaucucucucacuccuaugccaaggacgcugccgaucauuguggcaccguugcuaacggggugcugcaaacauucaugcgcauggccuggggaggcagcuacauugcgcuugacucugggagaggacggugggauugcaucaugaccuccuaccaguaucugauuauccagaauacgacaugggaggaccacugucaguuuagccgccccucuccuaucggcuaccucgggcugcuuucccaaagaacccgggauauuuauaucagccgcagacugcucggaacauucaccuggacccuguccgacucugaaggcaaggauacacccggcggguacugccugacgcgguggaugcucauugaggccgagcugaaauguuuuggaaacaccgcugucgccaagugcaacgaaaaacaugacgaggaguucugcgauaugcuucgccuguuugacuucuguaagcaggcuauccagagacucaaagccccugcgcagaugagcauucaacugaucaauaaggccgugaacgcucuuaucaaugaccagcugauuaugaagaaccaccuccgggauaucaugggcauucccuauugcaauuacuccaaauauuguuaccugaaccacacaaccacagggaagaccagccugccuaaaugcugucucgugucuaauggauccuaccugaacgaaacgcauuucagcgacgauaucgaacagcaagccgacaauaugauuacagagaugcuucagaaggaguauauggaacgccagggcaaaaccccgcuggggcucgucgaucuguuuguuuucucuaccagcuuuuaccugaucuccaucuuccuucaccucgugaagauucccacacauagacacaucgugggaaaaccuugccccaagccucaucggcugaaccacaugggcauuuguucuugcggccuguauaagcagcccggggucccggugaaauggaagcgcugaggacuaguuauaagacugacuagcccgaugggccucccaacgggcccuccuccccuccuugcaccgagauuaauaaaaaaaaaaaaaaaaaaaaaaaaaaaaaaaaaaaaaaaaaaaaaaaaaaaaaaaaaaaaaaaaaaaaaaaaaaaaaaaaaaaaaaaaaaaaaaaaaaaa

SEQ ID NO: 34818 - RNA, 1665 nt, Artificial Sequence
  mRNA product Design i-3 (A100) comprising derived and/or modified sequence from LASV(LM776-SLE-2012;Clade IV)__AIT17824__GPCmut8 (opt5)
aggagaaagcuuaccaugggccagaucgugaccuucuuucaagaggucccccacguuauugaagaggugaugaacaucgugcugauugcccucagcauccuggcuguccuuaaggggcuguacaauuucgccacaugcggacucgugggccugguuacguuucuucugcucugugggagauccugcaccacaucuguguauaaaggagucuacgaacugcagacccuggagcucaacauggaaacacugaauauguguaugccucuuagcugcaccaagaacaauucccaucacuauauuauggugggcaacgagacagggcuggagcucacccugacgaauaccucuaucaucaaccauaaauucuguaaucuuagcgacgcgcacaagaaaaaccuguacgaucaugcucucauguccauuaucucuacauuucaccugagcauuccgaauuucaaccaguaugaagccauguccugcgacuuuaauggaggcaagaucagcguucaguacaaccugucucacuccuaugccggcgaugcugccaaucauugugggaccguggcuaacggaguccuccaaacauucaugcggauggccuggggcgggagcuacauugcgcuggacucuggacacggcaagugggauugcaucaugaccuccuaccaguaucuuauuauccagaacacgacaugggaggaccauugucaguuuagccgccccucuccuaucggguaccugggacuccugucccaaagaacccgggauauuuauaucagccgcagacuucugggcacauucaccuggacccucuccgacucugaaggcaaagauacacccgggggauacugccugacgcgguggaugcugauugaggccgagcucaaguguuuuggcaauaccgcuguggccaaaugcaacgaaaagcacgacgaggaguucugcgauaugcugcgccuuuuugacuucuguaaacaggcuauccagagacugaaggccccugcgcagaugagcauucaacucaucaauaaggccgugaacgcucugaucaaugaucagcuuauuaugaaaaaccaucugcgggacaucauggggauucccuauugcaauuacuccaaguauuguuaccucaaccacacaaccacaggaaaaaccagccugccuaagugcugucuggucucuaauggcuccuaccucaacgaaacgcacuucagcgacgauaucgaacagcaagccgacaauaugauuacagagaugcugcagaaagaguauauggaacgccaggggaagaccccgcuuggacugguugaucucuuuguguucucuaccagcuuuuaccugaucuccaucuuccugcaucuugugaaaauucccacacacagacauaucgucggcaagucuugcccuaagccccaccggcucaaccacaugggcauuuguagcugcgggcuguauaaacagccuggagugcccguucgcuggaagagaugaggacuaguuauaagacugacuagcccgaugggccucccaacgggcccuccuccccuccuugcaccgagauuaauaaaaaaaaaaaaaaaaaaaaaaaaaaaaaaaaaaaaaaaaaaaaaaaaaaaaaaaaaaaaaaaaaaaaaaaaaaaaaaaaaaaaaaaaaaaaaaaaaaaa

SEQ ID NO: 34819 - RNA, 1665 nt, Artificial Sequence
  mRNA product Design i-3 (A100) comprising derived and/or modified sequence from LASV(Mad39;Clade IV)__ANH09722__GPCmut8 (opt5)
aggagaaagcuuaccaugggccagaucgugaccuucuuucaagaggucccccacguuauugaagaggugaugaacaucgugcugauugcccucagcauccuggcuguccuuaaggggcuguacaauguggccacaugcggacucauuggccugguuacguuccuucugcucugugggagauccugcaccacaacccuguauaaaggaguguacgaacugcaggcgcucgagcugaacauggaaacacuuaauauguguaugccucugucuugcaccaagaacaauagccaucacuauauccgggucggcaacgagacagggcucgagcugacccuuacgaauaccucccugaucaaccauaaauuuuguaaucucucugacgcucacaagaaaaaccuguacgaucaugcccugaugagcauuaucuccacauuccaccucucuauuccgaauuuuaaccaguaugaagccaugagcugcgacuucaaugauggaaagaucuccgugcaguacaaccugagccacaccuaugcuggcgacacagccaaucauuguggcaccguugcuaacggggugcuucaaacguuuaugcgcauggccuggggaggcucuuacauugcgcuggauuccgggagaggaggcugggacugcaucaugacaagcuaccaguaucucauuauccagaacaccacaugggaggaucacugucaguucucucggcccuccccuaucggguaccugggacuucugagccaacgcaccagagacauuuauaucucucggcgccuccugggcaccuuuacauggacgcuguccgauagcgaaggcaaggacacccccgggggauacugccucacaagauggaugcugauugaggccgagcuuaaauguuucggcaauaccgcugucgccaagugcaacgaaaaacaugaugaggaauuuugcgacaugcugcgccucuucgauuuuuguaagcaggcuauccagcggcugaaagccccugcgcagauguccauucaacuuaucaauaaggccgugaacgcucugaucaaugaccagcucauuaugaagaaccaccugagagacaucauggggauucccuauugcaauuacucuaaauauuguuaccugaaccacacagugaccggaaagacgagccucccuaaaugcugucuggucuccaauggcagcuaccuuaacgagacacauuucucugaugacaucgaacagcaagccgauaauaugauuaccgagaugcugcagaaggaguauauggaacggcaggggaaaaccccgcucggacugguugaccuguucguguuuuccaccagcuucuaccuuaucucuaucuuucuccaccuggugaagauucccacacaucgccacgucgugggcaaaccuugccccaagccucauagacugaaccacaugggcaucuguagcugcggguucuauaagcagcccggaguuccggugcgguggaaacgcugaggacuaguuauaagacugacuagcccgaugggccucccaacgggcccuccuccccuccuugcaccgagauuaauaaaaaaaaaaaaaaaaaaaaaaaaaaaaaaaaaaaaaaaaaaaaaaaaaaaaaaaaaaaaaaaaaaaaaaaaaaaaaaaaaaaaaaaaaaaaaaaaaaaa

SEQ ID NO: 34820 - RNA, 1665 nt, Artificial Sequence
  mRNA product Design i-3 (A100) comprising derived and/or modified sequence from LASV(Z0947-SLE-2011;Clade IV)__AIT17840__GPCmut8 (opt5)
aggagaaagcuuaccaugggccagaucgugaccuucuuucaagaggucccccacguuauugaagaggugaugaacaucgugcugauugcccucagcauccuggcuguccuuaaggggcuguacaauuucgccacaugcggacucgugggccugguuacguuucuucugcucugugggagauccugcaccauuucucuguauaaaggaguguacgaacugcagacacucgagcugaacauggaaacccuuaauauguguaugccucugagcugcacaaagaacaauucccaucacuauaucauggucggcaacgagaccgggcucgagcugacacuuaccaauacgucuaucauuaaccauaaauucuguaaucugagcgacgcgcacaagaaaaaccucuacgaucaugcucugauguccaucauuucuaccuuucaccugagcaucccgaauuucaaccaguaugaagccauguccugcgacuuuaauggaggcaagauuagcgugcaguacaaccucucucacuccuaugccggcgaugcugccaaucauugugggacaguugcuaacggagugcugcaaaccuucaugcggauggccuggggcgggagcuacaucgcgcuugacucuggacgcgauagaugggacugcauuaugacauccuaccaguaucugaucauccagaacaccacgugggaggaucacugucaguuuagccggcccucuccuauuggcuaccucgggcugcuuucccaacgcacaagagacaucuauauuagccggcgccugcucggaaccuucacauggacccuguccgauucugaaggcaaggacacccccggcggguacugccugacaagauggaugcucaucgaggccgagcugaaauguuuuggaaauacggcugucgccaagugcaacgaaaaacaugaugaggaguucugcgacaugcuucggcuguuugauuucuguaagcaggcuauucagcgccucaaagccccugcgcagaugagcauccaacugaucaauaaggccgugaacgcucuuauuaaugaccagcugaucaugaagaaccaccucagagacauuaugggcauccccuauugcaauuacuccaaauauuguuaccugaaccacaccacaaccgggaagacaagccugccuaaaugcugucucgugucuaauggauccuaccugaacgaaacccauuucagcgaugacauugaacagcaagccgauaauaugaucacggagaugcuucagaaggaguauauggaacggcagggcaaaacaccgcuggggcucgucgaccuguuuguuuucucuaccagcuuuuaccugaucuccauuuuccuucaccucgugaagauccccacccaucgccacauugugggaaaaccuugccccaagccucauagacugaaccacaugggcaucuguucuugcggccuguauaagcagcccggggucccggugaaauggaagcggugaggacuaguuauaagacugacuagcccgaugggccucccaacgggcccuccuccccuccuugcaccgagauuaauaaaaaaaaaaaaaaaaaaaaaaaaaaaaaaaaaaaaaaaaaaaaaaaaaaaaaaaaaaaaaaaaaaaaaaaaaaaaaaaaaaaaaaaaaaaaaaaaaaaa

SEQ ID NO: 34821 - protein, 491 aa, Artificial Sequence
  derived and/or modified protein sequence (artificial) from LASV(Josiah;Clade IV)__NP_694870__GPCmut9
MGQIVTFFQEVPHVIEEVMNIVLIALSVLAVLKGLYNFATCGLVGLVTFLLLCGRSCTTSLYKGVYELQTLELNMETLNMTMPLSCTKNNSHHYIMVGNETGLELTLTNTSIINHKFCNLSDAHKKNLYDHALMSIISTFHLSIPNFNQYEAMSCDFNGGKISVQYNLSHSYAGDAANHCGTVANGVLQTFMRMAWGGSYIALDSGCGNWDCIMTSYQYLIIQNTTWEDHCQFSRPSPIGYLGLLSQRTRDIYISRRLLGTFTWTLSDSEGKDTPGGYCLTRWMLIEAELKCFGNTAVAKCNEKHDEEFCDMLRLFDFNKQAIQRLKAEAQMSIQLINKAVNALINDQLIMKNHLRDIMCIPYCNYSKYWYLNHTTTGRTSLPKCWLVSNGSYLNETHFSDDIEQQADNMITEMLQKEYMERQGKTPLGLVDLFVFSTSFYLISIFLHLVKIPTHRHIVGKSCPKPHRLNHMGICSCGLYKQPGVPVKWKR

SEQ ID NO: 34822 - protein, 490 aa, Artificial Sequence
  derived and/or modified protein sequence (artificial) from LASV(LP;Clade I)__AAF86701__GPCmut9
MGQIITFFQEVPHVIEEVMNIVLIALSLLAILKGLYNIATCGIIGLVAFLFLCGKSCSLTLKGGYELQTLELNMETLNMTMPLSCTKNSSHHYIRVGNETGLELTLTNTSIINHKFCNLSDAHKKNLYDHALMSIISTFHLSIPNFNQYEAMSCDFNGGKISVQYNLSHSYAGDAAEHCGTVANGVLQTFMRMAWGGRYIALDSGCGNWDCIMTSYQYLIIQNTTWEDHCQFSRPSPIGYLGLLSQRTRDIYISRRLLGTFTWTLSDSEGNETPGGYCLTRWMLIEAELKCFGNTAVAKCNEKHDEEFCDMLRLFDFNKQAIRRLKAEAQMSIQLINKAVNALINDQLIMKNHLRDIMCIPYCNYSKYWYLNHTSSGRTSLPKCWLISNGSYLNETQFSDDIEQQADNMITEMLQKEYIERQGKTPLGLVDIFIFSTSFYLISIFLHLIKIPTHRHIVGKPCPKPHRLNHMGVCSCGLYKHPGVPTKWKR

SEQ ID NO: 34823 - protein, 490 aa, Artificial Sequence
  derived and/or modified protein sequence (artificial) from LASV(803213;Clade II)__AAF86703__GPCmut9
MGQIITFFQEVPHVIEEVMNIVLIALSLLAILKGIYNVATCGLFGLISFLLLCGRSCSVTYKGVYELQTLELNMANLNMTMPLSCTKNNSHHYIMVGNETGLELTLTNTSIINHKFCNLSDAHKKNLYDHALMSIISTFHLSIPNFNQYEAMSCDFNGGKISVQYNLSHSFAVDAANHCGTIANGVLQTFMRMAWGGSYIALDSGCGNWDCIMTSYQYLIIQNTTWEDHCQFSRPSPIGYLGLLSQRTRDIYISRRLLGTFTWTLSDSEGNEAPGGYCLTRWMLIEAELKCFGNTAVAKCNEKHDEEFCDMLRLFDFNKQAIKRLKTEAQMSIQLINKAVNALINDQLIMKNHLRDIMCIPYCNYSRYWYLNHTVTGKTSLPRCWLVSNGSYLNETHFSDDIEQQADNMITEMLQKEYMDRQGKTPLGLVDLFVFSTSFYLISIFLHLVKIPTHRHIVGKPCPKPHRLNHMGICSCGLYKHPGVPVKWKR

SEQ ID NO: 34824 - protein, 490 aa, Artificial Sequence
  derived and/or modified protein sequence (artificial) from LASV(GA391;Clade III)__CAA36645__GPCmut9
MGQIVTFFQEVPHVIEEVMNIVLIALSILAILKGLYNVATCGLIGLVTFLLLSGRSCSLIYKGTYELQTLELNMETLNMTMPLSCTKNNSHHYIRVGNETGLELTLTNTSILNHKFCNLSDAHKRNLYDHSLMSIISTFHLSIPNFNQYEAMSCDFNGGKITVQYNLSHSFAVDAAGHCGTLANGVLQTFMRMAWGGSYIALDSGCGNWDCIMTSYQYLIIQNTTWDDHCQFSRPSPIGYLGLLSQRTRDIYISRRLLGTFTWTLSDSEGNETPGGYCLTRWMLIEAELKCFGNTAVAKCNEKHDEEFCDMLRLFDFNKQAIRRLKTEAQMSIQLINKAVNALINDQLIMKNHLRDIMCIPYCNYSRYWYLNHTSTGKTSLPRCWLISNGSYLNETKFSDDIEQQADNMITEMLQKEYIDRQGKTPLGLVDLFVFSTSFYLISIFLHLVKIPTHRHIVGKPCPKPHRLNHMGICSCGLYKQPGVPVRWKR

SEQ ID NO: 34825 - protein, 491 aa, Artificial Sequence
  derived and/or modified protein sequence (artificial) from LASV(AV;Clade V)__CCA30314__GPCmut9
MGQIVTFFQEVPHVIEEVMNIVLIALSILAVLKGLYNIATCGLIGLITFLLLCGRSCSSNLYKGVYELQSLDLNMETLNMTMPLSCTKNNSHHYIRVGNDTGLELTLTNTSILNHKFCNLSDAHKKDLYDHALMSIISTFHLSIPNFNQYEAMSCDFNGGKISVQYNLSHSYAIDAANHCGTVANGILQTFMRMAWGGSYIALDSGCGNWDCIMTSYQYLIIQNTTWENHCQFSRPSPIGYLGLLSQRTRDIYISRRLLGTFTWTLSDSEGNATPGGYCLTRWMLIEAELKCFGNTAVAKCNEKHDEEFCDMLRLFDFNKQAISRLKSEAQMSIQLINKAVNALINDQLIMKNHLRDIMCIPYCNYSKYWYLNHTITGKTSLPKCWLVSNGSYLNETHFSDDIEQQADNMITEMLQKEYMERQGKTPLGLVDLFVFSTSFYLISIFLRLVKIPTHRHIVGKPCPKPHRLNHMGICSCGLYKQPGVPVRWKR

SEQ ID NO: 34826 - protein, 490 aa, Artificial Sequence
  derived and/or modified protein sequence (artificial) from LASV(Togo/2016/7082;Clade VI)__AMR44577__GPCmut9
MGQIITFFQEVPHVIEEVMNIVLIALSLLAILKGVYNVATCGIIGLVTFLFLCGRSCSLIYKGSYELQTLELNMETLNMTMPLSCTKNSSHHYIRVGNETGLELTLTNTSIINHKFCNLSDAHKRNLYDHALMSILSTFHLSIPNFNQYEAMSCDFNGGKISVQYNLSHAYAVDAAEHCGTVANGVLQTFMRMAWGGSYIALDSGCGNWDCIMTSYQYLIIQNTTWEDHCQFSRPSPIGYLGLLSQRTRDIYISRRLLGTFTWTLSDSEGNETPGGYCLTRWMLIEAELKCFGNTAVAKCNEKHDEEFCDMLRLFDFNKQAIQRLKSEAQMSIQLINKAVNALINDQLIMKNHLRDMMCIPYCNYSKYWYLNHTSSGRTSLPKCWLVSNGSYLNETHFSDDIEQQADNMITEMLQKEYIDRQGKTPLGLVDLFVFSTSFYLISIFLHLIKIPTHRHIVGKPCPKPHRLNHMGICSCGLYKQPGVPTRWKR

SEQ ID NO: 34827 - protein, 490 aa, Artificial Sequence
  derived and/or modified protein sequence (artificial) from LASV(KAK-428;Clade n.d. (VII))__ANH09740__GPCmut9
MGQIVTFFQEVPHVIEEVMNIVLIALSLLAILKGLYNFATCGVIGLITFLLLCGRSCSATYKGQYELQTLELNMESLNMTMPLSCTKNNSHHYIRAGNNTGLELTLTNTSIISHKFCNLSDAHKKNLYDHTLMSIITTFHLSIPNFNQYEAMSCDFNGGKISIQYNLSHSYAGDAAQHCGTVANGVLQTFMRMAWGGSYLALDSGCRGWDCIISSYQYLIIQNTTWDDHCQFSRPSPIGYLGFVSQKTRDIYISRRLLGTFTWTLSDSEGHDMPGGYCLTRWMLIEADLKCFGNTAVAKCNEKHDEEFCDMWRLFDFNKQAIQRLKAEAQMNIQLINKAVNALINDQLMMKNHLRDIMCIPYCNYSKFWYLNNTTTGRTSLPRCWLISNGSYLNETHFSDDIEQQADNMITEMLQKEYMDRQGKTPLGLVDLFVFSTSFYLITIFLHLVKIPTHRHIVGKPCPKPHRLNHMGICSCGLYKQPGVPVRWKR

SEQ ID NO: 34828 - protein, 490 aa, Artificial Sequence; identical to SEQ ID NO: 34822
  derived and/or modified protein sequence (artificial) from LASV(Pinneo-NIG-1969;Clade I)__AIT17836__GPCmut9

SEQ ID NO: 34829 - protein, 490 aa, Artificial Sequence
  derived and/or modified protein sequence (artificial) from LASV(ISTH0009-NIG-2011;Clade II)__AIT17404__GPCmut9
MGQIITFFQEVPHVIEEVMNIVLIALSLLAILKGIYNVATCGLFGLVSFLLLCGRSCSTTYKGVYELQTLELDMASLNMTMPLSCTKNNSHHYIMVGNETGLELTLTNTSIINHKFCNLSDAHKKNLYDHALMSIISTFHLSIPNFNQYEAMSCDFNGGKISVQYNLSHAYAVDAANHCGTIANGVLQTFMRMAWGGSYIALDSGCGSWDCIMTSYQYLIIQNTTWEDHCQFSRPSPIGYLGLLSQRTRDIYISRRLLGTFTWTLSDSEGNETPGGYCLTRWMLIEAELKCFGNTAVAKCNEKHDEEFCDMLRLFDFNKQAIRRLKTEAQMSIQLINKAVNALINDQLIMKNHLRDIMCIPYCNYSKYWYLNHTVTGKTSLPRCWLVSNGSYLNETHFSDDIEQQADNMITELLQKEYMDRQGKTPLGLVDLFVFSTSFYLISIFLHLIKIPTHRHITGKPCPKPHRLNHMGICSCGLYKHPGVPVKWKR

SEQ ID NO: 34830 - protein, 490 aa, Artificial Sequence
  derived and/or modified protein sequence (artificial) from LASV(ISTH2010-NIG-2012;Clade II)__AIT17482__GPCmut9
MGQIITFFQEVPHVIEEVMNIVLIALSLLAILKGIYNVATCGLFGLVSFLLLCGRSCSTTYKGVYELQTLELDMASLNMTMPLSCTKNNSHHYIMVGNETGLELTLTNTSIINHKFCNLSDAHKKNLYDHALMSIISTFHLSIPNFNQYEAMSCDFNGGKISVQYNLSHAYAVDAANHCGTIANGVLQTFMRMAWGGSYIALDSGCGSWDCIMTSYQYLIIQNITWEDHCQFSRPSPIGYLGLLSQRTRDIYISRRLLGTFTWTLSDSEGNETPGGYCLTRWMLIEAELKCFGNTAVAKCNEKHDEEFCDMLRLFDFNKQAIRRLKTEAQMSIQLINKAVNALINDQLIMKNHLRDIMCIPYCNYSKYWYLNHTVTGKTSLPRCWLVSNGSYLNETHFSDDIEQQADNMITELLQKEYIDRQGKTPLGLVDLFVFSTSFYLISIFLHLVKIPTHRHVVGKPCPKPHRLNHMGICSCGLYKHPGVPVKWKR

SEQ ID NO: 34831 - protein, 490 aa, Artificial Sequence
  derived and/or modified protein sequence (artificial) from LASV(Lassa virus/H.sapiens-wt/NGA/2015/ISTH_0543;Clade II)__AVO03639__GPCmut9
MGQIITFFQEVPHVIEEVMNIVLIALSLLAILKGIYNVATCGLFGLVSFLLLCGRSCSTTYKGVYELQTLELDMANLNMTMPLSCTKNNSHHYIMVGNETGLELTLTNTSIINHKFCNLSDAHKKNLYDHALMSIISTFHLSIPNFNQYEAMSCDFNGGKISVQYNLSHTYAVDAANHCGTIANGVLQTFMRMAWGGSYIALDSGCGSWDCIMTSYQYLVIQNTTWEDHCQFSRPSPIGYLGLLSQRTRDIYISRRLLGTFTWTLSDSEGNETPGGYCLTRWMLIEAELKCFGNTAVAKCNEKHDEEFCDMLRLFDFNKQAIRRLKTEAQMSIQLINKAVNALINDQLIMKNHLRDIMCIPYCNYSKYWYLNHTVTGKTSLPRCWLVSNGSYLNETHFSDDIEQQADNMITELLQKEYIDRQGKTPLGLVDLFVFSTSFYLISIFLHLVKIPTHRHITGKPCPKPHRLNHMGICSCGLYKHPGVPVKWKR

SEQ ID NO: 34832 - protein, 490 aa, Artificial Sequence
  derived and/or modified protein sequence (artificial) from LASV(Lassa virus/H.sapiens-wt/NGA/2016/ISTH_0009;Clade II)__AVO03571__GPCmut9
MGQIITFFQEVPHVIEEVMNIVLIALSLLAILKGIYNVATCGLLGLVSFLLLCGRSCSTTYKGVYELQTLELDMASLNMTMPLSCTKNNSHHYIMVGNETGLELTLTNTSIINHKFCNLSDAHKKNLYDHALMSIISTFHLSIPNFNQYEAMSCDFNGGRISVQYNLSHSYAVDAANHCGTIANGVLQTFMRMAWGGSYIALDSGCGSWDCIMTSYQYLIIQNTTWEDHCQFSRPSPIGYLGLLSQRTRDIYISRRLLGTFTWTLSDSEGNETPGGYCLTRWMLIEAELKCFGNTAVAKCNEKHDEEFCDMLRLFDFNKQAIRRLKTEAQMSIQLINKAVNALINDQLIMKNHLRDIMCIPYCNYSKYWYLNHTVTGKTSLPRCWLVSNGSYLNETHFSDDIEQQADNMITELLQKEYIDRQGKTPLGLVDLFVFSTSFYLISIFLHLVKIPTHRHITGKPCPKPHRLNHMGICSCGLYNHPGVPVKWKR

SEQ ID NO: 34833 - protein, 490 aa, Artificial Sequence
  derived and/or modified protein sequence (artificial) from LASV(Lassa virus/H.sapiens-wt/NGA/2016/ISTH_0017;Clade II)__AVO03567__GPCmut9
MGQIITFFQEVPHVIEEVMNIVLIALSLLAILKGIYNVATCGLFGLVSFLLLCGRSCSTTYKGVYELQTLELDMASLNMTMPLSCTKNNSHHYIMVGNETGLELTLTNTSIINHKFCNLSDAHKKNLYDHALMSIISTFHLSIPNFNQYEAMSCDFNGGKISVQYNLSHTYAIDAANHCGTIANGVLQTFMRMAWGGSYIALDSGCGSWDCIMTSYQYLIIQNTTWEDHCQFSRPSPIGYLGLLSQRTRDIYISRRLLGTFTWTLSDSEGNETPGGYCLTRWMLIEAELKCFGNTAVAKCNEKHDEEFCDMLRLFDFNKQAIRRLKTEAQMSIQLINKAVNALINDQLIMKNHLRDIMCIPYCNYSKYWYLNHTVTGKTSLPRCWLVSNGSYLNETHFSDDIEQQADNMITELLQKEYMDRQGKTPLGLVDLFVFSTSFYLISIFLHLVRIPTHRHVIGKPCPKPHRLNHMGICSCGLYKHPGVPVKWKR

SEQ ID NO: 34834 - protein, 490 aa, Artificial Sequence
  derived and/or modified protein sequence (artificial) from LASV(Lassa virus/H.sapiens-wt/NGA/2018/ISTH_0959;Clade II)__AVV65099__GPCmut9
MGQIITFFQEVPHVIEEVMNIVLIALSLLAILKGIYNVVTCGLFGLVSFLLLCGRSCSTTYKGVYELQTLELDMASLNMTMPLSCTKNNSHHYIMVGNETGLELTLTNTSIINHKFCNLSDAHKKNLYDHALMSIISTFHLSIPNFNQYEAMSCDFNGGKISVQYNLSHAYAIDAANHCGTIANGVLQTFMRMAWGGSYIALDSGCGSWDCIMTSYQYLIIQNTTWEDHCQFSRPSPIGYLGLLSQRTRDIYISRRLLGTFTWTLSDSEGNETPGGYCLTRWMLIEAELKCFGNTAVAKCNEKHDEEFCDMLRLFDFNKQAIRRLKTEAQMSIQLINKAVNALINDQLIMKNHLRDIMCIPYCNYSKYWYLNHTVTGKTSLPRCWLVSNGSYLNETHFSDDIEQQADNMITELLQKEYIDRQGKTPLGLVDLFVFSTSFYLISIFLHLVKIPTHRHVIGKPCPKPHRLNHMGICSCGLYKHPGVPVKWKR

SEQ ID NO: 34835 - protein, 490 aa, Artificial Sequence
  derived and/or modified protein sequence (artificial) from LASV(LASV003-NIG-2008;Clade II)__AIT17580__GPCmut9
MGQIITFFQEVPHVIEEVMNIVLIALSLLAILKGIYNVATCGLFGLVSFLLLCGRSCSTTYKGVYELQTLELDMASLNMTMPLSCTKNNSHHYIMVGNETGLELTLTNTSIINHKFCNLSDAHKKNLYDHALMSIISTFHLSIPNFNQYEAMSCDFNGGKISVQYNLSHTYAVDAANHCGTIANGVLQTFMRMAWGGSYIALDSGCGSWDCIMTSYQYLIIQNTTWEDHCQFSRPSPIGYLGLLSQRTRDIYISRRLLGTFTWTLSDSESNETPGGYCLTRWMLIEAELKCFGNTAVAKCNEKHDEEFCDMLRLFDFNKQAIRRLKAEAQMSIQLINKAVNALINDQLIMKNHLRDIMCIPYCNYSKYWYLNHTVTGRTSLPRCWLVSNGSYLNETHFSDDIEQQADNMITELLQKEYMDRQGKTPLGLVDLFVFSTSFYLISIFLHLVKIPTHRHVIGKPCPKPHRLNHMGICSCGLYKHPGVPVKWKR

SEQ ID NO: 34836 - protein, 490 aa, Artificial Sequence
  derived and/or modified protein sequence (artificial) from LASV(LASV035-NIG-2009;Clade II)__AIT17588__GPCmut9
MGQIITFFQEVPHVIEEVMNIVLIALSLLAILKGIYNVATCGLFGLVSFLLLCGRSCSTTYKGVYELQTLELDMASLNMTMPLSCTKNNSHHYIMVGNETGLELTLTNTSIINHKFCNLSDAHKKNLYDHALMSIISTFHLSIPNFNQYEAMSCDFNGGKISVQYNLSHAYAVDAANHCGTIANGVLQTFMRMAWGGSYIALDSGCGSWDCIMTSYQYLIIQNTTWEDHCQFSRPSPIGYLGLLSQRTRDIYISRRLLGTFTWTLSDSEGNETPGGYCLTRWMLIEAELKCFGNTAVAKCNEKHDEEFCDMLRLFDFNKQAIRRLKAEAQMSIQLINKAVNALINDQLIMKNHLRDIMCIPYCNYSKYWYLNHTVTGKTSLPRCWLVSNGSYLNETHFSDDIEQQADNMITELLQKEYIDRQGKTPLGLVDLFVFSTSFYLISIFLHLVKIPTHRHVIGKPCPKPHRLNHMGICSCGLYKHPGVPVKWKR

SEQ ID NO: 34837 - protein, 490 aa, Artificial Sequence
  derived and/or modified protein sequence (artificial) from LASV(LASV1000-NIG-2009;Clade II)__AIT17782__GPCmut9
MGQIITFFQEVPHVIEEVMNIVLIALSLLAILKGIYNVATCGLFGLVSFLLLCGRSCSTTYKGVYELQTLELDMASLNMTMPLSCTKNNSHHYIMVGNETGLELTLTNTSIINHKFCNLSDAHKKNLYDHALMSIISTFHLSIPNFNQYEAMSCDFNGGKISVQYNLSHTYAVDAANHCGTIANGVLQTFMRMAWGGSYIALDSGCGSWDCIMTSYQYLIIQNTTWEDHCQFSRPSPIGYLGLLSQRTRDIYISRRLLGTFTWTLSDSEGNETPGGYCLTRWMLIEAELKCFGNTAVAKCNEKHDEEFCDMLRLFDFNKQAIKRLKTEAQMSIQLINKAVNALINDQLIMKNHLRDIMCIPYCNYSKYWYLNHTVTGKTSLPRCWLVSNGSYLNETHFSDDIEQQADNMITELLQKEYIDRQGKTPLGLVDLFVFSTSFYLISIFLHLVKIPTHRHVVGKPCPKPHRLNHMGICSCGLYKHPGVPVKWKR

SEQ ID NO: 34838 - protein, 490 aa, Artificial Sequence
  derived and/or modified protein sequence (artificial) from LASV(LASV221-NIG-2010;Clade II)__AIT17624__GPCmut9
MGQIITFFQEVPHVIEEVMNIVLIALSLLAILKGIYNVATCGLFGLVSFLLLCGRSCSTTYKGVYELQTLELDMASLNMTMPLSCTKNNSHHYIMVGNETGLELTLTNTSIINHKFCNLSDAHKKNLYDHALMSIISTFHLSIPNFNQYEAMSCDFNGGKISVQYNLSHTYAIDAANHCGTIANGVLQTFMRMAWGGSYIALDSGCGSWDCIMTSYQYLIIQNTTWEDHCQFSRPSPIGYLGLLSQRTRDIYISRRLLGTFTWTLSDSEGNETPGGYCLTRWMLIEAELKCFGNTAVAKCNEKHDEEFCDMLRLFDFNKQAIRRLKTEAQMSIQLINKAVNALINDQLIMKNHLRDIMCIPYCNYSKYWYLNHTVTGKTSLPRCWLVSNGSYLNETHFSDDIEQQADNMITEMLQKEYMDRQGKTPLGLVDLFVFSTSFYLISIFLHLVKIPTHRHVIGKPCPKPHRLNHMGICSCGLYKHPGVPVKWKR

SEQ ID NO: 34839 - protein, 490 aa, Artificial Sequence
  derived and/or modified protein sequence (artificial) from LASV(LASV237-NIG-2010;Clade II)__AIT17638__GPCmut9
MGQIITFFQEVPHVIEEVMNIVLIALSLLAILKGIYNVATCGLFGLVSFLLLCGRSCSTTYKGVYELQTLELDMASLNMTMPLSCTKNNSHHYIMVGNETGLELTLTNTSIINHKFCNLSDAHKKDLYDHALMSIISTFHLSIPNFNQYEAMSCDFNGGKISVQYNLSHTYAVDAANHCGTIANGVLQTFMRMAWGGSYIALDSGCGSWDCIMTSYQYLIIQNTTWEDHCQFSRPSPIGYLGLLSQRTRDIYISRRLLGTFTWTLSDSEGNETPGGYCLTRWMLIEAELKCFGNTAVAKCNEKHDEEFCDMLRLFDFNKQAIRRLKTEAQMSIQLINKAVNALINDQLIMKNHLRDIMCIPYCNYSKYWYLNHTVTGKTSLPRCWLVSNGSYLNETHFSDDIEQQADNMITELLQKEYMDRQGKTPLGLVDLFVFSTSFYLISIFLHLIKIPTHRHITGKPCPKPHRLNHMGICSCGLYKHPGVPVKWKR

SEQ ID NO: 34840 - protein, 490 aa, Artificial Sequence
  derived and/or modified protein sequence (artificial) from LASV(LASV253-NIG-2011;Clade II)__AIT17670__GPCmut9
MGQIITFFQEVPHVIEEVMNIVLIALSLLAILKGIYNVATCGLFGLVSFLLLCGRSCSTTYKGVYELQTLELDMASLNMTMPLSCTKNNSHHYIMVGNETGLELTLTNTSIINHKFCNLSDAHKKNLYDHALMSIISTFHLSIPNFNQYEAMSCDFNGGKISVQYNLSHTYAVDAANHCGTIANGVLQTFMRMAWGGSYIALDSGCGSWDCIMTSYQYLIIQNTTWEDHCQFSRPSPIGYLGLLSQRTRDIYISRRLLGTFTWTLSDSEGNETPGGYCLTRWMLIEAELKCFGNTAVAKCNEKHDEEFCDMLRLFDFNKQAIRRLKAEAQMSIQLINKAVNALINDQLIMKNHLRDIMCIPYCNYSKYWYLNHTVTGRTSLPRCWLVSNGSYLNETHFSDDIEQQADNMITELLQKEYIDRQGKTPLGLVDLFVFSTSFYLISIFLHLVKIPTHRHIIGKPCPKPHRLNHMGICSCGLYKHPGVPVKWKR

SEQ ID NO: 34841 - protein, 490 aa, Artificial Sequence
  derived and/or modified protein sequence (artificial) from LASV(LASV254-NIG-2011;Clade II)__AIT17674__GPCmut9
MGQIITFFQEVPHVIEEVMNIVLIALSLLAILKGIYNVATCGLFGLVSFLLLCGRSCSTTYKGVYELQTLELDMTNLNMTMPLSCTKNNSHHYIMVGNETGLELTLTNTSIINHKFCNLSDAHKKNLYNHALMSIISTFHLSIPNFNQYEAMSCDFNGGKISVQYNLSHSYAVDAANHCGTIANGVLQTFMRMAWGGSYIALDSGCGNWDCIMTSYQYLIIQNTTWEDHCQFSRPSPIGYLGLLSQRTRDIYISRRLLGTFTWTLSDSEGNETPGGYCLTRWMLIEAELKCFGNTAVAKCNEKHDEEFCDMLRLFDFNKQAIRRLKTEAQANIQLINKAVNALINDQLIMKNHLRDIMCIPYCNYSKYWYLNHTVTGKTSLPRCWLVSNGSYLNETHFSDDIEQQADNMITELLQKEYMDRQGKTPLGLVDLFVFSTSFYLISIFLHLVKIPTHRHVIGKPCPKPHRLNHMGICSCGLYKHPGVPVKWKR

SEQ ID NO: 34842 - protein, 490 aa, Artificial Sequence
  derived and/or modified protein sequence (artificial) from LASV(Nig08-A19;Clade III)__ADU56618__GPCmut9
MGQIVTFFQEVPHVIEEVMNIVLIALSILAILKGLYNIATCGLIGLVTFLLLSGRSCSMTYKGVYELQTLELNMNTLNMTMPLSCTKNNSHHYIMVGNETGLELTLTNTSLLHHKFCNLSDAHKKNLYDHTLMSIISTFHLSIPNFNQYEAMSCDFNGGKITVQYNLSHSYAIDAANHCGTVANGVLQTFMRMAWGGSYIALDSGCGKWDCIMTSYQYLIIQNTTWEDHCQFSRPSPIGYLGLLSQRTRDIYISRRLLGTFTWTLSDSEGNETPGGYCLTRWMLIEAELKCFGNTAVAKCNEKHDEEFCDMLRLFDFNKQAIRRLKAEAQMSIQLINKAVNALINDQLIMKNHLRDIMCIPYCNYSKYWYLNHTSTGRTSLPRCWLVSNGSYLNETHFSDDIEQQADNMITEMLQKEYLDRQGKTPLGLVDLFVFSTSFYLISIFLHLVKIPTHRHIVGKPCPKPHRLNHMGICSCGLYKQPGVPVRWKR

SEQ ID NO: 34843 - protein, 491 aa, Artificial Sequence
  derived and/or modified protein sequence (artificial) from LASV(G1180-SLE-2010;Clade IV)__AIT17168__GPCmut9
MGQIVTFFQEVPHVIEEVMNIVLIALSILAVLKGLYNFATCGLVGLLTFLLLCGRSCTASRYKGVYELQTLELNMETLNMTMPLSCTKNNSHHYIMVGNETGLELTLTNTSIINHKFCNLSDAHKKNLYDHALMSIISTFHLSIPNFNQYEAMSCDFNGGKISVQYNLSHSYAGDAANHCGTVANGVLQTFMRMAWGGSYIALDSGCGSWDCIMTSYQYLIIQNTTWEDHCQFSRPSPIGYLGLLSQRTRDIYISRRLLGTFTWTLSDSEGKDTPGGYCLTRWMLIEAELKCFGNTAVAKCNEKHDEEFCDMLRLFDFNKQAIQRLKAEAQMSIQLINKAVNALINDQLIMKNHLRDIMCIPYCNYSKYWYLNHTTTGKTSLPKCWLVSNGSYLNETHFSDDIEQQADNMITEMLQKEYMERQGKTPLGLVDLFVFSTSFYLISIFLHLVKIPTHRHIVGKSCPKPHRLNHMGICSCGLYKQPGVPVKWKR

SEQ ID NO: 34844 - protein, 491 aa, Artificial Sequence
  derived and/or modified protein sequence (artificial) from LASV(G1442-SLE-2011;Clade IV)__AIT17180__GPCmut9
MGQIVTFFQEVPHVIEEVMNIVLIALSILAVLKGLYNVATCGLIGLVTFLLLCGRSCTTTLYKGVYELQTLELNMETLNMTMPLSCTKNNSHHYIRVGNETGLELTLTNTSIINHKFCNLSDAHKKNLYDHALMSIISTFHLSIPNFNQYEAMSCDFNGGKISVQYNLSHSYAGDAANHCGTVANGVLQTFMRMAWGGSYIALDSGCGNWDCIMTSYQYLIIQNTTWDDHCQFSRPSPIGYLGLLSQRTRDVYISRRLLGTFTWTLSDSEGKDTPGGYCLTRWMLIEAELKCFGNTAVAKCNEKHDEEFCDMLRLFDFNKQAIQRLKAEAQMSIQLINKAVNALINDQLIMKNHLRDIMCIPYCNYSKYWYLNNTATGKTSLPKCWLISNGSYLNETHFSDDIEQEADNMITEMLQKEYMERQGKTPLGLVDLFVFSTSFYLISIFLHLVKIPTHRHIVGKSCPKPHRLNHMGICSCGLYKQPGVPVRWKR

SEQ ID NO: 34845 - protein, 491 aa, Artificial Sequence
  derived and/or modified protein sequence (artificial) from LASV(G3010-SLE-2013;Clade IV)__AIT17344__GPCmut9
MGQIVTFFQEVPHVIEEVMNIVLIALSILAVLKGLYNFATCGLVGLVTFLLLCGRSCTTSLYKGVYELQTLELNMETLNMTMPLSCTKNNSHHYIMVGNETGLELTLTNTSIINHKFCNLSDAHKKNLYNHALMSIISTFHLSIPNFNQYEAMSCDFNGGKISVQYNLSHSYAGDAASHCGTVANGVLQTFMRMAWGGSYIALDSGCGKWDCIMTSYQYLIIQNTTWEDHCQFSRPSPIGYLGLLSQRTRDIYISRRLLGTFTWTLSDSEGKDTPGGYCLTRWMLIEAELKCFGNTAVAKCNEKHDEEFCDMLRLFDFNKQAIQRLKTEAQMSIQLINKAVNALINDQLIMKNHLRDIMCIPYCNYSKYWYLNHTTTGKTSLPKCWLVSNGSYLNETHFSDDIEQQADNMITEMLQKEYMERQGKTPLGLVDLFVFSTSFYLISIFLHLVKIPTHRHIVGKSCPKPHRLNHMGICSCGLYKQPGVPVRWKR

SEQ ID NO: 34846 - protein, 491 aa, Artificial Sequence
  derived and/or modified protein sequence (artificial) from LASV(G502-SLE-2009;Clade IV)__AIT17126__GPCmut9
MGQIVTFFQEVPHVIEEVMNIVLIALSILAVLKGLYNFATCGLVGLLTFLLLCGRSCTTGLYKGVYELQTLELNMETLNMTMPLSCTKNNSHHYIMVGNETGLELTLTNTSIINHKFCNLSDAHKKNLYDHALMSIISTFHLSIPNFNQYEAMSCDFNGGKISVQYNLSHSYAGDAADHCGTVANGVLQTFMRMAWGGSYIALDSGCGRWDCIMTSYQYLIIQNTTWEDHCQFSRPSPIGYLGLLSQRTRDIYISRRLLGTFTWTLSDSEGKDTPGGYCLTRWMLIEAELKCFGNTAVAKCNEKHDEEFCDMLRLFDFNKQAIQRLKAEAQMSIQLINKAVNALINDQLVMKNHLRDIMCIPYCNYSRYWYLNHTTTGRTSLPKCWLVSNGSYLNETHFSDDIEQQADNMITEMLQKEYMERQGKTPLGLVDLFVFSTSFYLISIFLHLVKIPTHRHIVGKSCPKPHRLNHMGICSCGLYKQPGVPVKWKR

SEQ ID NO: 34847 - protein, 491 aa, Artificial Sequence
  derived and/or modified protein sequence (artificial) from LASV(G733-SLE-2010;Clade IV)__AIT17154__GPCmut9
MGQIVTFFQEVPHVIEEVMNIVLIALSILAVLKGLYNFATCGIVGLVSFLLLCGRSCTTSLYKGVYELQTLELNMETLNMTMPLSCTKNNSHHYIMVGNETGLELTLTNTSIINHKFCNLSDAHKKNLYDHALMSIISTFHLSIPNFNQYEAMSCDFNGGKISVQYNLSHSYAGDAANHCGTIANGVLQTFMRMAWGGSYIALDSGCDRWDCIMTSYQYLIIQNTTWEDHCQFSRPSPIGYLGLLSQRTRDIYISRRLLGTFTWTLSDSEGKDTPGGYCLTRWMLIEAELKCFGNTAVAKCNEKHDEEFCDMLRLFDFNKQAIQRLKAEAQMSIQLINKAVNALINDQLIMKNHLRDIMCIPYCNYSKYWYLNHTTTGKTSLPKCWLVSNGSYLNETHFSDDIEQQADNMITEMLQKEYMERQGKTPLGLVDLFVFSTSFYLISIFLHLVKIPTHRHVVGKSCPKPHRLNHMGICSCGLYGQPGVPVKWKR

SEQ ID NO: 34848 - protein, 491 aa, Artificial Sequence
  derived and/or modified protein sequence (artificial) from MOPV/LASV reassortant(IGS-1;Clade IV)__AFY05576__GPCmut9
MGQIVTFFQEVPHVIEEVMNIVLIALSVLAVLKGLYNFATCGLVGLVTFLLLCGRSCTTSLYKGVYELQTLELNMETLNMTMPLSCTKNNSHHYIMVGNETGLELTLTNTSIINHKFCNLSDAHKKNLYDHALMSIISTFHLSIPNFNQYEAMSCDFNGGKISVQYNLSHSYAGDAANHCGTVANGVLQTFMRMAWGGSYIALDSGCGNWDCIMTSYQYLIIQNTTWEDHCQFSRPSPIGYLGLLSQRTRDIYISRRLLGTFTWTLSDSEGEDTPGGYCLTRWMLIEAELKCFGNTAVAKCNEKHDEEFCDMLRLFDFNKQAIQRLKAEAQMSIQLINKAVNALINDQLIMKNHLRDIMCIPYCNYSKYWYLNHTTTGRTSLPKCWLVSNGSYLNETHFSDDIEQQADNMITEMLQKEYMERQGKTPLGLVDLFVFSTSFYLISIFLHLVKIPTHRHIVGKSCPKPHRLNHMGICSCGLYKQPGVPVKWKR

SEQ ID NO: 34849 - protein, 491 aa, Artificial Sequence
  derived and/or modified protein sequence (artificial) from LASV(LM765-SLE-2012;Clade IV)__AIT17814__GPCmut9
MGQIVTFFQEVPHVIEEVMNIVLIALSILAVLKGLYNFATCGLVGLVTFLLLCGRSCTTSLYKGVYELQTLELNMETLNMTMPLSCTKNNSHHYIMVGNETGLELTLTNTSIIDHKFCNLSDAHRKNLYDHALMSIISTFHLSIPNFNQYEAMSCDFNGGKISVQYNLSHSYAKDAADHCGTVANGVLQTFMRMAWGGSYIALDSGCGRWDCIMTSYQYLIIQNTTWEDHCQFSRPSPIGYLGLLSQRTRDIYISRRLLGTFTWTLSDSEGKDTPGGYCLTRWMLIEAELKCFGNTAVAKCNEKHDEEFCDMLRLFDFNKQAIQRLKAEAQMSIQLINKAVNALINDQLIMKNHLRDIMCIPYCNYSKYWYLNHTTTGKTSLPKCWLVSNGSYLNETHFSDDIEQQADNMITEMLQKEYMERQGKTPLGLVDLFVFSTSFYLISIFLHLVKIPTHRHIVGKPCPKPHRLNHMGICSCGLYKQPGVPVKWKR

SEQ ID NO: 34850 - protein, 491 aa, Artificial Sequence
  derived and/or modified protein sequence (artificial) from LASV(LM776-SLE-2012;Clade IV)__AIT17824__GPCmut9
MGQIVTFFQEVPHVIEEVMNIVLIALSILAVLKGLYNFATCGLVGLVTFLLLCGRSCTTSVYKGVYELQTLELNMETLNMTMPLSCTKNNSHHYIMVGNETGLELTLTNTSIINHKFCNLSDAHKKNLYDHALMSIISTFHLSIPNFNQYEAMSCDFNGGKISVQYNLSHSYAGDAANHCGTVANGVLQTFMRMAWGGSYIALDSGCGKWDCIMTSYQYLIIQNTTWEDHCQFSRPSPIGYLGLLSQRTRDIYISRRLLGTFTWTLSDSEGKDTPGGYCLTRWMLIEAELKCFGNTAVAKCNEKHDEEFCDMLRLFDFNKQAIQRLKAEAQMSIQLINKAVNALINDQLIMKNHLRDIMCIPYCNYSKYWYLNHTTTGKTSLPKCWLVSNGSYLNETHFSDDIEQQADNMITEMLQKEYMERQGKTPLGLVDLFVFSTSFYLISIFLHLVKIPTHRHIVGKSCPKPHRLNHMGICSCGLYKQPGVPVRWKR

SEQ ID NO: 34851 - protein, 491 aa, Artificial Sequence
  derived and/or modified protein sequence (artificial) from LASV(Mad39;Clade IV)__ANH09722__GPCmut9
MGQIVTFFQEVPHVIEEVMNIVLIALSILAVLKGLYNVATCGLIGLVTFLLLCGRSCTTTLYKGVYELQALELNMETLNMTMPLSCTKNNSHHYIRVGNETGLELTLTNTSLINHKFCNLSDAHKKNLYDHALMSIISTFHLSIPNFNQYEAMSCDFNDGKISVQYNLSHTYAGDTANHCGTVANGVLQTFMRMAWGGSYIALDSGCGGWDCIMTSYQYLIIQNTTWEDHCQFSRPSPIGYLGLLSQRTRDIYISRRLLGTFTWTLSDSEGKDTPGGYCLTRWMLIEAELKCFGNTAVAKCNEKHDEEFCDMLRLFDFNKQAIQRLKAEAQMSIQLINKAVNALINDQLIMKNHLRDIMCIPYCNYSKYWYLNHTVTGKTSLPKCWLVSNGSYLNETHFSDDIEQQADNMITEMLQKEYMERQGKTPLGLVDLFVFSTSFYLISIFLHLVKIPTHRHVVGKPCPKPHRLNHMGICSCGFYKQPGVPVRWKR

SEQ ID NO: 34852 - protein, 491 aa, Artificial Sequence
  derived and/or modified protein sequence (artificial) from LASV(Z0947-SLE-2011;Clade IV)__AIT17840__GPCmut9
MGQIVTFFQEVPHVIEEVMNIVLIALSILAVLKGLYNFATCGLVGLVTFLLLCGRSCTISLYKGVYELQTLELNMETLNMTMPLSCTKNNSHHYIMVGNETGLELTLTNTSIINHKFCNLSDAHKKNLYDHALMSIISTFHLSIPNFNQYEAMSCDFNGGKISVQYNLSHSYAGDAANHCGTVANGVLQTFMRMAWGGSYIALDSGCDRWDCIMTSYQYLIIQNTTWEDHCQFSRPSPIGYLGLLSQRTRDIYISRRLLGTFTWTLSDSEGKDTPGGYCLTRWMLIEAELKCFGNTAVAKCNEKHDEEFCDMLRLFDFNKQAIQRLKAEAQMSIQLINKAVNALINDQLIMKNHLRDIMCIPYCNYSKYWYLNHTTTGKTSLPKCWLVSNGSYLNETHFSDDIEQQADNMITEMLQKEYMERQGKTPLGLVDLFVFSTSFYLISIFLHLVKIPTHRHIVGKPCPKPHRLNHMGICSCGLYKQPGVPVKWKR

SEQ ID NO: 34853 - RNA, 1476 nt, Artificial Sequence
  derived and/or modified CDS sequence (opt1) from LASV(Josiah;Clade IV)__NP_694870__GPCmut9
augggccagaucgugaccuucuuccaggaggucccccacgugaucgaggaggugaugaacaucguccugaucgcccucagcgugcuggccgugcugaaggggcucuacaacuucgcgaccugcggccuggucgggcuggugacguuccuccugcugugcggccgcuccugcaccaccagccucuacaaggggguguacgagcugcagacccuggagcucaacauggagacgcugaacaugaccaugccgcuguccugcaccaagaacaacagccaccacuacaucauggucggcaacgagaccggccucgagcugacgcugaccaacaccuccaucaucaaccacaaguucugcaaccucagcgacgcccacaagaagaaccuguacgaccacgcccugauguccaucaucagcaccuuccaccucuccauccccaacuucaaccaguacgaggccaugagcugcgacuucaacgggggcaagaucuccgugcaguacaaccugagccacuccuacgccggggacgcggccaaccacugcggcacgguggccaacgggguccugcagaccuucaugcggauggccuggggcggcagcuacaucgcgcucgacuccgggugcggcaacugggacugcaucaugaccagcuaccaguaccugaucauccagaacaccacgugggaggaccacugccaguucucccggcccagccccaucggguaccugggccuccugucccagcgcacccgggacaucuacaucagccgccggcugcucggcaccuucaccuggacgcugagcgacuccgaggggaaggacaccccgggcggguacugccugacccgcuggaugcucaucgaggccgagcugaagugcuucggcaacaccgccguggccaagugcaacgagaagcacgacgaggaguucugcgacaugcugcggcuguucgacuucaacaagcaggccauccagcgccugaaggcggaggcccagaugagcauccagcugaucaacaaggccgugaacgcccucaucaacgaccagcugaucaugaagaaccaccuccgggacaucaugugcauccccuacugcaacuacuccaaguacugguaccucaaccacacgaccaccggccgcaccagccugcccaagugcuggcuggucuccaacggcagcuaccucaacgagacgcacuucuccgacgacaucgagcagcaggccgacaacaugaucaccgagaugcugcagaaggaguacauggagcggcaggggaagacgccccugggccucguggaccuguucguguucagcaccuccuucuaccugaucagcaucuuccugcaccucgucaagaucccgacccaccgccacaucguggggaaguccugccccaagccccaccggcugaaccacaugggcaucugcagcugcgggcuguacaagcagcccggcgugccggucaaguggaagcgcuga

SEQ ID NO: 34854 - RNA, 1473 nt, Artificial Sequence
  derived and/or modified CDS sequence (opt1) from LASV(LP;Clade I)__AAF86701__GPCmut9
augggccagaucaucaccuucuuccaggaggugccccacgucaucgaggaggugaugaacaucgugcugaucgcccucagccugcuggccauccucaaggggcuguacaacaucgcgaccugcggcaucaucgggcuggucgccuuccucuuccugugcggcaaguccugcagccugacgcucaagggcggguacgagcugcagacccuggagcucaacauggagacccugaacaugaccaugccgcuguccugcacgaagaacagcucccaccacuacauccgcgugggcaacgagaccgggcucgagcugacccugaccaacacgagcaucaucaaccacaaguucugcaaccucuccgacgcccacaagaagaaccuguacgaccacgcccugaugagcaucaucuccaccuuccaccucagcauccccaacuucaaccaguacgaggccauguccugcgacuucaacggcgggaagaucagcgugcaguacaaccugucccacagcuacgcgggcgacgccgccgagcacugcgggaccgucgccaacggcgugcugcagaccuucaugcggauggcguggggcgggcgcuacaucgcccucgacuccggcugcgggaacugggacugcaucaugacgagcuaccaguaccugaucauccagaacaccaccugggaggaccacugccaguucucccggcccagccccaucggcuaccugggccuccugucccagcgcacccgggacaucuacaucagccgccggcugcucgggacguucaccuggacccugagcgacuccgagggcaacgagacccccgggggcuacugccugacgcgcuggaugcucaucgaggccgagcugaagugcuucgggaacaccgccguggccaagugcaacgagaagcacgacgaggaguucugcgacaugcugcggcuguucgacuucaacaagcaggcgauccgccggcugaaggccgaggcccagaugagcauccagcugaucaacaaggccgucaacgcccucaucaacgaccagcugaucaugaagaaccaccuccgcgacaucaugugcauccccuacugcaacuacuccaaguacugguaccucaaccacaccagcuccggccggaccagccugcccaagugcuggcugaucuccaacgggagcuaccucaacgagacgcaguucuccgacgacaucgagcagcaggcggacaacaugaucaccgagaugcugcagaaggaguacaucgagcgccagggcaagaccccgcuggggcucguggacaucuucaucuucagcaccuccuucuaccugaucagcaucuuccugcaccugaucaagaucccgacgcaccggcacaucgugggcaagcccugccccaagccccaccgccucaaccacaugggggucugcuccugcggccuguacaagcacccgggcgugcccaccaaguggaagcgguga

SEQ ID NO: 34855 - RNA, 1473 nt, Artificial Sequence
  derived and/or modified CDS sequence (opt1) from LASV(803213;Clade II)__AAF86703__GPCmut9
augggccagaucaucaccuucuuccaggaggugccccacgucaucgaggaggugaugaacaucgugcugaucgcccucagccugcuggccauccucaaggggaucuacaacgucgcgaccugcggccuguucgggcugaucuccuuccuccugcugugcggccgcagcugcuccgugacguacaaggggguguacgagcuccagacccuggagcugaacauggccaaccucaacaugaccaugccgcugagcugcaccaagaacaacucccaccacuacaucauggucggcaacgagacgggccuggagcucacccugaccaacaccagcaucaucaaccacaaguucugcaaccuguccgacgcccacaagaagaaccucuacgaccacgcccugaugagcaucaucuccacguuccaccugagcauccccaacuucaaccaguacgaggccauguccugcgacuucaacgggggcaagaucagcgugcaguacaaccucucccacagcuucgcgguggacgccgccaaccacugcgggaccaucgccaacggcguccugcagaccuucaugcggauggcguggggcggguccuacaucgcccuggacagcggcugcgggaacugggacugcaucaugaccuccuaccaguaccucaucauccagaacacgaccugggaggaccacugccaguucagccgccccucccccaucggcuaccuggggcugcucagccagcggacccgcgacaucuacaucagccggcgccugcugggcaccuucacguggacccucuccgacagcgagggcaacgaggcccccgggggcuacugccugacccgguggaugcugaucgaggccgagcucaagugcuucgggaacaccgccguggcgaagugcaacgagaagcacgacgaggaguucugcgacaugcugcgccuguucgacuucaacaagcaggccaucaagcggcucaagacggaggcccagauguccauccagcugaucaacaaggccgugaacgcccugaucaacgaccagcucaucaugaagaaccaccuccgcgacaucaugugcauccccuacugcaacuacagccgguacugguaccugaaccacaccgucaccgggaagaccucccugccccgcugcuggcuggugagcaacggcuccuaccugaacgagacgcacuucagcgacgacaucgagcagcaggcggacaacaugaucaccgagaugcuccagaaggaguacauggaccggcagggcaagaccccgcuggggcugguggaccucuucgucuucuccaccagcuucuaccugaucuccaucuuccugcaccuggugaagaucccgacgcaccgccacaucgugggcaagcccugccccaagccccaccggcucaaccacauggggaucugcagcugcggccuguacaagcacccggggguccccgugaaguggaagcgcuga

SEQ ID NO: 34856 - RNA, 1473 nt, Artificial Sequence
  derived and/or modified CDS sequence (opt1) from LASV(GA391;Clade III)__CAA36645__GPCmut9
augggccagaucgugaccuucuuccaggaggucccccacgugaucgaggaggugaugaacaucguccugaucgcccucagcauccuggccauccugaaggggcucuacaacguggcgaccugcggccugaucgggcuggugacguuccuccugcuguccggccgcagcugcucccucaucuacaaggggaccuacgagcugcagacccuggagcucaacauggagacccugaacaugacgaugccgcugagcugcaccaagaacaacucccaccacuacauccgggucggcaacgagaccggccucgagcugacccugacgaacaccagcauccucaaccacaaguucugcaaccuguccgacgcccacaagcgcaaccuguacgaccacagccucauguccaucaucagcaccuuccaccuguccauccccaacuucaaccaguacgaggccaugagcugcgacuucaacgggggcaagaucaccgugcaguacaaccugucccacagcuucgccguggacgccgcggggcacugcggcacgcucgccaacgggguccugcagaccuucaugcggauggccuggggcggcuccuacaucgcccuggacagcgggugcggcaacugggacugcaucaugaccuccuaccaguaccucaucauccagaacaccacgugggacgaccacugccaguucagccggcccucccccaucggguaccugggccugcucagccagcgcacccgggacaucuacaucagccgccggcugcugggcaccuucaccuggacgcucuccgacagcgaggggaacgagaccccgggcggguacugccugacccgcuggaugcugaucgaggcggagcucaagugcuucggcaacaccgccguggccaagugcaacgagaagcacgacgaggaguucugcgacaugcugcggcuguucgacuucaacaagcaggccauccgccggcucaagacggaggcccagauguccauccagcugaucaacaaggcggugaacgcccugaucaacgaccagcucaucaugaagaaccaccuccgcgacaucaugugcauccccuacugcaacuacagccgguacugguaccugaaccacaccuccaccggcaagaccagccugccccgcugcuggcugaucuccaacggcagcuaccugaacgagacgaaguucuccgacgacaucgagcagcaggccgacaacaugaucaccgagaugcuccagaaggaguacaucgaccggcaggggaagacgccccugggccuggucgaccuguucguguucagcaccuccuucuaccucaucagcaucuuccugcaccuggugaagaucccgacccaccgccacaucgucgggaagcccugccccaagccccaccggcucaaccacaugggcaucugcuccugcgggcuguacaagcagccgggcgugcccgugcgcuggaagcgguga

SEQ ID NO: 34857 - RNA, 1476 nt, Artificial Sequence
  derived and/or modified CDS sequence (opt1) from LASV(AV;Clade V)__CCA30314__GPCmut9
augggccagaucgugaccuucuuccaggaggucccccacgugaucgaggaggugaugaacaucguccugaucgcccucagcauccuggccgugcugaaggggcucuacaacaucgcgaccugcggccugaucgggcugaucacguuccuccugcugugcggccgcuccugcagcuccaaccucuacaaggggguguacgagcugcagagccuggaccucaacauggagacccugaacaugaccaugccgcuguccugcaccaagaacaacagccaccacuacauccgggucggcaacgacacgggccucgagcugacccugaccaacaccuccauccucaaccacaaguucugcaaccugagcgacgcccacaagaaggaccuguacgaccacgcccucauguccaucaucagcacguuccaccuguccauccccaacuucaaccaguacgaggccaugagcugcgacuucaacgggggcaagaucuccgugcaguacaaccugagccacuccuacgccaucgacgcggccaaccacugcgggaccguggccaacggcauccuccagaccuucaugcgcauggccuggggcgggagcuacaucgcgcuggacuccggcugcgggaacugggacugcaucaugaccagcuaccaguaccugaucauccagaacacgaccugggagaaccacugccaguucucccgccccagccccaucggcuaccucgggcugcugagccagcggacccgcgacaucuacaucucccggcgccuccugggcaccuucacguggacccugagcgacuccgagggcaacgccacccccgggggcuacugccucacccgguggaugcugaucgaggccgagcugaagugcuucgggaacacggccgucgccaagugcaacgagaagcacgacgaggaguucugcgacaugcuccgccuguucgacuucaacaagcaggcgaucagccggcugaaguccgaggcccagaugagcauccagcucaucaacaaggccgugaacgcccugaucaacgaccagcugaucaugaagaaccaccuccgcgacaucaugugcauccccuacugcaacuacuccaaguacugguaccugaaccacaccaucaccgggaagaccagccugcccaagugcuggcucguguccaacggcagcuaccugaacgagacgcacuucuccgacgacaucgagcagcaggccgacaacaugaucaccgagaugcugcagaaggaguacauggagcggcagggcaagaccccgcucgggcuggucgaccuguucguguucagcaccuccuucuaccugaucagcaucuuccuccgccuggugaagaucccgacgcaccggcacaucgucggcaagcccugccccaagccccaccgccugaaccacauggggaucugcuccugcggccucuacaagcagccgggggugcccgugcgguggaagcgcuga

SEQ ID NO: 34858 - RNA, 1473 nt, Artificial Sequence
  derived and/or modified CDS sequence (opt1) from LASV(Togo/2016/7082;Clade VI)__AMR44577__GPCmut9
augggccagaucaucaccuucuuccaggaggugccccacgucaucgaggaggugaugaacaucgugcugaucgcccucagccugcuggccauccucaagggggucuacaacguggcgaccugcggcaucaucgggcuggugacguuccuguuccucugcggccgcuccugcagccugaucuacaagggguccuacgagcugcagacccucgagcugaacauggagacccugaacaugaccaugccgcucagcugcacgaagaacuccagccaccacuacauccgggucggcaacgagaccggccuggagcugacccucaccaacacguccaucaucaaccacaaguucugcaaccugagcgacgcccacaagcgcaaccuguacgaccacgcccucauguccauccugagcaccuuccaccuguccauccccaacuucaaccaguacgaggccaugagcugcgacuucaacgggggcaagaucuccgugcaguacaaccucagccacgccuacgcgguggacgccgccgagcacugcgggaccgucgccaacggcgugcugcagaccuucaugcggauggcguggggcggguccuacaucgcccuggacagcggcugcgggaacugggacugcaucaugacguccuaccaguaccucaucauccagaacaccaccugggaggaccacugccaguucagccggcccucccccaucggcuaccuggggcugcucagccagcgcacccgggacaucuacaucagccgccggcugcugggcacguucaccuggacccucuccgacagcgagggcaacgagacccccgggggcuacugccugacgcgcuggaugcugaucgaggccgagcucaagugcuucgggaacaccgccguggccaagugcaacgagaagcacgacgaggaguucugcgacaugcugcggcuguucgacuucaacaagcaggcgauccagcgccucaaguccgaggcccagaugagcauccagcugaucaacaaggccgucaacgcccugaucaacgaccagcucaucaugaagaaccaccuccgggacaugaugugcauccccuacugcaacuacuccaaguacugguaccugaaccacaccagcuccgggcgcaccagccugcccaagugcuggcugguguccaacggcagcuaccugaacgagacgcacuucuccgacgacaucgagcagcaggccgacaacaugaucaccgagaugcuccagaaggaguacaucgaccggcagggcaagaccccgcuggggcugguggaccucuucgucuucagcaccuccuucuaccugaucagcaucuuccugcaccugaucaagaucccgacgcaccgccacaucgugggcaagcccugccccaagccccaccggcucaaccacauggggaucugcuccugcggccuguacaagcagccgggggugcccacccgcuggaagcgguga

SEQ ID NO: 34859 - RNA, 1473 nt, Artificial Sequence
  derived and/or modified CDS sequence (opt1) from LASV(KAK-428;Clade n.d. (VII))__ANH09740__GPCmut9
augggccagaucgugaccuucuuccaggaggucccccacgugaucgaggaggugaugaacaucguccugaucgcccucagccugcuggccauccucaaggggcuguacaacuucgcgaccugcggcgugaucgggcugaucacguuccuccugcugugcggccgcuccugcagcgccaccuacaaggggcaguacgagcuccagacccuggagcugaacauggagucccucaacaugaccaugccgcugagcugcacgaagaacaacucccaccacuacauccgggccggcaacaacaccggccuggagcucacccugaccaacacgagcaucaucucccacaaguucugcaaccugagcgacgcccacaagaagaaccucuacgaccacacccugauguccaucaucaccaccuuccaccugagcauccccaacuucaaccaguacgaggccauguccugcgacuucaacgggggcaagaucagcauccaguacaaccucucccacagcuacgcgggggacgccgcccagcacugcggcacgguggccaacgggguccugcagaccuucaugcgcauggcguggggcggcuccuaccuggcccucgacagcgggugccgcggcugggacugcaucaucuccagcuaccaguaccugaucauccagaacaccaccugggacgaccacugccaguucucccggcccagccccaucggguaccugggcuucgugagccagaagacgcgcgacaucuacaucucccggcgccuccugggcaccuucaccuggacccugagcgacuccgaggggcacgacaugccgggcggguacugccucacgcgguggaugcugaucgaggccgaccugaagugcuucggcaacaccgccguggccaagugcaacgagaagcacgacgaggaguucugcgacauguggcgccucuucgacuucaacaagcaggcgauccagcggcugaaggccgaggcccagaugaacauccagcugaucaacaaggccgucaacgcccucaucaacgaccagcugaugaugaagaaccaccuccgcgacaucaugugcauccccuacugcaacuacagcaaguucugguaccugaacaacaccaccacgggccggaccucccugccccgcugcuggcugaucagcaacggcuccuaccucaacgagacccacuucagcgacgacaucgagcagcaggcggacaacaugaucaccgagaugcugcagaaggaguacauggaccggcaggggaagacgccccugggccucguggaccuguucguguucuccaccagcuucuaccugaucaccaucuuccuccaccuggucaagaucccgacccaccgccacaucguggggaagcccugccccaagccccaccggcugaaccacaugggcaucugcuccugcgggcuguacaagcagccgggcgugcccguccgcuggaagcgguga

SEQ ID NO: 34860 - RNA, 1473 nt, Artificial Sequence; identical to SEQ ID NO: 34854
  derived and/or modified CDS sequence (opt1) from LASV(Pinneo-NIG-1969;Clade I)__AIT17836__GPCmut9

SEQ ID NO: 34861 - RNA, 1473 nt, Artificial Sequence
  derived and/or modified CDS sequence (opt1) from LASV(ISTH0009-NIG-2011;Clade II)__AIT17404__GPCmut9
augggccagaucaucaccuucuuccaggaggugccccacgucaucgaggaggugaugaacaucgugcugaucgcccucagccugcuggccauccucaaggggaucuacaacgucgcgaccugcggccuguucgggcugguguccuuccuccugcugugcggccgcagcugcuccacgaccuacaaggggguguacgagcuccagacccuggagcuggacauggccagccucaacaugaccaugccgcuguccugcacgaagaacaacagccaccacuacaucauggucggcaacgagaccggccuggagcucacccugaccaacacguccaucaucaaccacaaguucugcaaccugagcgacgcccacaagaagaaccucuacgaccacgcccugauguccaucaucagcaccuuccaccuguccauccccaacuucaaccaguacgaggccaugagcugcgacuucaacgggggcaagaucuccgugcaguacaaccucagccacgcguacgccguggacgccgccaaccacugcgggaccaucgcgaacggcguccugcagaccuucaugcggauggccuggggcggguccuacaucgcccuggacagcggcugcggguccugggacugcaucaugacgagcuaccaguaccucaucauccagaacaccaccugggaggaccacugccaguucucccgccccagccccaucggcuaccuggggcugcucagccagcggacccgcgacaucuacaucucccggcgccugcugggcacguucaccuggacccucagcgacuccgagggcaacgagacccccgggggcuacugccugacgcgguggaugcugaucgaggccgagcucaagugcuucgggaacaccgccguggcgaagugcaacgagaagcacgacgaggaguucugcgacaugcugcgccuguucgacuucaacaagcaggccauccggcgccucaagaccgaggcccagaugagcauccagcugaucaacaaggccgugaacgcccugaucaacgaccagcucaucaugaagaaccaccuccgggacaucaugugcaucccguacugcaacuacuccaaguacugguaccugaaccacaccgucacggggaagaccagccugccccgcugcuggcugguguccaacggcagcuaccugaacgagacccacuucuccgacgacaucgagcagcaggcggacaacaugaucaccgagcuccugcagaaggaguacauggaccggcagggcaagacgccccuggggcucguggaccuguucgucuucagcaccuccuucuaccugaucagcaucuuccugcaccucaucaagaucccgacccaccgccacaucaccggcaagcccugccccaagccccaccggcugaaccacauggggaucugcuccugcggccuguacaagcacccgggggugcccgugaaguggaagcgcuga

SEQ ID NO: 34862 - RNA, 1473 nt, Artificial Sequence
  derived and/or modified CDS sequence (opt1) from LASV(ISTH2010-NIG-2012;Clade II)__AIT17482__GPCmut9
augggccagaucaucaccuucuuccaggaggugccccacgucaucgaggaggugaugaacaucgugcugaucgcccucagccugcuggccauccucaaggggaucuacaacgucgcgaccugcggccuguucgggcugguguccuuccuccugcugugcggccgcagcugcuccacgaccuacaaggggguguacgagcuccagacccuggagcuggacauggccagccucaacaugaccaugccgcuguccugcacgaagaacaacagccaccacuacaucauggucggcaacgagaccggccuggagcucacccugaccaacacguccaucaucaaccacaaguucugcaaccugagcgacgcccacaagaagaaccucuacgaccacgcccugauguccaucaucagcaccuuccaccuguccauccccaacuucaaccaguacgaggccaugagcugcgacuucaacgggggcaagaucuccgugcaguacaaccucagccacgcguacgccguggacgccgccaaccacugcgggaccaucgcgaacggcguccugcagaccuucaugcggauggccuggggcggguccuacaucgcccuggacagcggcugcggguccugggacugcaucaugacgagcuaccaguaccucaucauccagaacaucaccugggaggaccacugccaguucucccgccccagccccaucggcuaccuggggcugcucagccagcggacccgcgacaucuacaucucccggcgccugcugggcaccuucacguggacccucagcgacuccgagggcaacgagacccccgggggcuacugccugacccgguggaugcugaucgaggccgagcucaagugcuucgggaacacggccguggcgaagugcaacgagaagcacgacgaggaguucugcgacaugcugcgccuguucgacuucaacaagcaggccauccggcgccucaagaccgaggcccagaugagcauccagcugaucaacaaggccgugaacgcccugaucaacgaccagcucaucaugaagaaccaccuccgggacaucaugugcauccccuacugcaacuacuccaaguacugguaccugaaccacaccgucaccgggaagacgagccugccccgcugcuggcugguguccaacggcagcuaccugaacgagacccacuucuccgacgacaucgagcagcaggcggacaacaugaucaccgagcuccugcagaaggaguacaucgaccggcagggcaagaccccgcuggggcucguggaccuguucgucuucagcacguccuucuaccugaucagcaucuuccugcaccucgugaagaucccgacccaccgccacguggucggcaagcccugccccaagccccaccggcugaaccacauggggaucugcuccugcggccuguacaagcacccgggggugcccgugaaguggaagcgcuga

SEQ ID NO: 34863 - RNA, 1473 nt, Artificial Sequence
  derived and/or modified CDS sequence (opt1) from LASV(Lassa virus/H.sapiens-wt/NGA/2015/ISTH_0543;Clade II)__AVO03639__GPCmut9
augggccagaucaucaccuucuuccaggaggugccccacgucaucgaggaggugaugaacaucgugcugaucgcccucagccugcuggccauccucaaggggaucuacaacgucgcgaccugcggccuguucgggcugguguccuuccuccugcugugcggccgcagcugcuccacgaccuacaaggggguguacgagcuccagacccuggagcuggacauggccaaccucaacaugaccaugccgcugagcugcacgaagaacaacucccaccacuacaucauggucggcaacgagaccggccuggagcucacccugaccaacacgagcaucaucaaccacaaguucugcaaccuguccgacgcccacaagaagaaccucuacgaccacgcccugaugagcaucaucuccaccuuccaccugagcauccccaacuucaaccaguacgaggccauguccugcgacuucaacgggggcaagaucagcgugcaguacaaccucucccacaccuacgcgguggacgccgccaaccacugcgggaccaucgccaacggcguccugcagacguucaugcggauggcguggggcgggagcuacaucgcccuggacuccggcugcgggagcugggacugcaucaugaccuccuaccaguaccucgugauccagaacaccaccugggaggaccacugccaguucagccgccccucccccaucggcuaccuggggcugcucagccagcggacgcgcgacaucuacaucagccggcgccugcugggcaccuucaccuggacccucuccgacagcgagggcaacgagacgcccgggggcuacugccugacccgguggaugcugaucgaggccgagcucaagugcuucgggaacaccgccguggccaagugcaacgagaagcacgacgaggaguucugcgacaugcugcgccuguucgacuucaacaagcaggcgauccggcgccucaagaccgaggcccagauguccauccagcugaucaacaaggccgucaacgcccugaucaacgaccagcucaucaugaagaaccaccuccgggacaucaugugcauccccuacugcaacuacagcaaguacugguaccugaaccacacggugaccgggaagaccucccugccccgcugcuggcuggugagcaacggcuccuaccugaacgagacccacuucagcgacgacaucgagcagcaggccgacaacaugaucacggagcuccugcagaaggaguacaucgaccggcagggcaagaccccgcuggggcucgucgaccuguucguguucuccaccagcuucuaccugaucuccaucuuccugcaccucgugaagaucccgacccaccgccacaucacgggcaagcccugccccaagccccaccggcugaaccacauggggaucugcagcugcggccuguacaagcacccggggguccccgugaaguggaagcgcuga

SEQ ID NO: 34864 - RNA, 1473 nt, Artificial Sequence
  derived and/or modified CDS sequence (opt1) from LASV(Lassa virus/H.sapiens-wt/NGA/2016/ISTH_0009;Clade II)__AVO03571__GPCmut9
augggccagaucaucaccuucuuccaggaggugccccacgucaucgaggaggugaugaacaucgugcugaucgcccucagccugcuggccauccucaaggggaucuacaacgucgcgaccugcggccugcuggggcucguguccuuccugcugcucugcggccgcagcugcuccacgaccuacaaggggguguacgagcugcagacccuggagcucgacauggccagccugaacaugaccaugccgcuguccugcacgaagaacaacagccaccacuacaucauggucggcaacgagaccggccucgagcugacccugaccaacacguccaucaucaaccacaaguucugcaaccucagcgacgcccacaagaagaaccuguacgaccacgcccugauguccaucaucagcaccuuccaccucuccauccccaacuucaaccaguacgaggccaugagcugcgacuucaacgggggccggaucuccgugcaguacaaccugagccacuccuacgcgguggacgccgccaaccacugcgggaccaucgccaacggcguccugcagaccuucaugcgcauggcguggggcgggagcuacaucgcccucgacuccggcugcgggagcugggacugcaucaugacguccuaccaguaccugaucauccagaacaccaccugggaggaccacugccaguucagccggcccagccccaucggcuaccuggggcuccugucccagcgcacccgggacaucuacaucagccgccggcugcucggcacguucaccuggacccuguccgacagcgagggcaacgagacccccgggggcuacugccugacgcgcuggaugcucaucgaggccgagcugaagugcuucgggaacaccgccguggccaagugcaacgagaagcacgacgaggaguucugcgacaugcugcggcuguucgacuucaacaagcaggcgauccgccggcugaagaccgaggcccagauguccauccagcugaucaacaaggccgugaacgcccucaucaacgaccagcugaucaugaagaaccaccuccgcgacaucaugugcaucccguacugcaacuacagcaaguacugguaccucaaccacaccgucacggggaagaccucccugccccggugcuggcuggugagcaacggcuccuaccucaacgagacccacuucagcgacgacaucgagcagcaggccgacaacaugaucaccgagcugcugcagaaggaguacaucgaccgccagggcaagacgccccucgggcugguggaccuguucgucuucuccaccagcuucuaccugaucuccaucuuccuccaccuggugaagaucccgacccaccggcacaucaccggcaagcccugccccaagccccaccgccugaaccacauggggaucugcagcugcggccucuacaaccacccgggggugcccgucaaguggaagcgguga

SEQ ID NO: 34865 - RNA, 1473 nt, Artificial Sequence
  derived and/or modified CDS sequence (opt1) from LASV(Lassa virus/H.sapiens-wt/NGA/2016/ISTH_0017;Clade II)__AVO03567__GPCmut9
augggccagaucaucaccuucuuccaggaggugccccacgucaucgaggaggugaugaacaucgugcugaucgcccucagccugcuggccauccucaaggggaucuacaacgucgcgaccugcggccuguucgggcugguguccuuccuccugcugugcggccgcagcugcuccacgaccuacaaggggguguacgagcuccagacccuggagcuggacauggccagccucaacaugaccaugccgcuguccugcacgaagaacaacagccaccacuacaucauggucggcaacgagaccggccuggagcucacccugaccaacacguccaucaucaaccacaaguucugcaaccugagcgacgcccacaagaagaaccucuacgaccacgcccugauguccaucaucagcaccuuccaccuguccauccccaacuucaaccaguacgaggccaugagcugcgacuucaacgggggcaagaucuccgugcaguacaaccucagccacaccuacgcgaucgacgccgccaaccacugcgggaccaucgccaacggcgugcugcagacguucaugcggauggcguggggcggguccuacaucgcccuggacagcggcugcggguccugggacugcaucaugaccagcuaccaguaccucaucauccagaacaccaccugggaggaccacugccaguucucccgccccagccccaucggcuaccuggggcugcucagccagcggacgcgcgacaucuacaucucccggcgccugcugggcaccuucaccuggacccucagcgacuccgagggcaacgagacgcccgggggcuacugccugacccgguggaugcugaucgaggccgagcucaagugcuucgggaacaccgccgucgccaagugcaacgagaagcacgacgaggaguucugcgacaugcugcgccuguucgacuucaacaagcaggcgauccggcgccucaagaccgaggcccagaugagcauccagcugaucaacaaggccgugaacgcccugaucaacgaccagcucaucaugaagaaccaccuccgggacaucaugugcauccccuacugcaacuacuccaaguacugguaccugaaccacacggugaccgggaagaccagccugccccgcugcuggcuggucuccaacggcagcuaccugaacgagacccacuucuccgacgacaucgagcagcaggccgacaacaugaucacggagcuccugcagaaggaguacauggaccggcagggcaagaccccgcuggggcucguggaccuguucguguucagcaccuccuucuaccugaucagcaucuuccugcaccucguccgcaucccgacccaccggcacgugaucggcaagcccugccccaagccccaccgccugaaccacauggggaucugcuccugcggccuguacaagcacccgggggugcccgucaaguggaagcgguga

SEQ ID NO: 34866 - RNA, 1473 nt, Artificial Sequence
  derived and/or modified CDS sequence (opt1) from LASV(Lassa virus/H.sapiens-wt/NGA/2018/ISTH_0959;Clade II)__AVV65099__GPCmut9
augggccagaucaucaccuucuuccaggaggugccccacgucaucgaggaggugaugaacaucgugcugaucgcccucagccugcuggccauccucaaggggaucuacaacgucgugaccugcggccuguucgggcugguguccuuccuccugcugugcggccgcagcugcuccacgaccuacaagggggucuacgagcuccagacccuggagcuggacauggcgagccucaacaugaccaugccgcuguccugcacgaagaacaacagccaccacuacaucauggugggcaacgagaccggccuggagcucacccugaccaacacguccaucaucaaccacaaguucugcaaccugagcgacgcccacaagaagaaccucuacgaccacgcccugauguccaucaucagcaccuuccaccuguccauccccaacuucaaccaguacgaggccaugagcugcgacuucaacgggggcaagaucuccgugcaguacaaccucagccacgccuacgcgaucgacgccgccaaccacugcgggaccaucgccaacggcguccugcagaccuucaugcggauggcguggggcggguccuacaucgcccuggacagcggcugcggguccugggacugcaucaugacgagcuaccaguaccucaucauccagaacaccaccugggaggaccacugccaguucucccgccccagccccaucggcuaccuggggcugcucagccagcggacccgcgacaucuacaucucccggcgccugcugggcacguucaccuggacccucagcgacuccgagggcaacgagacccccgggggcuacugccugacgcgguggaugcugaucgaggccgagcucaagugcuucgggaacaccgccguggccaagugcaacgagaagcacgacgaggaguucugcgacaugcugcgccuguucgacuucaacaagcaggcgauccggcgccucaagaccgaggcccagaugagcauccagcugaucaacaaggccgugaacgcccugaucaacgaccagcucaucaugaagaaccaccuccgggacaucaugugcaucccguacugcaacuacuccaaguacugguaccugaaccacaccgucacggggaagaccagccugccccgcugcuggcugguguccaacggcagcuaccugaacgagacccacuucuccgacgacaucgagcagcaggccgacaacaugaucaccgagcuccugcagaaggaguacaucgaccggcagggcaagacgccccuggggcucguggaccuguucgucuucagcaccuccuucuaccugaucagcaucuuccugcaccucgugaagaucccgacccaccgccacgugaucggcaagcccugccccaagccccaccggcugaaccacauggggaucugcuccugcggccuguacaagcacccggggguccccgugaaguggaagcgcuga

SEQ ID NO: 34867 - RNA, 1473 nt, Artificial Sequence
  derived and/or modified CDS sequence (opt1) from LASV(LASV003-NIG-2008;Clade II)__AIT17580__GPCmut9
augggccagaucaucaccuucuuccaggaggugccccacgucaucgaggaggugaugaacaucgugcugaucgcccucagccugcuggccauccucaaggggaucuacaacgucgcgaccugcggccuguucgggcugguguccuuccuccugcugugcggccgcagcugcuccacgaccuacaaggggguguacgagcuccagacccuggagcuggacauggccagccucaacaugaccaugccgcuguccugcacgaagaacaacagccaccacuacaucauggucggcaacgagaccggccuggagcucacccugaccaacacguccaucaucaaccacaaguucugcaaccugagcgacgcccacaagaagaaccucuacgaccacgcccugauguccaucaucagcaccuuccaccuguccauccccaacuucaaccaguacgaggccaugagcugcgacuucaacgggggcaagaucuccgugcaguacaaccucagccacaccuacgcgguggacgccgccaaccacugcgggaccaucgccaacggcguccugcagacguucaugcggauggcguggggcggguccuacaucgcccuggacagcggcugcggguccugggacugcaucaugaccagcuaccaguaccucaucauccagaacaccaccugggaggaccacugccaguucucccgccccagccccaucggcuaccuggggcugcucagccagcggacgcgcgacaucuacaucucccggcgccugcugggcaccuucaccuggacccucagcgacuccgagagcaacgagacgccgggcggguacugccugacccgguggaugcugaucgaggccgagcucaagugcuucggcaacaccgccguggccaagugcaacgagaagcacgacgaggaguucugcgacaugcugcgccuguucgacuucaacaagcaggcgauccggcgccucaaggccgaggcccagauguccauccagcugaucaacaaggccgugaacgcccugaucaacgaccagcucaucaugaagaaccaccuccgggacaucaugugcauccccuacugcaacuacagcaaguacugguaccugaaccacaccgucacgggccgcaccucccugccccggugcuggcuggugagcaacggguccuaccugaacgagacccacuucagcgacgacaucgagcagcaggcggacaacaugaucaccgagcuccugcagaaggaguacauggaccgccagggcaagacgccccugggccucguggaccuguucgucuucuccaccagcuucuaccugaucuccaucuuccugcaccucgugaagaucccgacccaccggcacgugaucgggaagcccugccccaagccccaccgccugaaccacaugggcaucugcagcugcgggcuguacaagcacccgggcguccccgugaaguggaagcgguga

SEQ ID NO: 34868 - RNA, 1473 nt, Artificial Sequence
  derived and/or modified CDS sequence (opt1) from LASV(LASV035-NIG-2009;Clade II)__AIT17588__GPCmut9
augggccagaucaucaccuucuuccaggaggugccccacgucaucgaggaggugaugaacaucgugcugaucgcccucagccugcuggccauccucaaggggaucuacaacgucgcgaccugcggccuguucgggcugguguccuuccuccugcugugcggccgcagcugcuccacgaccuacaaggggguguacgagcuccagacccuggagcuggacauggccagccucaacaugaccaugccgcuguccugcacgaagaacaacagccaccacuacaucauggucggcaacgagaccggccuggagcucacccugaccaacacguccaucaucaaccacaaguucugcaaccugagcgacgcccacaagaagaaccucuacgaccacgcccugauguccaucaucagcaccuuccaccuguccauccccaacuucaaccaguacgaggccaugagcugcgacuucaacgggggcaagaucuccgugcaguacaaccucagccacgcguacgccguggacgccgccaaccacugcgggaccaucgcgaacggcguccugcagaccuucaugcggauggccuggggcggguccuacaucgcccuggacagcggcugcggguccugggacugcaucaugacgagcuaccaguaccucaucauccagaacaccaccugggaggaccacugccaguucucccgccccagccccaucggcuaccuggggcugcucagccagcggacccgcgacaucuacaucucccggcgccugcugggcacguucaccuggacccucagcgacuccgagggcaacgagacccccgggggcuacugccugacgcgguggaugcugaucgaggccgagcucaagugcuucgggaacaccgccguggcgaagugcaacgagaagcacgacgaggaguucugcgacaugcugcgccuguucgacuucaacaagcaggccauccggcgccucaaggccgaggcccagaugagcauccagcugaucaacaaggccgugaacgcgcugaucaacgaccagcucaucaugaagaaccaccuccgggacaucaugugcauccccuacugcaacuacuccaaguacugguaccugaaccacaccgucaccgggaagacgagccugccccgcugcuggcugguguccaacggcagcuaccugaacgagacccacuucuccgacgacaucgagcagcaggccgacaacaugaucaccgagcuccugcagaaggaguacaucgaccggcagggcaagaccccgcuggggcucguggaccuguucgucuucagcacguccuucuaccugaucagcaucuuccugcaccucgugaagaucccgacccaccgccacgugaucggcaagcccugccccaagccccaccggcugaaccacauggggaucugcuccugcggccuguacaagcacccggggguccccgugaaguggaagcgcuga

SEQ ID NO: 34869 - RNA, 1473 nt, Artificial Sequence
  derived and/or modified CDS sequence (opt1) from LASV(LASV1000-NIG-2009;Clade II)__AIT17782__GPCmut9
augggccagaucaucaccuucuuccaggaggugccccacgucaucgaggaggugaugaacaucgugcugaucgcccucagccugcuggccauccucaaggggaucuacaacgucgcgaccugcggccuguucgggcugguguccuuccuccugcugugcggccgcagcugcuccacgaccuacaaggggguguacgagcuccagacccuggagcuggacauggccagccucaacaugaccaugccgcuguccugcacgaagaacaacagccaccacuacaucauggucggcaacgagaccggccuggagcucacccugaccaacacguccaucaucaaccacaaguucugcaaccugagcgacgcccacaagaagaaccucuacgaccacgcccugauguccaucaucagcaccuuccaccuguccauccccaacuucaaccaguacgaggccaugagcugcgacuucaacgggggcaagaucuccgugcaguacaaccucagccacaccuacgcgguggacgccgccaaccacugcgggaccaucgccaacggcguccugcagacguucaugcggauggcguggggcggguccuacaucgcccuggacagcggcugcggguccugggacugcaucaugaccagcuaccaguaccucaucauccagaacaccaccugggaggaccacugccaguucucccgccccagccccaucggcuaccuggggcugcucagccagcggacgcgcgacaucuacaucucccggcgccugcugggcaccuucaccuggacccucagcgacuccgagggcaacgagacgcccgggggcuacugccugacccgguggaugcugaucgaggccgagcucaagugcuucgggaacaccgccguggccaagugcaacgagaagcacgacgaggaguucugcgacaugcugcgccuguucgacuucaacaagcaggcgaucaagcggcucaagaccgaggcccagaugagcauccagcugaucaacaaggccgugaacgcccugaucaacgaccagcucaucaugaagaaccaccuccgcgacaucaugugcauccccuacugcaacuacuccaaguacugguaccugaaccacacggucaccgggaagaccagccugccccggugcuggcugguguccaacggcagcuaccugaacgagacccacuucuccgacgacaucgagcagcaggccgacaacaugaucacggagcuccugcagaaggaguacaucgaccgccagggcaagaccccgcuggggcucguggaccuguucgucuucagcaccuccuucuaccugaucagcaucuuccugcaccucgugaagaucccgacccaccggcacguggucggcaagcccugccccaagccccaccgccugaaccacauggggaucugcuccugcggccuguacaagcacccgggggugcccgugaaguggaagcgguga

SEQ ID NO: 34870 - RNA, 1473 nt, Artificial Sequence
  derived and/or modified CDS sequence (opt1) from LASV(LASV221-NIG-2010;Clade II)__AIT17624__GPCmut9
augggccagaucaucaccuucuuccaggaggugccccacgucaucgaggaggugaugaacaucgugcugaucgcccucagccugcuggccauccucaaggggaucuacaacgucgcgaccugcggccuguucgggcugguguccuuccuccugcugugcggccgcagcugcuccacgaccuacaaggggguguacgagcuccagacccuggagcuggacauggccagccucaacaugaccaugccgcuguccugcacgaagaacaacagccaccacuacaucauggucggcaacgagaccggccuggagcucacccugaccaacacguccaucaucaaccacaaguucugcaaccugagcgacgcccacaagaagaaccucuacgaccacgcccugauguccaucaucagcaccuuccaccuguccauccccaacuucaaccaguacgaggccaugagcugcgacuucaacgggggcaagaucuccgugcaguacaaccucagccacaccuacgcgaucgacgccgccaaccacugcgggaccaucgccaacggcgugcugcagacguucaugcggauggcguggggcggguccuacaucgcccuggacagcggcugcggguccugggacugcaucaugaccagcuaccaguaccucaucauccagaacaccaccugggaggaccacugccaguucucccgccccagccccaucggcuaccuggggcugcucagccagcggacgcgcgacaucuacaucucccggcgccugcugggcaccuucaccuggacccucagcgacuccgagggcaacgagacgcccgggggcuacugccugacccgguggaugcugaucgaggccgagcucaagugcuucgggaacaccgccgucgccaagugcaacgagaagcacgacgaggaguucugcgacaugcugcgccuguucgacuucaacaagcaggcgauccggcgccucaagaccgaggcccagaugagcauccagcugaucaacaaggccgugaacgcccugaucaacgaccagcucaucaugaagaaccaccuccgggacaucaugugcauccccuacugcaacuacuccaaguacugguaccugaaccacacggugaccgggaagaccagccugccccgcugcuggcuggucuccaacggcagcuaccugaacgagacccacuucuccgacgacaucgagcagcaggccgacaacaugaucacggagaugcuccagaaggaguacauggaccggcagggcaagaccccgcuggggcugguggaccucuucguguucagcaccuccuucuaccugaucagcaucuuccugcaccuggucaagaucccgacccaccgccacgugaucggcaagcccugccccaagccccaccggcucaaccacauggggaucugcuccugcggccuguacaagcacccgggggugcccgucaaguggaagcgcuga

SEQ ID NO: 34871 - RNA, 1473 nt, Artificial Sequence
  derived and/or modified CDS sequence (opt1) from LASV(LASV237-NIG-2010;Clade II)__AIT17638__GPCmut9
augggccagaucaucaccuucuuccaggaggugccccacgucaucgaggaggugaugaacaucgugcugaucgcccucagccugcuggccauccucaaggggaucuacaacgucgcgaccugcggccuguucgggcugguguccuuccuccugcugugcggccgcagcugcuccacgaccuacaaggggguguacgagcuccagacccuggagcuggacauggccagccucaacaugaccaugccgcuguccugcacgaagaacaacagccaccacuacaucauggucggcaacgagaccggccuggagcucacccugaccaacacguccaucaucaaccacaaguucugcaaccugagcgacgcccacaagaaggaccucuacgaccacgcccugauguccaucaucagcaccuuccaccuguccauccccaacuucaaccaguacgaggccaugagcugcgacuucaacgggggcaagaucuccgugcaguacaaccucagccacaccuacgcgguggacgccgccaaccacugcgggaccaucgccaacggcguccugcagacguucaugcggauggcguggggcggguccuacaucgcccuggacagcggcugcggguccugggacugcaucaugaccagcuaccaguaccucaucauccagaacaccaccugggaggaccacugccaguucucccgccccagccccaucggcuaccuggggcugcucagccagcggacgcgcgacaucuacaucucccggcgccugcugggcaccuucaccuggacccucagcgacuccgagggcaacgagacgcccgggggcuacugccugacccgguggaugcugaucgaggccgagcucaagugcuucgggaacaccgccguggccaagugcaacgagaagcacgacgaggaguucugcgacaugcugcgccuguucgacuucaacaagcaggcgauccggcgccucaagaccgaggcccagaugagcauccagcugaucaacaaggccgugaacgcccugaucaacgaccagcucaucaugaagaaccaccuccgggacaucaugugcauccccuacugcaacuacuccaaguacugguaccugaaccacacggucaccgggaagaccagccugccccgcugcuggcugguguccaacggcagcuaccugaacgagacccacuucuccgacgacaucgagcagcaggccgacaacaugaucacggagcuccugcagaaggaguacauggaccggcagggcaagaccccgcuggggcucguggaccuguucgucuucagcaccuccuucuaccugaucagcaucuuccugcaccucaucaagaucccgacccaccgccacaucacgggcaagcccugccccaagccccaccggcugaaccacauggggaucugcuccugcggccuguacaagcacccgggggugcccgugaaguggaagcgcuga

SEQ ID NO: 34872 - RNA, 1473 nt, Artificial Sequence
  derived and/or modified CDS sequence (opt1) from LASV(LASV253-NIG-2011;Clade II)__AIT17670__GPCmut9
augggccagaucaucaccuucuuccaggaggugccccacgucaucgaggaggugaugaacaucgugcugaucgcccucagccugcuggccauccucaaggggaucuacaacgucgcgaccugcggccuguucgggcugguguccuuccuccugcugugcggccgcagcugcuccacgaccuacaaggggguguacgagcuccagacccuggagcuggacauggccagccucaacaugaccaugccgcuguccugcacgaagaacaacagccaccacuacaucauggucggcaacgagaccggccuggagcucacccugaccaacacguccaucaucaaccacaaguucugcaaccugagcgacgcccacaagaagaaccucuacgaccacgcccugauguccaucaucagcaccuuccaccuguccauccccaacuucaaccaguacgaggccaugagcugcgacuucaacgggggcaagaucuccgugcaguacaaccucagccacaccuacgcgguggacgccgccaaccacugcgggaccaucgccaacggcguccugcagacguucaugcggauggcguggggcggguccuacaucgcccuggacagcggcugcggguccugggacugcaucaugaccagcuaccaguaccucaucauccagaacaccaccugggaggaccacugccaguucucccgccccagccccaucggcuaccuggggcugcucagccagcggacgcgcgacaucuacaucucccggcgccugcugggcaccuucaccuggacccucagcgacuccgagggcaacgagacgcccgggggcuacugccugacccgguggaugcugaucgaggccgagcucaagugcuucgggaacaccgccguggccaagugcaacgagaagcacgacgaggaguucugcgacaugcugcgccuguucgacuucaacaagcaggcgauccggcgccucaaggccgaggcccagaugagcauccagcugaucaacaaggccgugaacgcccugaucaacgaccagcucaucaugaagaaccaccuccgggacaucaugugcaucccguacugcaacuacuccaaguacugguaccugaaccacaccgucacggggcgcaccagccugccccggugcuggcugguguccaacggcagcuaccugaacgagacccacuucuccgacgacaucgagcagcaggcggacaacaugaucaccgagcuccugcagaaggaguacaucgaccgccagggcaagacgccccuggggcucguggaccuguucgucuucagcaccuccuucuaccugaucagcaucuuccugcaccucgugaagaucccgacccaccggcacaucaucggcaagcccugccccaagccccaccgccugaaccacauggggaucugcuccugcggccuguacaagcacccgggggugcccgucaaguggaagcgguga

SEQ ID NO: 34873 - RNA, 1473 nt, Artificial Sequence
  derived and/or modified CDS sequence (opt1) from LASV(LASV254-NIG-2011;Clade II)__AIT17674__GPCmut9
augggccagaucaucaccuucuuccaggaggugccccacgucaucgaggaggugaugaacaucgugcugaucgcccucagccugcuggccauccucaaggggaucuacaacgucgcgaccugcggccuguucgggcugguguccuuccuccugcugugcggccgcagcugcuccacgaccuacaaggggguguacgagcuccagacccuggagcuggacaugaccaaccucaacaugacgaugccgcugagcugcaccaagaacaacucccaccacuacaucauggucggcaacgagaccggccuggagcucacccugacgaacaccagcaucaucaaccacaaguucugcaaccuguccgacgcccacaagaagaaccucuacaaccacgcccugaugagcaucaucuccaccuuccaccugagcauccccaacuucaaccaguacgaggccauguccugcgacuucaacgggggcaagaucagcgugcaguacaaccucucccacagcuacgccguggacgcggccaaccacugcgggaccaucgccaacggcguccugcagacguucaugcggauggccuggggcggguccuacaucgcgcuggacagcggcugcgggaacugggacugcaucaugaccuccuaccaguaccucaucauccagaacaccaccugggaggaccacugccaguucagccgccccucccccaucggcuaccuggggcugcucagccagcggacgcgcgacaucuacaucagccggcgccugcugggcaccuucaccuggacccucuccgacagcgagggcaacgagacgcccgggggcuacugccugacccgguggaugcugaucgaggccgagcucaagugcuucgggaacaccgccguggccaagugcaacgagaagcacgacgaggaguucugcgacaugcugcgccuguucgacuucaacaagcaggccauccggcgccucaagaccgaggcgcaggccaacauccagcugaucaacaaggccgugaacgcccugaucaacgaccagcucaucaugaagaaccaccuccgggacaucaugugcauccccuacugcaacuacuccaaguacugguaccugaaccacacggucaccgggaagaccagccugccccgcugcuggcugguguccaacggcagcuaccugaacgagacccacuucuccgacgacaucgagcagcaggccgacaacaugaucacggagcuccugcagaaggaguacauggaccggcagggcaagaccccgcuggggcucguggaccuguucgucuucagcaccuccuucuaccugaucagcaucuuccugcaccucgugaagaucccgacccaccgccacgugaucggcaagcccugccccaagccccaccggcugaaccacauggggaucugcuccugcggccuguacaagcacccggggguccccgugaaguggaagcgcuga

SEQ ID NO: 34874 - RNA, 1473 nt, Artificial Sequence
  derived and/or modified CDS sequence (opt1) from LASV(Nig08-A19;Clade III)__ADU56618__GPCmut9
augggccagaucgugaccuucuuccaggaggucccccacgugaucgaggaggugaugaacaucguccugaucgcccucagcauccuggccauccugaaggggcucuacaacaucgcgaccugcggccugaucgggcuggugacguuccuccugcuguccggccgcagcugcuccaugaccuacaaggggguguacgagcuccagacccuggagcugaacaugaacacccucaacaugacgaugccgcugagcugcaccaagaacaacucccaccacuacaucauggucggcaacgagaccggccuggagcucacccugacgaacaccagccugcuccaccacaaguucugcaaccuguccgacgcccacaagaagaaccuguacgaccacacccucaugagcaucaucuccaccuuccaccugagcauccccaacuucaaccaguacgaggccauguccugcgacuucaacgggggcaagaucacggugcaguacaaccugagccacuccuacgccaucgacgccgcgaaccacugcgggaccguggccaacggcguccuccagaccuucaugcggauggccuggggcgggagcuacaucgcccuggacuccggcugcgggaagugggacugcaucaugaccagcuaccaguaccugaucauccagaacacgaccugggaggaccacugccaguucucccggcccagccccaucggcuaccucgggcugcugucccagcgcacccgggacaucuacaucagccgccggcuccugggcaccuucacguggacccugagcgacuccgagggcaacgagacccccgggggcuacugccucacccgcuggaugcugaucgaggcggagcugaagugcuucgggaacacggccguggccaagugcaacgagaagcacgacgaggaguucugcgacaugcuccggcuguucgacuucaacaagcaggccauccgccggcugaaggccgaggcgcagaugagcauccagcucaucaacaaggccgugaacgcccugaucaacgaccagcugaucaugaagaaccaccuccgcgacaucaugugcauccccuacugcaacuacuccaaguacugguaccugaaccacaccagcaccgggcggaccucccugccccgcugcuggcucgucagcaacggcuccuaccugaacgagacgcacuucagcgacgacaucgagcagcaggccgacaacaugaucaccgagaugcugcagaaggaguaccucgaccggcagggcaagaccccgcuggggcugguggaccuguucguguucuccaccagcuucuaccucaucuccaucuuccugcaccuggucaagaucccgacgcaccgccacaucgugggcaagcccugccccaagccccaccggcucaaccacauggggaucugcagcugcggccuguacaagcagccgggggugcccguccgcuggaagcgguga

SEQ ID NO: 34875 - RNA, 1476 nt, Artificial Sequence
  derived and/or modified CDS sequence (opt1) from LASV(G1180-SLE-2010;Clade IV)__AIT17168__GPCmut9
augggccagaucgugaccuucuuccaggaggucccccacgugaucgaggaggugaugaacaucguccugaucgcccucagcauccuggccgugcugaaggggcucuacaacuucgcgaccugcggccugguggggcugcucaccuuccugcugcucugcggccgcuccugcaccgccagccgguacaagggggucuacgagcugcagacccuggagcucaacauggagacccugaacaugacgaugccgcuguccugcaccaagaacaacagccaccacuacaucauggugggcaacgagaccggccucgagcugacccugacgaacaccuccaucaucaaccacaaguucugcaaccucagcgacgcccacaagaagaaccuguacgaccacgcccugauguccaucaucagcaccuuccaccucuccauccccaacuucaaccaguacgaggccaugagcugcgacuucaacgggggcaagaucuccgugcaguacaaccugagccacuccuacgcgggggacgccgccaaccacugcggcaccgucgccaacggggugcugcagacguucaugcgcauggcguggggcggcagcuacaucgcccucgacuccgggugcggcagcugggacugcaucaugaccuccuaccaguaccugaucauccagaacaccaccugggaggaccacugccaguucagccggcccucccccaucggguaccugggccuccugagccagcgcacgcgggacaucuacaucagccgccggcugcucggcaccuucaccuggacccuguccgacagcgaggggaaggacacgccgggcggguacugccugacccgcuggaugcucaucgaggccgagcugaagugcuucggcaacaccgccguggccaagugcaacgagaagcacgacgaggaguucugcgacaugcugcggcuguucgacuucaacaagcaggcgauccagcgccugaaggccgaggcccagauguccauccagcugaucaacaaggccgucaacgcccucaucaacgaccagcugaucaugaagaaccaccuccgggacaucaugugcauccccuacugcaacuacagcaaguacugguaccucaaccacaccacgaccggcaagaccucccugcccaagugcuggcuggugagcaacggcuccuaccucaacgagacccacuucagcgacgacaucgagcagcaggcggacaacaugaucacggagaugcugcagaaggaguacauggagcgccaggggaagacgccccugggccucguggaccuguucgucuucuccaccagcuucuaccugaucuccaucuuccugcaccucgugaagaucccgacccaccggcacaucgugggcaagagcugccccaagccccaccgccugaaccacauggggaucugcuccugcgggcuguacaagcagcccggcgucccggugaaguggaagcgguga

SEQ ID NO: 34876 - RNA, 1476 nt, Artificial Sequence
  derived and/or modified CDS sequence (opt1) from LASV(G1442-SLE-2011;Clade IV)__AIT17180__GPCmut9
augggccagaucgugaccuucuuccaggaggucccccacgugaucgaggaggugaugaacaucguccugaucgcccucagcauccuggccgugcugaaggggcucuacaacguggcgaccugcggccugaucgggcuggucacguuccuccugcugugcggccgcuccugcaccaccacccucuacaaggggguguacgagcugcagacgcuggagcucaacauggagacccugaacaugaccaugccgcugagcugcaccaagaacaacucccaccacuacauccgggugggcaacgagacgggccucgagcugacccugaccaacaccagcaucaucaaccacaaguucugcaaccucuccgacgcccacaagaagaaccuguacgaccacgcccugaugagcaucaucuccacguuccaccucagcauccccaacuucaaccaguacgaggccauguccugcgacuucaacgggggcaagaucagcguccaguacaaccugucccacagcuacgccggggacgcggccaaccacugcggcaccguggccaacggggugcugcagaccuucaugcgcauggccuggggcggcuccuacaucgcgcucgacagcgggugcggcaacugggacugcaucaugaccuccuaccaguaccugaucauccagaacacgaccugggacgaccacugccaguucagccgccccucccccaucggguaccugggccuccugagccagcggacccgcgacgucuacaucucccggcgccugcucggcaccuucacguggacccugagcgacagcgaggggaaggacaccccgggcggguacugccugacccgguggaugcucaucgaggccgagcugaagugcuucggcaacacggccguggccaagugcaacgagaagcacgacgaggaguucugcgacaugcugcgccucuucgacuucaacaagcaggccauccagcggcugaaggcggaggcccagauguccauccagcugaucaacaaggccgugaacgcccucaucaacgaccagcugaucaugaagaaccaccuccgcgacaucaugugcauccccuacugcaacuacagcaaguacugguaccugaacaacaccgccaccggcaagaccucccugcccaagugcuggcugaucagcaacggcuccuaccucaacgagacgcacuucagcgacgacaucgagcaggaggcggacaacaugaucaccgagaugcugcagaaggaguacauggagcggcaggggaagacgccccugggccucgucgaccuguucguguucuccaccagcuucuaccugaucuccaucuuccugcaccucgugaagaucccgacccaccgccacaucgucggcaagagcugccccaagccccaccggcugaaccacauggggaucugcuccugcgggcuguacaagcagcccggcgugccggugcgcuggaagcgguga

SEQ ID NO: 34877 - RNA, 1476 nt, Artificial Sequence
  derived and/or modified CDS sequence (opt1) from LASV(G3010-SLE-2013;Clade IV)__AIT17344__GPCmut9
augggccagaucgugaccuucuuccaggaggucccccacgugaucgaggaggugaugaacaucguccugaucgcccucagcauccuggccgugcugaaggggcucuacaacuucgcgaccugcggccugguggggcuggucacguuccuccugcugugcggccgcuccugcaccaccagccucuacaaggggguguacgagcugcagacccuggagcucaacauggagacgcugaacaugaccaugccgcuguccugcaccaagaacaacagccaccacuacaucauggugggcaacgagaccggccucgagcugacgcugaccaacaccuccaucaucaaccacaaguucugcaaccucagcgacgcccacaagaagaaccuguacaaccacgcccugauguccaucaucagcaccuuccaccucuccauccccaacuucaaccaguacgaggccaugagcugcgacuucaacgggggcaagaucuccguccaguacaaccugagccacuccuacgccggggacgcggccagccacugcggcacgguggccaacggggugcugcagaccuucaugcggauggccuggggcggcuccuacaucgcgcucgacagcgggugcggcaagugggacugcaucaugaccuccuaccaguaccugaucauccagaacaccacgugggaggaccacugccaguucagccgccccucccccaucggguaccugggccuccugagccagcggacccgcgacaucuacaucagccggcgccugcucggcaccuucaccuggacgcuguccgacagcgaggggaaggacaccccgggcggguacugccugacccgguggaugcucaucgaggccgagcugaagugcuucggcaacaccgccgucgccaagugcaacgagaagcacgacgaggaguucugcgacaugcugcgccucuucgacuucaacaagcaggccauccagcggcugaagacggaggcgcagauguccauccagcugaucaacaaggccgugaacgcccucaucaacgaccagcugaucaugaagaaccaccuccgcgacaucaugugcauccccuacugcaacuacagcaaguacugguaccugaaccacaccaccaccggcaagacgucccugcccaagugcuggcuggugagcaacggcuccuaccucaacgagacccacuucagcgacgacaucgagcagcaggccgacaacaugaucaccgagaugcugcagaaggaguacauggagcggcaggggaagacgccccugggccucgucgaccuguucguguucuccaccagcuucuaccugaucuccaucuuccugcaccucgugaagaucccgacccaccgccacaucgucggcaagagcugccccaagccccaccggcugaaccacauggggaucugcuccugcgggcuguacaagcagcccggcgugccggugcgcuggaagcgguga

SEQ ID NO: 34878 - RNA, 1476 nt, Artificial Sequence
  derived and/or modified CDS sequence (opt1) from LASV(G502-SLE-2009;Clade IV)__AIT17126__GPCmut9
augggccagaucgugaccuucuuccaggaggucccccacgugaucgaggaggugaugaacaucguccugaucgcccucagcauccuggccgugcugaaggggcucuacaacuucgcgaccugcggccugguggggcugcucacguuccugcugcucugcggccgcuccugcaccaccgggcuguacaagggcgucuacgagcugcagacccucgagcugaacauggagacgcugaacaugaccaugccgcucagcugcaccaagaacaacucccaccacuacaucauggugggcaacgagaccgggcuggagcugacgcucaccaacaccagcaucaucaaccacaaguucugcaaccuguccgacgcccacaagaagaaccuguacgaccacgcccucaugagcaucaucuccaccuuccaccugagcauccccaacuucaaccaguacgaggccauguccugcgacuucaacggcgggaagaucagcgugcaguacaaccugucccacagcuacgccggcgacgcggccgaccacugcgggacggucgccaacggcgugcuccagaccuucaugcggauggccuggggcggguccuacaucgcgcuggacagcggcugcgggcggugggacugcaucaugaccuccuaccaguaccugaucauccagaacaccacgugggaggaccacugccaguucagccgccccucccccaucggcuaccucggccugcugagccagcggacccgcgacaucuacaucucccggcgccuccuggggaccuucaccuggacgcugagcgacagcgagggcaaggacacccccgggggcuacugccucacccgguggaugcugaucgaggccgagcugaagugcuucgggaacaccgccguggccaagugcaacgagaagcacgacgaggaguucugcgacaugcuccgccuguucgacuucaacaagcaggccauccagcggcugaaggcggaggcccagauguccauccagcucaucaacaaggccgucaacgcccugaucaacgaccagcuggugaugaagaaccaccuccgcgacaucaugugcauccccuacugcaacuacagccgguacugguaccugaaccacacgaccaccggccgcaccucccugcccaagugcuggcucgugagcaacggguccuaccugaacgagacgcacuucagcgacgacaucgagcagcaggccgacaacaugaucaccgagaugcugcagaaggaguacauggagcggcagggcaagaccccgcucgggcuggucgaccuguucguguucuccaccagcuucuaccugaucuccaucuuccuccaccuggugaagaucccgacgcaccgccacaucgucggcaagagcugccccaagccccaccggcugaaccacauggggaucugcuccugcggccucuacaagcagcccggcgugccggugaaguggaagcgcuga

SEQ ID NO: 34879 - RNA, 1476 nt, Artificial Sequence
  derived and/or modified CDS sequence (opt1) from LASV(G733-SLE-2010;Clade IV)__AIT17154__GPCmut9
augggccagaucgugaccuucuuccaggaggucccccacgugaucgaggaggugaugaacaucguccugaucgcccucagcauccuggccgugcugaaggggcucuacaacuucgcgaccugcggcaucguggggcuggucuccuuccugcuccugugcggccgcagcugcacgaccucccuguacaaggggguguacgagcuccagacccuggagcugaacauggagacccucaacaugacgaugccgcugagcugcaccaagaacaacucccaccacuacaucauggugggcaacgagaccggccuggagcucacccugacgaacaccagcaucaucaaccacaaguucugcaaccuguccgacgcccacaagaagaaccucuacgaccacgcccugaugagcaucaucuccaccuuccaccugagcauccccaacuucaaccaguacgaggccauguccugcgacuucaacgggggcaagaucagcguccaguacaaccucucccacagcuacgccggggacgcggccaaccacugcggcaccaucgccaacggggugcugcagacguucaugcggauggccuggggcggcuccuacaucgcgcuggacagcgggugcgaccggugggacugcaucaugaccuccuaccaguaccucaucauccagaacaccaccugggaggaccacugccaguucagccgccccucccccaucggcuaccuggggcugcucagccagcggacgcgcgacaucuacaucagccggcgccugcugggcaccuucaccuggacccucuccgacagcgagggcaaggacacgcccgggggcuacugccugacccgguggaugcugaucgaggccgagcucaagugcuucgggaacaccgccguggccaagugcaacgagaagcacgacgaggaguucugcgacaugcugcgccuguucgacuucaacaagcaggccauccagcggcucaaggcggaggcccagauguccauccagcugaucaacaaggccgucaacgcccugaucaacgaccagcucaucaugaagaaccaccuccgcgacaucaugugcauccccuacugcaacuacagcaaguacugguaccugaaccacaccacgaccgggaagaccucccugcccaagugcuggcuggugagcaacggcuccuaccugaacgagacccacuucagcgacgacaucgagcagcaggccgacaacaugaucacggagaugcuccagaaggaguacauggagcggcagggcaagaccccgcuggggcugguggaccucuucgucuucuccaccagcuucuaccugaucuccaucuuccugcaccuggugaagaucccgacccaccgccacguggucggcaagagcugccccaagccccaccggcucaaccacauggggaucugcuccugcggccuguacgggcagcccggcgugccggugaaguggaagcgcuga

SEQ ID NO: 34880 - RNA, 1476 nt, Artificial Sequence
  derived and/or modified CDS sequence (opt1) from MOPV/LASV reassortant(IGS-1;Clade IV)__AFY05576__GPCmut9
augggccagaucgugaccuucuuccaggaggucccccacgugaucgaggaggugaugaacaucguccugaucgcccucagcgugcuggccgugcugaaggggcucuacaacuucgcgaccugcggccuggucgggcuggugacguuccuccugcugugcggccgcuccugcaccaccagccucuacaaggggguguacgagcugcagacccuggagcucaacauggagacgcugaacaugaccaugccgcuguccugcaccaagaacaacagccaccacuacaucauggucggcaacgagaccggccucgagcugacgcugaccaacaccuccaucaucaaccacaaguucugcaaccucagcgacgcccacaagaagaaccuguacgaccacgcccugauguccaucaucagcaccuuccaccucuccauccccaacuucaaccaguacgaggccaugagcugcgacuucaacgggggcaagaucuccgugcaguacaaccugagccacuccuacgccggggacgcggccaaccacugcggcacgguggccaacgggguccugcagaccuucaugcggauggccuggggcggcagcuacaucgcgcucgacuccgggugcggcaacugggacugcaucaugaccagcuaccaguaccugaucauccagaacaccacgugggaggaccacugccaguucucccggcccagccccaucggguaccugggccuccugucccagcgcacccgggacaucuacaucagccgccggcugcucggcaccuucaccuggacgcugagcgacuccgagggggaggacaccccgggcggguacugccugacccgcuggaugcucaucgaggccgagcugaagugcuucggcaacaccgccguggccaagugcaacgagaagcacgacgaggaguucugcgacaugcugcggcuguucgacuucaacaagcaggccauccagcgccugaaggcggaggcccagaugagcauccagcugaucaacaaggccgugaacgcccucaucaacgaccagcugaucaugaagaaccaccuccgggacaucaugugcauccccuacugcaacuacuccaaguacugguaccucaaccacacgaccaccggccgcaccagccugcccaagugcuggcuggucuccaacggcagcuaccucaacgagacgcacuucuccgacgacaucgagcagcaggccgacaacaugaucaccgagaugcugcagaaggaguacauggagcggcaggggaagacgccccugggccucguggaccuguucguguucagcaccuccuucuaccugaucagcaucuuccugcaccucgucaagaucccgacccaccgccacaucguggggaaguccugccccaagccccaccggcugaaccacaugggcaucugcagcugcgggcuguacaagcagcccggcgugccggucaaguggaagcgcuga

SEQ ID NO: 34881 - RNA, 1476 nt, Artificial Sequence
  derived and/or modified CDS sequence (opt1) from LASV(LM765-SLE-2012;Clade IV)__AIT17814__GPCmut9
augggccagaucgugaccuucuuccaggaggucccccacgugaucgaggaggugaugaacaucguccugaucgcccucagcauccuggccgugcugaaggggcucuacaacuucgcgaccugcggccugguggggcuggucacguuccuccugcugugcggccgcuccugcaccaccagccucuacaaggggguguacgagcugcagacccuggagcucaacauggagacgcugaacaugaccaugccgcuguccugcaccaagaacaacagccaccacuacaucauggugggcaacgagaccggccucgagcugacgcugaccaacaccuccaucaucgaccacaaguucugcaaccucagcgacgcccaccggaagaaccuguacgaccacgcccugauguccaucaucagcaccuuccaccucuccauccccaacuucaaccaguacgaggccaugagcugcgacuucaacgggggcaagaucuccguccaguacaaccugagccacuccuacgccaaggacgcggccgaccacugcgggacgguggccaacggcgugcugcagaccuucaugcgcauggccuggggcgggagcuacaucgcgcucgacuccggcugcgggcgcugggacugcaucaugaccagcuaccaguaccugaucauccagaacaccacgugggaggaccacugccaguucucccggcccagccccaucggcuaccuggggcuccugucccagcgcacccgggacaucuacaucagccgccggcugcucggcaccuucaccuggacgcugagcgacuccgagggcaaggacacccccgggggcuacugccugacccgcuggaugcucaucgaggccgagcugaagugcuucgggaacaccgccgucgccaagugcaacgagaagcacgacgaggaguucugcgacaugcugcggcuguucgacuucaacaagcaggccauccagcgccugaaggcggaggcccagaugagcauccagcugaucaacaaggccgugaacgcccucaucaacgaccagcugaucaugaagaaccaccuccgggacaucaugugcauccccuacugcaacuacuccaaguacugguaccucaaccacacgaccaccgggaagaccagccugcccaagugcuggcugguguccaacggcagcuaccucaacgagacgcacuucuccgacgacaucgagcagcaggccgacaacaugaucaccgagaugcugcagaaggaguacauggagcgccagggcaagaccccgcuggggcucgucgaccuguucguguucagcaccuccuucuaccugaucagcaucuuccugcaccucgugaagaucccgacgcaccggcacaucgucggcaagcccugccccaagccccaccgccugaaccacauggggaucugcuccugcggccuguacaagcagccgggggugcccgugaaguggaagcgguga

SEQ ID NO: 34882 - RNA, 1476 nt, Artificial Sequence
  derived and/or modified CDS sequence (opt1) from LASV(LM776-SLE-2012;Clade IV)__AIT17824__GPCmut9
augggccagaucgugaccuucuuccaggaggucccccacgugaucgaggaggugaugaacaucguccugaucgcccucagcauccuggccgugcugaaggggcucuacaacuucgcgaccugcggccugguggggcuggucacguuccuccugcugugcggccgcuccugcaccaccagcguguacaaggggguguacgagcuccagacccuggagcugaacauggagacgcucaacaugaccaugccgcuguccugcaccaagaacaacagccaccacuacaucauggucggcaacgagaccggccuggagcucacgcugaccaacaccuccaucaucaaccacaaguucugcaaccugagcgacgcccacaagaagaaccucuacgaccacgcccugauguccaucaucagcaccuuccaccuguccauccccaacuucaaccaguacgaggccaugagcugcgacuucaacgggggcaagaucuccgugcaguacaaccucagccacuccuacgccggggacgcggccaaccacugcggcacgguggccaacgggguccugcagaccuucaugcggauggccuggggcggcagcuacaucgcgcuggacuccgggugcggcaagugggacugcaucaugaccagcuaccaguaccucaucauccagaacaccacgugggaggaccacugccaguucucccgccccagccccaucggguaccugggccugcucucccagcggacccgcgacaucuacaucagccggcgccugcugggcaccuucaccuggacgcucagcgacuccgaggggaaggacaccccgggcggguacugccugacccgguggaugcugaucgaggccgagcucaagugcuucggcaacaccgccguggccaagugcaacgagaagcacgacgaggaguucugcgacaugcugcgccuguucgacuucaacaagcaggccauccagcggcucaaggcggaggcccagaugagcauccagcugaucaacaaggccgugaacgcccugaucaacgaccagcucaucaugaagaaccaccuccgcgacaucaugugcauccccuacugcaacuacuccaaguacugguaccugaaccacacgaccaccggcaagaccagccugcccaagugcuggcuggucuccaacggcagcuaccugaacgagacgcacuucuccgacgacaucgagcagcaggccgacaacaugaucaccgagaugcuccagaaggaguacauggagcggcaggggaagacgccccugggccugguggaccucuucguguucagcaccuccuucuaccugaucagcaucuuccugcaccuggucaagaucccgacccaccgccacaucguggggaaguccugccccaagccccaccggcucaaccacaugggcaucugcagcugcgggcuguacaagcagcccggcgugccgguccgcuggaagcgguga

SEQ ID NO: 34883 - RNA, 1476 nt, Artificial Sequence
  derived and/or modified CDS sequence (opt1) from LASV(Mad39;Clade IV)__ANH09722__GPCmut9
augggccagaucgugaccuucuuccaggaggucccccacgugaucgaggaggugaugaacaucguccugaucgcccucagcauccuggccgugcugaaggggcucuacaacguggcgaccugcggccugaucgggcuggucacguuccuccugcugugcggccgcuccugcaccaccacccucuacaaggggguguacgagcugcaggcccuggagcucaacauggagacgcugaacaugaccaugccgcugagcugcaccaagaacaacucccaccacuacauccgggugggcaacgagaccggccucgagcugacgcugaccaacaccagccucaucaaccacaaguucugcaaccuguccgacgcccacaagaagaaccuguacgaccacgcccucaugagcaucaucuccaccuuccaccugagcauccccaacuucaaccaguacgaggccauguccugcgacuucaacgacgggaagaucagcguccaguacaaccugucccacacguacgcgggcgacaccgccaaccacugcgggaccguggccaacggcgugcuccagaccuucaugcgcauggccuggggcgggagcuacaucgcgcuggacuccggcugcgggggcugggacugcaucaugacgagcuaccaguaccugaucauccagaacaccaccugggaggaccacugccaguucucccggcccagccccaucggguaccucggccugcugucccagcggacccgcgacaucuacaucagccggcgccuccugggcacguucaccuggacccuguccgacagcgaggggaaggacaccccgggcggguacugccucacgcgguggaugcugaucgaggccgagcugaagugcuucggcaacaccgccgucgccaagugcaacgagaagcacgacgaggaguucugcgacaugcuccgccuguucgacuucaacaagcaggccauccagcggcugaaggcggaggcccagaugagcauccagcucaucaacaaggccgugaacgcccugaucaacgaccagcugaucaugaagaaccaccuccgcgacaucaugugcauccccuacugcaacuacuccaaguacugguaccugaaccacaccgugaccggcaagacgagccugcccaagugcuggcucgucuccaacggcagcuaccugaacgagacccacuucuccgacgacaucgagcagcaggccgacaacaugaucaccgagaugcugcagaaggaguacauggagcggcaggggaagacgccccucggccugguggaccuguucguguucagcaccuccuucuaccugaucagcaucuuccuccaccuggucaagaucccgacccaccgccacgugguggggaagcccugccccaagccccaccggcugaaccacaugggcaucugcuccugcggguucuacaagcagccgggcguccccgugcgcuggaagcgguga

SEQ ID NO: 34884 - RNA, 1476 nt, Artificial Sequence
  derived and/or modified CDS sequence (opt1) from LASV(Z0947-SLE-2011;Clade IV)__AIT17840__GPCmut9
augggccagaucgugaccuucuuccaggaggucccccacgugaucgaggaggugaugaacaucguccugaucgcccucagcauccuggccgugcugaaggggcucuacaacuucgcgaccugcggccugguggggcuggucacguuccuccugcugugcggccgcuccugcaccaucagccucuacaaggggguguacgagcugcagacccuggagcucaacauggagacccugaacaugacgaugccgcuguccugcaccaagaacaacagccaccacuacaucauggugggcaacgagaccggccucgagcugacccugacgaacaccuccaucaucaaccacaaguucugcaaccucagcgacgcccacaagaagaaccuguacgaccacgcccugauguccaucaucagcaccuuccaccucuccauccccaacuucaaccaguacgaggccaugagcugcgacuucaacgggggcaagaucuccguccaguacaaccugagccacuccuacgccggggacgcggccaaccacugcggcaccguggccaacggggugcugcagacguucaugcggauggccuggggcggcagcuacaucgcgcucgacuccgggugcgaccggugggacugcaucaugaccagcuaccaguaccugaucauccagaacaccaccugggaggaccacugccaguucucccgccccagccccaucggcuaccuggggcuccugucccagcggacgcgcgacaucuacaucagccggcgccugcucggcaccuucaccuggacccugagcgacuccgagggcaaggacacgcccgggggcuacugccugacccgguggaugcucaucgaggccgagcugaagugcuucgggaacaccgccgucgccaagugcaacgagaagcacgacgaggaguucugcgacaugcugcgccucuucgacuucaacaagcaggccauccagcggcugaaggcggaggcccagaugagcauccagcugaucaacaaggccgugaacgcccucaucaacgaccagcugaucaugaagaaccaccuccgcgacaucaugugcauccccuacugcaacuacuccaaguacugguaccugaaccacaccacgaccgggaagaccagccugcccaagugcuggcugguguccaacggcagcuaccucaacgagacccacuucuccgacgacaucgagcagcaggccgacaacaugaucacggagaugcugcagaaggaguacauggagcggcagggcaagaccccgcuggggcucgucgaccuguucguguucagcaccuccuucuaccugaucagcaucuuccugcaccucgugaagaucccgacccaccgccacaucgucggcaagcccugccccaagccccaccggcugaaccacauggggaucugcuccugcggccuguacaagcagccgggggugcccgugaaguggaagcgcuga

SEQ ID NO: 34885 - RNA, 1476 nt, Artificial Sequence
  derived and/or modified CDS sequence (opt1) from LASV(Josiah;Clade IV)__NP_694870__GPCmut9
augggccagaucgugaccuucuuccaggaggucccccacgugaucgaggaggugaugaacaucguccugaucgcccucagcgugcuggccgugcugaaggggcucuacaacuucgcgaccugcggccuggucgggcuggugacguuccuccugcugugcggccgcuccugcaccaccagccucuacaaggggguguacgagcugcagacccuggagcucaacauggagacgcugaacaugaccaugccgcuguccugcaccaagaacaacagccaccacuacaucauggucggcaacgagaccggccucgagcugacgcugaccaacaccuccaucaucaaccacaaguucugcaaccucagcgacgcccacaagaagaaccuguacgaccacgcccugauguccaucaucagcaccuuccaccucuccauccccaacuucaaccaguacgaggccaugagcugcgacuucaacgggggcaagaucuccgugcaguacaaccugagccacuccuacgccggggacgcggccaaccacugcggcacgguggccaacgggguccugcagaccuucaugcggauggccuggggcggcagcuacaucgcgcucgacuccgggugcggcaacugggacugcaucaugaccagcuaccaguaccugaucauccagaacaccacgugggaggaccacugccaguucucccgccccagccccaucggguaccugggccuccugucccagcggacccgcgacaucuacaucagccggcgccugcucggcaccuucaccuggacgcugagcgacuccgaggggaaggacaccccgggcggguacugccugacccgguggaugcucaucgaggccgagcugaagugcuucggcaacaccgccguggccaagugcaacgagaagcacgacgaggaguucugcgacaugcugcgccucuucgacuucaacaagcaggccauccagcggcugaaggcggaggcccagaugagcauccagcugaucaacaaggccgugaacgcccucaucaacgaccagcugaucaugaagaaccaccuccgcgacaucaugugcauccccuacugcaacuacuccaaguacugguaccugaaccacacgaccaccgggcggaccagccugcccaagugcuggcuggucuccaacggcagcuaccucaacgagacgcacuucuccgacgacaucgagcagcaggccgacaacaugaucaccgagaugcugcagaaggaguacauggagcgccagggcaagacgccccuggggcugguggaccucuucguguucagcaccuccuucuaccugaucagcaucuuccugcaccucgucaagaucccgacccaccggcacaucgugggcaaguccugccccaagccccaccgccugaaccacauggggaucugcagcugcggccuguacaagcagcccggggugccggucaaguggaagcgguga

SEQ ID NO: 34886 - RNA, 1473 nt, Artificial Sequence
  derived and/or modified CDS sequence (opt1) from LASV(LP;Clade I)__AAF86701__GPCmut9
augggccagaucaucaccuucuuccaggaggugccccacgucaucgaggaggugaugaacaucgugcugaucgcccucagccugcuggccauccucaaggggcuguacaacaucgcgaccugcggcaucaucgggcuggucgccuuccucuuccugugcggcaaguccugcagccugacgcucaagggcggguacgagcugcagacccuggagcucaacauggagacccugaacaugaccaugccgcuguccugcacgaagaacagcucccaccacuacauccgcgugggcaacgagaccgggcucgagcugacccugaccaacacgagcaucaucaaccacaaguucugcaaccucuccgacgcccacaagaagaaccuguacgaccacgcccugaugagcaucaucuccaccuuccaccucagcauccccaacuucaaccaguacgaggccauguccugcgacuucaacggcgggaagaucagcgugcaguacaaccugucccacagcuacgcgggcgacgccgccgagcacugcgggaccgucgccaacggcgugcugcagaccuucaugcggauggcguggggcgggcgcuacaucgcccucgacuccggcugcgggaacugggacugcaucaugacgagcuaccaguaccugaucauccagaacaccaccugggaggaccacugccaguucucccggcccagccccaucggcuaccugggccuccugucccagcgcacccgggacaucuacaucagccgccggcugcucgggacguucaccuggacccugagcgacuccgagggcaacgagacccccgggggcuacugccugacgcgcuggaugcucaucgaggccgagcugaagugcuucgggaacaccgccguggccaagugcaacgagaagcacgacgaggaguucugcgacaugcugcggcuguucgacuucaacaagcaggcgauccgccggcugaaggccgaggcccagaugagcauccagcugaucaacaaggccgucaacgcccucaucaacgaccagcugaucaugaagaaccaccuccgcgacaucaugugcauccccuacugcaacuacuccaaguacugguaccucaaccacaccagcuccggccggaccagccugcccaagugcuggcugaucuccaacggcagcuaccucaacgagacgcaguucuccgacgacaucgagcagcaggcggacaacaugaucaccgagaugcugcagaaggaguacaucgagcgccaggggaagaccccgcugggccugguggacaucuucaucuucagcaccuccuucuaccucaucagcaucuuccugcaccugaucaagaucccgacgcaccggcacaucguggggaagcccugccccaagccccaccgccucaaccacaugggcgucugcuccugcgggcuguacaagcacccgggcgugcccaccaaguggaagcgguga

SEQ ID NO: 34887 - RNA, 1473 nt, Artificial Sequence
  derived and/or modified CDS sequence (opt1) from LASV(803213;Clade II)__AAF86703__GPCmut9
augggccagaucaucaccuucuuccaggaggugccccacgucaucgaggaggugaugaacaucgugcugaucgcccucagccugcuggccauccucaaggggaucuacaacgucgcgaccugcggccuguucgggcugaucuccuuccuccugcugugcggccgcagcugcuccgugacguacaaggggguguacgagcuccagacccuggagcugaacauggccaaccucaacaugaccaugccgcugagcugcaccaagaacaacucccaccacuacaucauggucggcaacgagacgggccuggagcucacccugaccaacaccagcaucaucaaccacaaguucugcaaccuguccgacgcccacaagaagaaccucuacgaccacgcccugaugagcaucaucuccacguuccaccugagcauccccaacuucaaccaguacgaggccauguccugcgacuucaacgggggcaagaucagcgugcaguacaaccucucccacagcuucgcgguggacgccgccaaccacugcgggaccaucgccaacggcguccugcagaccuucaugcggauggcguggggcggguccuacaucgcccuggacagcggcugcgggaacugggacugcaucaugaccuccuaccaguaccucaucauccagaacacgaccugggaggaccacugccaguucagccgccccucccccaucggcuaccuggggcugcucagccagcggacccgcgacaucuacaucagccggcgccugcugggcaccuucacguggacccucuccgacagcgagggcaacgaggcccccgggggcuacugccugacccgguggaugcugaucgaggccgagcucaagugcuucgggaacaccgccguggcgaagugcaacgagaagcacgacgaggaguucugcgacaugcugcgccuguucgacuucaacaagcaggccaucaagcggcucaagacggaggcccagauguccauccagcugaucaacaaggccgugaacgcccugaucaacgaccagcucaucaugaagaaccaccuccgcgacaucaugugcauccccuacugcaacuacagccgguacugguaccugaaccacaccgucaccggcaagaccucccugccccgcugcuggcuggugagcaacggguccuaccugaacgagacgcacuucagcgacgacaucgagcagcaggcggacaacaugaucaccgagaugcuccagaaggaguacauggaccggcagggcaagaccccgcugggccugguggaccuguucgucuucuccaccagcuucuaccucaucuccaucuuccugcaccuggugaagaucccgacgcaccgccacaucguggggaagcccugccccaagccccaccggcucaaccacaugggcaucugcagcugcgggcuguacaagcacccgggcguccccgugaaguggaagcgcuga

SEQ ID NO: 34888 - RNA, 1473 nt, Artificial Sequence
  derived and/or modified CDS sequence (opt1) from LASV(GA391;Clade III)__CAA36645__GPCmut9
augggccagaucgugaccuucuuccaggaggucccccacgugaucgaggaggugaugaacaucguccugaucgcccucagcauccuggccauccugaaggggcucuacaacguggcgaccugcggccugaucgggcuggugacguuccuccugcuguccggccgcagcugcucccucaucuacaaggggaccuacgagcugcagacccuggagcucaacauggagacccugaacaugacgaugccgcugagcugcaccaagaacaacucccaccacuacauccgggucggcaacgagaccggccucgagcugacccugacgaacaccagcauccucaaccacaaguucugcaaccuguccgacgcccacaagcgcaaccuguacgaccacagccucauguccaucaucagcaccuuccaccuguccauccccaacuucaaccaguacgaggccaugagcugcgacuucaacgggggcaagaucaccgugcaguacaaccugucccacagcuucgccguggacgccgcggggcacugcggcacgcucgccaacgggguccugcagaccuucaugcggauggccuggggcggcuccuacaucgcccuggacagcgggugcggcaacugggacugcaucaugaccuccuaccaguaccucaucauccagaacaccacgugggacgaccacugccaguucagccgccccucccccaucggguaccugggccugcucagccagcggacccgcgacaucuacaucagccggcgccugcugggcaccuucaccuggacgcucuccgacagcgaggggaacgagaccccgggcggguacugccugacccgguggaugcugaucgaggcggagcucaagugcuucggcaacaccgccguggccaagugcaacgagaagcacgacgaggaguucugcgacaugcugcgccuguucgacuucaacaagcaggccauccggcgccucaagacggaggcccagauguccauccagcugaucaacaaggcggugaacgcccugaucaacgaccagcucaucaugaagaaccaccuccgggacaucaugugcauccccuacugcaacuacagccgcuacugguaccugaaccacaccuccaccgggaagaccagccugccccggugcuggcugaucuccaacggcagcuaccugaacgagacgaaguucuccgacgacaucgagcagcaggccgacaacaugaucaccgagaugcugcagaaggaguacaucgaccgccagggcaagacgccccucgggcuggucgaccuguucguguucagcaccuccuucuaccucaucagcaucuuccugcaccuggugaagaucccgacccaccggcacaucgucggcaagcccugccccaagccccaccgccucaaccacauggggaucugcuccugcggccuguacaagcagccgggggugcccgugcgguggaagcgcuga

SEQ ID NO: 34889 - RNA, 1476 nt, Artificial Sequence
  derived and/or modified CDS sequence (opt1) from LASV(AV;Clade V)__CCA30314__GPCmut9
augggccagaucgugaccuucuuccaggaggucccccacgugaucgaggaggugaugaacaucguccugaucgcccucagcauccuggccgugcugaaggggcucuacaacaucgcgaccugcggccugaucgggcugaucacguuccuccugcugugcggccgcuccugcagcuccaaccucuacaaggggguguacgagcugcagagccuggaccucaacauggagacccugaacaugaccaugccgcuguccugcaccaagaacaacagccaccacuacauccgggucggcaacgacacgggccucgagcugacccugaccaacaccuccauccucaaccacaaguucugcaaccugagcgacgcccacaagaaggaccuguacgaccacgcccucauguccaucaucagcacguuccaccuguccauccccaacuucaaccaguacgaggccaugagcugcgacuucaacgggggcaagaucuccgugcaguacaaccugagccacuccuacgccaucgacgcggccaaccacugcgggaccguggccaacggcauccuccagaccuucaugcgcauggccuggggcgggagcuacaucgcgcuggacuccggcugcgggaacugggacugcaucaugaccagcuaccaguaccugaucauccagaacacgaccugggagaaccacugccaguucucccggcccagccccaucggcuaccucgggcugcugagccagcgcacccgggacaucuacaucucccgccggcuccugggcaccuucacguggacccugagcgacuccgagggcaacgccacccccgggggcuacugccucacccgcuggaugcugaucgaggccgagcugaagugcuucgggaacacggccgucgccaagugcaacgagaagcacgacgaggaguucugcgacaugcuccggcuguucgacuucaacaagcaggcgaucagccgccugaaguccgaggcccagaugagcauccagcucaucaacaaggccgugaacgcccugaucaacgaccagcugaucaugaagaaccaccuccgggacaucaugugcauccccuacugcaacuacuccaaguacugguaccugaaccacaccaucaccggcaagaccagccugcccaagugcuggcucguguccaacgggagcuaccugaacgagacgcacuucuccgacgacaucgagcagcaggccgacaacaugaucaccgagaugcugcagaaggaguacauggagcgccagggcaagaccccgcugggccucgucgaccuguucguguucagcaccuccuucuaccugaucagcaucuuccuccggcuggugaagaucccgacgcaccgccacaucgucgggaagcccugccccaagccccaccggcugaaccacaugggcaucugcuccugcgggcucuacaagcagccgggcgugcccgugcgcuggaagcgguga

SEQ ID NO: 34890 - RNA, 1473 nt, Artificial Sequence
  derived and/or modified CDS sequence (opt1) from LASV(Togo/2016/7082;Clade VI)__AMR44577__GPCmut9
augggccagaucaucaccuucuuccaggaggugccccacgucaucgaggaggugaugaacaucgugcugaucgcccucagccugcuggccauccucaagggggucuacaacguggcgaccugcggcaucaucgggcuggugacguuccuguuccucugcggccgcuccugcagccugaucuacaagggguccuacgagcugcagacccucgagcugaacauggagacccugaacaugaccaugccgcucagcugcacgaagaacuccagccaccacuacauccgggucggcaacgagaccggccuggagcugacccucaccaacacguccaucaucaaccacaaguucugcaaccugagcgacgcccacaagcgcaaccuguacgaccacgcccucauguccauccugagcaccuuccaccuguccauccccaacuucaaccaguacgaggccaugagcugcgacuucaacgggggcaagaucuccgugcaguacaaccucagccacgccuacgcgguggacgccgccgagcacugcgggaccgucgccaacggcgugcugcagaccuucaugcggauggcguggggcggguccuacaucgcccuggacagcggcugcgggaacugggacugcaucaugacguccuaccaguaccucaucauccagaacaccaccugggaggaccacugccaguucagccgccccucccccaucggcuaccuggggcugcucagccagcggacccgcgacaucuacaucagccggcgccugcugggcacguucaccuggacccucuccgacagcgagggcaacgagacccccgggggcuacugccugacgcgguggaugcugaucgaggccgagcucaagugcuucgggaacaccgccguggccaagugcaacgagaagcacgacgaggaguucugcgacaugcugcgccuguucgacuucaacaagcaggcgauccagcggcucaaguccgaggcccagaugagcauccagcugaucaacaaggccgucaacgcccugaucaacgaccagcucaucaugaagaaccaccuccgcgacaugaugugcauccccuacugcaacuacuccaaguacugguaccugaaccacaccagcuccggccggaccagccugcccaagugcuggcugguguccaacgggagcuaccugaacgagacgcacuucuccgacgacaucgagcagcaggccgacaacaugaucaccgagaugcuccagaaggaguacaucgaccgccagggcaagaccccgcugggccugguggaccuguucgucuucagcaccuccuucuaccucaucagcaucuuccugcaccugaucaagaucccgacgcaccggcacaucguggggaagcccugccccaagccccaccgccucaaccacaugggcaucugcuccugcgggcuguacaagcagccgggcgugcccacccgguggaagcgcuga

SEQ ID NO: 34891 - RNA, 1473 nt, Artificial Sequence
  derived and/or modified CDS sequence (opt1) from LASV(KAK-428;Clade n.d. (VII))__ANH09740__GPCmut9
augggccagaucgugaccuucuuccaggaggucccccacgugaucgaggaggugaugaacaucguccugaucgcccucagccugcuggccauccucaaggggcuguacaacuucgcgaccugcggcgugaucgggcugaucacguuccuccugcugugcggccgcuccugcagcgccaccuacaaggggcaguacgagcuccagacccuggagcugaacauggagucccucaacaugaccaugccgcugagcugcacgaagaacaacucccaccacuacauccgggccggcaacaacaccggccuggagcucacccugaccaacacgagcaucaucucccacaaguucugcaaccugagcgacgcccacaagaagaaccucuacgaccacacccugauguccaucaucaccaccuuccaccugagcauccccaacuucaaccaguacgaggccauguccugcgacuucaacgggggcaagaucagcauccaguacaaccucucccacagcuacgcgggggacgccgcccagcacugcggcacgguggccaacgggguccugcagaccuucaugcgcauggcguggggcggcuccuaccuggcccucgacagcgggugccggggcugggacugcaucaucuccagcuaccaguaccugaucauccagaacaccaccugggacgaccacugccaguucucccgccccagccccaucggguaccugggcuucgugagccagaagacgcgggacaucuacaucucccgccggcuccugggcaccuucaccuggacccugagcgacuccgaggggcacgacaugccgggcggguacugccucacgcgcuggaugcugaucgaggccgaccugaagugcuucggcaacaccgccguggccaagugcaacgagaagcacgacgaggaguucugcgacauguggcggcuguucgacuucaacaagcaggcgauccagcgccugaaggccgaggcccagaugaacauccagcugaucaacaaggccgucaacgcccucaucaacgaccagcugaugaugaagaaccaccuccgggacaucaugugcauccccuacugcaacuacagcaaguucugguaccucaacaacaccaccacggggcgcaccucccugccccggugcuggcugaucagcaacggcuccuaccucaacgagacccacuucagcgacgacaucgagcagcaggcggacaacaugaucaccgagaugcugcagaaggaguacauggaccgccagggcaagacgccccuggggcucguggaccuguucguguucuccaccagcuucuaccugaucaccaucuuccugcaccucgucaagaucccgacccaccggcacaucgugggcaagcccugccccaagccccaccgccugaaccacauggggaucugcuccugcggccuguacaagcagccgggggugcccguccgguggaagcgcuga

SEQ ID NO: 34892 - RNA, 1473 nt, Artificial Sequence; identical to SEQ ID NO: 34886
  derived and/or modified CDS sequence (opt1) from LASV(Pinneo-NIG-1969;Clade I)__AIT17836__GPCmut9

SEQ ID NO: 34893 - RNA, 1473 nt, Artificial Sequence
  derived and/or modified CDS sequence (opt1) from LASV(ISTH0009-NIG-2011;Clade II)__AIT17404__GPCmut9
augggccagaucaucaccuucuuccaggaggugccccacgucaucgaggaggugaugaacaucgugcugaucgcccucagccugcuggccauccucaaggggaucuacaacgucgcgaccugcggccuguucgggcugguguccuuccuccugcugugcggccgcagcugcuccacgaccuacaaggggguguacgagcuccagacccuggagcuggacauggccagccucaacaugaccaugccgcuguccugcacgaagaacaacagccaccacuacaucauggucggcaacgagaccggccuggagcucacccugaccaacacguccaucaucaaccacaaguucugcaaccugagcgacgcccacaagaagaaccucuacgaccacgcccugauguccaucaucagcaccuuccaccuguccauccccaacuucaaccaguacgaggccaugagcugcgacuucaacgggggcaagaucuccgugcaguacaaccucagccacgcguacgccguggacgccgccaaccacugcgggaccaucgcgaacggcguccugcagaccuucaugcggauggccuggggcggguccuacaucgcccuggacagcggcugcggguccugggacugcaucaugacgagcuaccaguaccucaucauccagaacaccaccugggaggaccacugccaguucucccgccccagccccaucggcuaccuggggcugcucagccagcggacccgcgacaucuacaucucccggcgccugcugggcacguucaccuggacccucagcgacuccgagggcaacgagacccccgggggcuacugccugacgcgguggaugcugaucgaggccgagcucaagugcuucgggaacaccgccguggcgaagugcaacgagaagcacgacgaggaguucugcgacaugcugcgccuguucgacuucaacaagcaggccauccggcgccucaagaccgaggcccagaugagcauccagcugaucaacaaggccgugaacgcccugaucaacgaccagcucaucaugaagaaccaccuccgggacaucaugugcaucccguacugcaacuacuccaaguacugguaccugaaccacaccgucacgggcaagaccagccugccccgcugcuggcugguguccaacgggagcuaccugaacgagacccacuucuccgacgacaucgagcagcaggcggacaacaugaucaccgagcuccugcagaaggaguacauggaccggcagggcaagacgccccugggccugguggaccucuucgucuucagcaccuccuucuaccugaucagcaucuuccugcaccucaucaagaucccgacccaccgccacaucaccgggaagcccugccccaagccccaccggcugaaccacaugggcaucugcuccugcgggcuguacaagcacccgggcgugcccgugaaguggaagcgcuga

SEQ ID NO: 34894 - RNA, 1473 nt, Artificial Sequence
  derived and/or modified CDS sequence (opt1) from LASV(ISTH2010-NIG-2012;Clade II)__AIT17482__GPCmut9
augggccagaucaucaccuucuuccaggaggugccccacgucaucgaggaggugaugaacaucgugcugaucgcccucagccugcuggccauccucaaggggaucuacaacgucgcgaccugcggccuguucgggcugguguccuuccuccugcugugcggccgcagcugcuccacgaccuacaaggggguguacgagcuccagacccuggagcuggacauggccagccucaacaugaccaugccgcuguccugcacgaagaacaacagccaccacuacaucauggucggcaacgagaccggccuggagcucacccugaccaacacguccaucaucaaccacaaguucugcaaccugagcgacgcccacaagaagaaccucuacgaccacgcccugauguccaucaucagcaccuuccaccuguccauccccaacuucaaccaguacgaggccaugagcugcgacuucaacgggggcaagaucuccgugcaguacaaccucagccacgcguacgccguggacgccgccaaccacugcgggaccaucgcgaacggcguccugcagaccuucaugcggauggccuggggcggguccuacaucgcccuggacagcggcugcggguccugggacugcaucaugacgagcuaccaguaccucaucauccagaacaucaccugggaggaccacugccaguucucccgccccagccccaucggcuaccuggggcugcucagccagcggacccgcgacaucuacaucucccggcgccugcugggcaccuucacguggacccucagcgacuccgagggcaacgagacccccgggggcuacugccugacccgguggaugcugaucgaggccgagcucaagugcuucgggaacacggccguggcgaagugcaacgagaagcacgacgaggaguucugcgacaugcugcgccuguucgacuucaacaagcaggccauccggcgccucaagaccgaggcccagaugagcauccagcugaucaacaaggccgugaacgcccugaucaacgaccagcucaucaugaagaaccaccuccgggacaucaugugcauccccuacugcaacuacuccaaguacugguaccugaaccacaccgucaccggcaagacgagccugccccgcugcuggcugguguccaacgggagcuaccugaacgagacccacuucuccgacgacaucgagcagcaggcggacaacaugaucaccgagcuccugcagaaggaguacaucgaccggcagggcaagaccccgcugggccugguggaccucuucgucuucagcacguccuucuaccugaucagcaucuuccugcaccucgugaagaucccgacccaccgccacguggucgggaagcccugccccaagccccaccggcugaaccacaugggcaucugcuccugcgggcuguacaagcacccgggcgugcccgugaaguggaagcgcuga

SEQ ID NO: 34895 - RNA, 1473 nt, Artificial Sequence
  derived and/or modified CDS sequence (opt1) from LASV(Lassa virus/H.sapiens-wt/NGA/2015/ISTH_0543;Clade II)__AVO03639__GPCmut9
augggccagaucaucaccuucuuccaggaggugccccacgucaucgaggaggugaugaacaucgugcugaucgcccucagccugcuggccauccucaaggggaucuacaacgucgcgaccugcggccuguucgggcugguguccuuccuccugcugugcggccgcagcugcuccacgaccuacaaggggguguacgagcuccagacccuggagcuggacauggccaaccucaacaugaccaugccgcugagcugcacgaagaacaacucccaccacuacaucauggucggcaacgagaccggccuggagcucacccugaccaacacgagcaucaucaaccacaaguucugcaaccuguccgacgcccacaagaagaaccucuacgaccacgcccugaugagcaucaucuccaccuuccaccugagcauccccaacuucaaccaguacgaggccauguccugcgacuucaacgggggcaagaucagcgugcaguacaaccucucccacaccuacgcgguggacgccgccaaccacugcgggaccaucgccaacggcguccugcagacguucaugcggauggcguggggcgggagcuacaucgcccuggacuccggcugcgggagcugggacugcaucaugaccuccuaccaguaccucgugauccagaacaccaccugggaggaccacugccaguucagccgccccucccccaucggcuaccuggggcugcucagccagcggacgcgcgacaucuacaucagccggcgccugcugggcaccuucaccuggacccucuccgacagcgagggcaacgagacgcccgggggcuacugccugacccgguggaugcugaucgaggccgagcucaagugcuucgggaacaccgccguggccaagugcaacgagaagcacgacgaggaguucugcgacaugcugcgccuguucgacuucaacaagcaggcgauccggcgccucaagaccgaggcccagauguccauccagcugaucaacaaggccgucaacgcccugaucaacgaccagcucaucaugaagaaccaccuccgggacaucaugugcauccccuacugcaacuacagcaaguacugguaccugaaccacacggugaccggcaagaccucccugccccgcugcuggcuggugagcaacggguccuaccugaacgagacccacuucagcgacgacaucgagcagcaggccgacaacaugaucacggagcuccugcagaaggaguacaucgaccggcagggcaagaccccgcugggccuggucgaccucuucguguucuccaccagcuucuaccugaucuccaucuuccugcaccucgugaagaucccgacccaccgccacaucacggggaagcccugccccaagccccaccggcugaaccacaugggcaucugcagcugcgggcuguacaagcacccgggcguccccgugaaguggaagcgcuga

SEQ ID NO: 34896 - RNA, 1473 nt, Artificial Sequence
  derived and/or modified CDS sequence (opt1) from LASV(Lassa virus/H.sapiens-wt/NGA/2016/ISTH_0009;Clade II)__AVO03571__GPCmut9
augggccagaucaucaccuucuuccaggaggugccccacgucaucgaggaggugaugaacaucgugcugaucgcccucagccugcuggccauccucaaggggaucuacaacgucgcgaccugcggccugcuggggcucguguccuuccugcugcucugcggccgcagcugcuccacgaccuacaaggggguguacgagcugcagacccuggagcucgacauggccagccugaacaugaccaugccgcuguccugcacgaagaacaacagccaccacuacaucauggucggcaacgagaccggccucgagcugacccugaccaacacguccaucaucaaccacaaguucugcaaccucagcgacgcccacaagaagaaccuguacgaccacgcccugauguccaucaucagcaccuuccaccucuccauccccaacuucaaccaguacgaggccaugagcugcgacuucaacgggggccggaucuccgugcaguacaaccugagccacuccuacgcgguggacgccgccaaccacugcgggaccaucgccaacggcguccugcagaccuucaugcgcauggcguggggcgggagcuacaucgcccucgacuccggcugcgggagcugggacugcaucaugacguccuaccaguaccugaucauccagaacaccaccugggaggaccacugccaguucagccggcccagccccaucggcuaccuggggcuccugucccagcgcacccgggacaucuacaucagccgccggcugcucggcacguucaccuggacccuguccgacagcgagggcaacgagacccccgggggcuacugccugacgcgcuggaugcucaucgaggccgagcugaagugcuucgggaacaccgccguggccaagugcaacgagaagcacgacgaggaguucugcgacaugcugcggcuguucgacuucaacaagcaggcgauccgccggcugaagaccgaggcccagauguccauccagcugaucaacaaggccgugaacgcccucaucaacgaccagcugaucaugaagaaccaccuccgcgacaucaugugcaucccguacugcaacuacagcaaguacugguaccucaaccacaccgucacgggcaagaccucccugccccggugcuggcuggugagcaacggguccuaccucaacgagacccacuucagcgacgacaucgagcagcaggccgacaacaugaucaccgagcugcugcagaaggaguacaucgaccgccagggcaagacgccccugggccucguggaccuguucgucuucuccaccagcuucuaccugaucuccaucuuccuccaccuggugaagaucccgacccaccggcacaucaccgggaagcccugccccaagccccaccgccugaaccacaugggcaucugcagcugcgggcucuacaaccacccgggcgugcccgucaaguggaagcgguga

SEQ ID NO: 34897 - RNA, 1473 nt, Artificial Sequence
  derived and/or modified CDS sequence (opt1) from LASV(Lassa virus/H.sapiens-wt/NGA/2016/ISTH_0017;Clade II)__AVO03567__GPCmut9
augggccagaucaucaccuucuuccaggaggugccccacgucaucgaggaggugaugaacaucgugcugaucgcccucagccugcuggccauccucaaggggaucuacaacgucgcgaccugcggccuguucgggcugguguccuuccuccugcugugcggccgcagcugcuccacgaccuacaaggggguguacgagcuccagacccuggagcuggacauggccagccucaacaugaccaugccgcuguccugcacgaagaacaacagccaccacuacaucauggucggcaacgagaccggccuggagcucacccugaccaacacguccaucaucaaccacaaguucugcaaccugagcgacgcccacaagaagaaccucuacgaccacgcccugauguccaucaucagcaccuuccaccuguccauccccaacuucaaccaguacgaggccaugagcugcgacuucaacgggggcaagaucuccgugcaguacaaccucagccacaccuacgcgaucgacgccgccaaccacugcgggaccaucgccaacggcgugcugcagacguucaugcggauggcguggggcggguccuacaucgcccuggacagcggcugcggguccugggacugcaucaugaccagcuaccaguaccucaucauccagaacaccaccugggaggaccacugccaguucucccgccccagccccaucggcuaccuggggcugcucagccagcggacgcgcgacaucuacaucucccggcgccugcugggcaccuucaccuggacccucagcgacuccgagggcaacgagacgcccgggggcuacugccugacccgguggaugcugaucgaggccgagcucaagugcuucgggaacaccgccgucgccaagugcaacgagaagcacgacgaggaguucugcgacaugcugcgccuguucgacuucaacaagcaggcgauccggcgccucaagaccgaggcccagaugagcauccagcugaucaacaaggccgugaacgcccugaucaacgaccagcucaucaugaagaaccaccuccgggacaucaugugcauccccuacugcaacuacuccaaguacugguaccugaaccacacggugaccggcaagaccagccugccccgcugcuggcuggucuccaacgggagcuaccugaacgagacccacuucuccgacgacaucgagcagcaggccgacaacaugaucacggagcuccugcagaaggaguacauggaccggcagggcaagaccccgcugggccugguggaccucuucguguucagcaccuccuucuaccugaucagcaucuuccugcaccucguccgcaucccgacccaccggcacgugaucgggaagcccugccccaagccccaccgccugaaccacaugggcaucugcuccugcgggcuguacaagcacccgggcgugcccgucaaguggaagcgguga

SEQ ID NO: 34898 - RNA, 1473 nt, Artificial Sequence
  derived and/or modified CDS sequence (opt1) from LASV(Lassa virus/H.sapiens-wt/NGA/2018/ISTH_0959;Clade II)__AVV65099__GPCmut9
augggccagaucaucaccuucuuccaggaggugccccacgucaucgaggaggugaugaacaucgugcugaucgcccucagccugcuggccauccucaaggggaucuacaacgucgugaccugcggccuguucgggcugguguccuuccuccugcugugcggccgcagcugcuccacgaccuacaagggggucuacgagcuccagacccuggagcuggacauggcgagccucaacaugaccaugccgcuguccugcacgaagaacaacagccaccacuacaucauggugggcaacgagaccggccuggagcucacccugaccaacacguccaucaucaaccacaaguucugcaaccugagcgacgcccacaagaagaaccucuacgaccacgcccugauguccaucaucagcaccuuccaccuguccauccccaacuucaaccaguacgaggccaugagcugcgacuucaacgggggcaagaucuccgugcaguacaaccucagccacgccuacgcgaucgacgccgccaaccacugcgggaccaucgccaacggcguccugcagaccuucaugcggauggcguggggcggguccuacaucgcccuggacagcggcugcggguccugggacugcaucaugacgagcuaccaguaccucaucauccagaacaccaccugggaggaccacugccaguucucccgccccagccccaucggcuaccuggggcugcucagccagcggacccgcgacaucuacaucucccggcgccugcugggcacguucaccuggacccucagcgacuccgagggcaacgagacccccgggggcuacugccugacgcgguggaugcugaucgaggccgagcucaagugcuucgggaacaccgccguggccaagugcaacgagaagcacgacgaggaguucugcgacaugcugcgccuguucgacuucaacaagcaggcgauccggcgccucaagaccgaggcccagaugagcauccagcugaucaacaaggccgugaacgcccugaucaacgaccagcucaucaugaagaaccaccuccgggacaucaugugcaucccguacugcaacuacuccaaguacugguaccugaaccacaccgucacgggcaagaccagccugccccgcugcuggcugguguccaacgggagcuaccugaacgagacccacuucuccgacgacaucgagcagcaggccgacaacaugaucaccgagcuccugcagaaggaguacaucgaccggcagggcaagacgccccugggccugguggaccucuucgucuucagcaccuccuucuaccugaucagcaucuuccugcaccucgugaagaucccgacccaccgccacgugaucgggaagcccugccccaagccccaccggcugaaccacaugggcaucugcuccugcgggcuguacaagcacccgggcguccccgugaaguggaagcgcuga

SEQ ID NO: 34899 - RNA, 1473 nt, Artificial Sequence
  derived and/or modified CDS sequence (opt1) from LASV(LASV003-NIG-2008;Clade II)__AIT17580__GPCmut9
augggccagaucaucaccuucuuccaggaggugccccacgucaucgaggaggugaugaacaucgugcugaucgcccucagccugcuggccauccucaaggggaucuacaacgucgcgaccugcggccuguucgggcugguguccuuccuccugcugugcggccgcagcugcuccacgaccuacaaggggguguacgagcuccagacccuggagcuggacauggccagccucaacaugaccaugccgcuguccugcacgaagaacaacagccaccacuacaucauggucggcaacgagaccggccuggagcucacccugaccaacacguccaucaucaaccacaaguucugcaaccugagcgacgcccacaagaagaaccucuacgaccacgcccugauguccaucaucagcaccuuccaccuguccauccccaacuucaaccaguacgaggccaugagcugcgacuucaacgggggcaagaucuccgugcaguacaaccucagccacaccuacgcgguggacgccgccaaccacugcgggaccaucgccaacggcguccugcagacguucaugcggauggcguggggcggguccuacaucgcccuggacagcggcugcggguccugggacugcaucaugaccagcuaccaguaccucaucauccagaacaccaccugggaggaccacugccaguucucccgccccagccccaucggcuaccuggggcugcucagccagcggacgcgcgacaucuacaucucccggcgccugcugggcaccuucaccuggacccucagcgacuccgagagcaacgagacgccgggcggguacugccugacccgguggaugcugaucgaggccgagcucaagugcuucggcaacaccgccguggccaagugcaacgagaagcacgacgaggaguucugcgacaugcugcgccuguucgacuucaacaagcaggcgauccggcgccucaaggccgaggcccagauguccauccagcugaucaacaaggccgugaacgcccugaucaacgaccagcucaucaugaagaaccaccuccgggacaucaugugcauccccuacugcaacuacagcaaguacugguaccugaaccacaccgucacggggcgcaccucccugccccggugcuggcuggugagcaacggcuccuaccugaacgagacccacuucagcgacgacaucgagcagcaggcggacaacaugaucaccgagcuccugcagaaggaguacauggaccgccaggggaagacgccccugggccugguggaccucuucgucuucuccaccagcuucuaccugaucuccaucuuccugcaccucgugaagaucccgacccaccggcacgugaucggcaagcccugccccaagccccaccgccugaaccacauggggaucugcagcugcggccuguacaagcacccggggguccccgugaaguggaagcgguga

SEQ ID NO: 34900 - RNA, 1473 nt, Artificial Sequence
  derived and/or modified CDS sequence (opt1) from LASV(LASV035-NIG-2009;Clade II)__AIT17588__GPCmut9
augggccagaucaucaccuucuuccaggaggugccccacgucaucgaggaggugaugaacaucgugcugaucgcccucagccugcuggccauccucaaggggaucuacaacgucgcgaccugcggccuguucgggcugguguccuuccuccugcugugcggccgcagcugcuccacgaccuacaaggggguguacgagcuccagacccuggagcuggacauggccagccucaacaugaccaugccgcuguccugcacgaagaacaacagccaccacuacaucauggucggcaacgagaccggccuggagcucacccugaccaacacguccaucaucaaccacaaguucugcaaccugagcgacgcccacaagaagaaccucuacgaccacgcccugauguccaucaucagcaccuuccaccuguccauccccaacuucaaccaguacgaggccaugagcugcgacuucaacgggggcaagaucuccgugcaguacaaccucagccacgcguacgccguggacgccgccaaccacugcgggaccaucgcgaacggcguccugcagaccuucaugcggauggccuggggcggguccuacaucgcccuggacagcggcugcggguccugggacugcaucaugacgagcuaccaguaccucaucauccagaacaccaccugggaggaccacugccaguucucccgccccagccccaucggcuaccuggggcugcucagccagcggacccgcgacaucuacaucucccggcgccugcugggcacguucaccuggacccucagcgacuccgagggcaacgagacccccgggggcuacugccugacgcgguggaugcugaucgaggccgagcucaagugcuucgggaacaccgccguggcgaagugcaacgagaagcacgacgaggaguucugcgacaugcugcgccuguucgacuucaacaagcaggccauccggcgccucaaggccgaggcccagaugagcauccagcugaucaacaaggccgugaacgcgcugaucaacgaccagcucaucaugaagaaccaccuccgggacaucaugugcauccccuacugcaacuacuccaaguacugguaccugaaccacaccgucaccggcaagacgagccugccccgcugcuggcugguguccaacgggagcuaccugaacgagacccacuucuccgacgacaucgagcagcaggccgacaacaugaucaccgagcuccugcagaaggaguacaucgaccggcagggcaagaccccgcugggccugguggaccucuucgucuucagcacguccuucuaccugaucagcaucuuccugcaccucgugaagaucccgacccaccgccacgugaucgggaagcccugccccaagccccaccggcugaaccacaugggcaucugcuccugcgggcuguacaagcacccgggcguccccgugaaguggaagcgcuga

SEQ ID NO: 34901 - RNA, 1473 nt, Artificial Sequence
  derived and/or modified CDS sequence (opt1) from LASV(LASV1000-NIG-2009;Clade II)__AIT17782__GPCmut9
augggccagaucaucaccuucuuccaggaggugccccacgucaucgaggaggugaugaacaucgugcugaucgcccucagccugcuggccauccucaaggggaucuacaacgucgcgaccugcggccuguucgggcugguguccuuccuccugcugugcggccgcagcugcuccacgaccuacaaggggguguacgagcuccagacccuggagcuggacauggccagccucaacaugaccaugccgcuguccugcacgaagaacaacagccaccacuacaucauggucggcaacgagaccggccuggagcucacccugaccaacacguccaucaucaaccacaaguucugcaaccugagcgacgcccacaagaagaaccucuacgaccacgcccugauguccaucaucagcaccuuccaccuguccauccccaacuucaaccaguacgaggccaugagcugcgacuucaacgggggcaagaucuccgugcaguacaaccucagccacaccuacgcgguggacgccgccaaccacugcgggaccaucgccaacggcguccugcagacguucaugcggauggcguggggcggguccuacaucgcccuggacagcggcugcggguccugggacugcaucaugaccagcuaccaguaccucaucauccagaacaccaccugggaggaccacugccaguucucccgccccagccccaucggcuaccuggggcugcucagccagcggacgcgcgacaucuacaucucccggcgccugcugggcaccuucaccuggacccucagcgacuccgagggcaacgagacgcccgggggcuacugccugacccgguggaugcugaucgaggccgagcucaagugcuucgggaacaccgccguggccaagugcaacgagaagcacgacgaggaguucugcgacaugcugcgccuguucgacuucaacaagcaggcgaucaagcggcucaagaccgaggcccagaugagcauccagcugaucaacaaggccgugaacgcccugaucaacgaccagcucaucaugaagaaccaccuccgcgacaucaugugcauccccuacugcaacuacuccaaguacugguaccugaaccacacggucaccggcaagaccagccugccccggugcuggcugguguccaacgggagcuaccugaacgagacccacuucuccgacgacaucgagcagcaggccgacaacaugaucacggagcuccugcagaaggaguacaucgaccgccagggcaagaccccgcugggccugguggaccucuucgucuucagcaccuccuucuaccugaucagcaucuuccugcaccucgugaagaucccgacccaccggcacguggucgggaagcccugccccaagccccaccgccugaaccacaugggcaucugcuccugcgggcuguacaagcacccgggcgugcccgugaaguggaagcgguga

SEQ ID NO: 34902 - RNA, 1473 nt, Artificial Sequence
  derived and/or modified CDS sequence (opt1) from LASV(LASV221-NIG-2010;Clade II)__AIT17624__GPCmut9
augggccagaucaucaccuucuuccaggaggugccccacgucaucgaggaggugaugaacaucgugcugaucgcccucagccugcuggccauccucaaggggaucuacaacgucgcgaccugcggccuguucgggcugguguccuuccuccugcugugcggccgcagcugcuccacgaccuacaaggggguguacgagcuccagacccuggagcuggacauggccagccucaacaugaccaugccgcuguccugcacgaagaacaacagccaccacuacaucauggucggcaacgagaccggccuggagcucacccugaccaacacguccaucaucaaccacaaguucugcaaccugagcgacgcccacaagaagaaccucuacgaccacgcccugauguccaucaucagcaccuuccaccuguccauccccaacuucaaccaguacgaggccaugagcugcgacuucaacgggggcaagaucuccgugcaguacaaccucagccacaccuacgcgaucgacgccgccaaccacugcgggaccaucgccaacggcgugcugcagacguucaugcggauggcguggggcggguccuacaucgcccuggacagcggcugcggguccugggacugcaucaugaccagcuaccaguaccucaucauccagaacaccaccugggaggaccacugccaguucucccgccccagccccaucggcuaccuggggcugcucagccagcggacgcgcgacaucuacaucucccggcgccugcugggcaccuucaccuggacccucagcgacuccgagggcaacgagacgcccgggggcuacugccugacccgguggaugcugaucgaggccgagcucaagugcuucgggaacaccgccgucgccaagugcaacgagaagcacgacgaggaguucugcgacaugcugcgccuguucgacuucaacaagcaggcgauccggcgccucaagaccgaggcccagaugagcauccagcugaucaacaaggccgugaacgcccugaucaacgaccagcucaucaugaagaaccaccuccgggacaucaugugcauccccuacugcaacuacuccaaguacugguaccugaaccacacggugaccggcaagaccagccugccccgcugcuggcuggucuccaacgggagcuaccugaacgagacccacuucuccgacgacaucgagcagcaggccgacaacaugaucacggagaugcuccagaaggaguacauggaccggcagggcaagaccccgcugggccugguggaccuguucguguucagcaccuccuucuaccucaucagcaucuuccugcaccuggucaagaucccgacccaccgccacgugaucgggaagcccugccccaagccccaccggcucaaccacaugggcaucugcuccugcgggcuguacaagcacccgggcgugcccgucaaguggaagcgcuga

SEQ ID NO: 34903 - RNA, 1473 nt, Artificial Sequence
  derived and/or modified CDS sequence (opt1) from LASV(LASV237-NIG-2010;Clade II)__AIT17638__GPCmut9
augggccagaucaucaccuucuuccaggaggugccccacgucaucgaggaggugaugaacaucgugcugaucgcccucagccugcuggccauccucaaggggaucuacaacgucgcgaccugcggccuguucgggcugguguccuuccuccugcugugcggccgcagcugcuccacgaccuacaaggggguguacgagcuccagacccuggagcuggacauggccagccucaacaugaccaugccgcuguccugcacgaagaacaacagccaccacuacaucauggucggcaacgagaccggccuggagcucacccugaccaacacguccaucaucaaccacaaguucugcaaccugagcgacgcccacaagaaggaccucuacgaccacgcccugauguccaucaucagcaccuuccaccuguccauccccaacuucaaccaguacgaggccaugagcugcgacuucaacgggggcaagaucuccgugcaguacaaccucagccacaccuacgcgguggacgccgccaaccacugcgggaccaucgccaacggcguccugcagacguucaugcggauggcguggggcggguccuacaucgcccuggacagcggcugcggguccugggacugcaucaugaccagcuaccaguaccucaucauccagaacaccaccugggaggaccacugccaguucucccgccccagccccaucggcuaccuggggcugcucagccagcggacgcgcgacaucuacaucucccggcgccugcugggcaccuucaccuggacccucagcgacuccgagggcaacgagacgcccgggggcuacugccugacccgguggaugcugaucgaggccgagcucaagugcuucgggaacaccgccguggccaagugcaacgagaagcacgacgaggaguucugcgacaugcugcgccuguucgacuucaacaagcaggcgauccggcgccucaagaccgaggcccagaugagcauccagcugaucaacaaggccgugaacgcccugaucaacgaccagcucaucaugaagaaccaccuccgggacaucaugugcauccccuacugcaacuacuccaaguacugguaccugaaccacacggucaccggcaagaccagccugccccgcugcuggcugguguccaacgggagcuaccugaacgagacccacuucuccgacgacaucgagcagcaggccgacaacaugaucacggagcuccugcagaaggaguacauggaccggcagggcaagaccccgcugggccugguggaccucuucgucuucagcaccuccuucuaccugaucagcaucuuccugcaccucaucaagaucccgacccaccgccacaucacggggaagcccugccccaagccccaccggcugaaccacaugggcaucugcuccugcgggcuguacaagcacccgggcgugcccgugaaguggaagcgcuga

SEQ ID NO: 34904 - RNA, 1473 nt, Artificial Sequence
  derived and/or modified CDS sequence (opt1) from LASV(LASV253-NIG-2011;Clade II)__AIT17670__GPCmut9
augggccagaucaucaccuucuuccaggaggugccccacgucaucgaggaggugaugaacaucgugcugaucgcccucagccugcuggccauccucaaggggaucuacaacgucgcgaccugcggccuguucgggcugguguccuuccuccugcugugcggccgcagcugcuccacgaccuacaaggggguguacgagcuccagacccuggagcuggacauggccagccucaacaugaccaugccgcuguccugcacgaagaacaacagccaccacuacaucauggucggcaacgagaccggccuggagcucacccugaccaacacguccaucaucaaccacaaguucugcaaccugagcgacgcccacaagaagaaccucuacgaccacgcccugauguccaucaucagcaccuuccaccuguccauccccaacuucaaccaguacgaggccaugagcugcgacuucaacgggggcaagaucuccgugcaguacaaccucagccacaccuacgcgguggacgccgccaaccacugcgggaccaucgccaacggcguccugcagacguucaugcggauggcguggggcggguccuacaucgcccuggacagcggcugcggguccugggacugcaucaugaccagcuaccaguaccucaucauccagaacaccaccugggaggaccacugccaguucucccgccccagccccaucggcuaccuggggcugcucagccagcggacgcgcgacaucuacaucucccggcgccugcugggcaccuucaccuggacccucagcgacuccgagggcaacgagacgcccgggggcuacugccugacccgguggaugcugaucgaggccgagcucaagugcuucgggaacaccgccguggccaagugcaacgagaagcacgacgaggaguucugcgacaugcugcgccuguucgacuucaacaagcaggcgauccggcgccucaaggccgaggcccagaugagcauccagcugaucaacaaggccgugaacgcccugaucaacgaccagcucaucaugaagaaccaccuccgggacaucaugugcaucccguacugcaacuacuccaaguacugguaccugaaccacaccgucacgggccgcaccagccugccccggugcuggcugguguccaacgggagcuaccugaacgagacccacuucuccgacgacaucgagcagcaggcggacaacaugaucaccgagcuccugcagaaggaguacaucgaccgccagggcaagacgccccugggccugguggaccucuucgucuucagcaccuccuucuaccugaucagcaucuuccugcaccucgugaagaucccgacccaccggcacaucaucgggaagcccugccccaagccccaccgccugaaccacaugggcaucugcuccugcgggcuguacaagcacccgggcgugcccgucaaguggaagcgguga

SEQ ID NO: 34905 - RNA, 1473 nt, Artificial Sequence
  derived and/or modified CDS sequence (opt1) from LASV(LASV254-NIG-2011;Clade II)__AIT17674__GPCmut9
augggccagaucaucaccuucuuccaggaggugccccacgucaucgaggaggugaugaacaucgugcugaucgcccucagccugcuggccauccucaaggggaucuacaacgucgcgaccugcggccuguucgggcugguguccuuccuccugcugugcggccgcagcugcuccacgaccuacaaggggguguacgagcuccagacccuggagcuggacaugaccaaccucaacaugacgaugccgcugagcugcaccaagaacaacucccaccacuacaucauggucggcaacgagaccggccuggagcucacccugacgaacaccagcaucaucaaccacaaguucugcaaccuguccgacgcccacaagaagaaccucuacaaccacgcccugaugagcaucaucuccaccuuccaccugagcauccccaacuucaaccaguacgaggccauguccugcgacuucaacgggggcaagaucagcgugcaguacaaccucucccacagcuacgccguggacgcggccaaccacugcgggaccaucgccaacggcguccugcagacguucaugcggauggccuggggcggguccuacaucgcgcuggacagcggcugcgggaacugggacugcaucaugaccuccuaccaguaccucaucauccagaacaccaccugggaggaccacugccaguucagccgccccucccccaucggcuaccuggggcugcucagccagcggacgcgcgacaucuacaucagccggcgccugcugggcaccuucaccuggacccucuccgacagcgagggcaacgagacgcccgggggcuacugccugacccgguggaugcugaucgaggccgagcucaagugcuucgggaacaccgccguggccaagugcaacgagaagcacgacgaggaguucugcgacaugcugcgccuguucgacuucaacaagcaggccauccggcgccucaagaccgaggcgcaggccaacauccagcugaucaacaaggccgugaacgcccugaucaacgaccagcucaucaugaagaaccaccuccgggacaucaugugcauccccuacugcaacuacuccaaguacugguaccugaaccacacggucaccggcaagaccagccugccccgcugcuggcugguguccaacgggagcuaccugaacgagacccacuucuccgacgacaucgagcagcaggccgacaacaugaucacggagcuccugcagaaggaguacauggaccggcagggcaagaccccgcugggccugguggaccucuucgucuucagcaccuccuucuaccugaucagcaucuuccugcaccucgugaagaucccgacccaccgccacgugaucgggaagcccugccccaagccccaccggcugaaccacaugggcaucugcuccugcgggcuguacaagcacccgggcguccccgugaaguggaagcgcuga

SEQ ID NO: 34906 - RNA, 1473 nt, Artificial Sequence
  derived and/or modified CDS sequence (opt1) from LASV(Nig08-A19;Clade III)__ADU56618__GPCmut9
augggccagaucgugaccuucuuccaggaggucccccacgugaucgaggaggugaugaacaucguccugaucgcccucagcauccuggccauccugaaggggcucuacaacaucgcgaccugcggccugaucgggcuggugacguuccuccugcuguccggccgcagcugcuccaugaccuacaaggggguguacgagcuccagacccuggagcugaacaugaacacccucaacaugacgaugccgcugagcugcaccaagaacaacucccaccacuacaucauggucggcaacgagaccggccuggagcucacccugacgaacaccagccugcuccaccacaaguucugcaaccuguccgacgcccacaagaagaaccuguacgaccacacccucaugagcaucaucuccaccuuccaccugagcauccccaacuucaaccaguacgaggccauguccugcgacuucaacgggggcaagaucacggugcaguacaaccugagccacuccuacgccaucgacgccgcgaaccacugcgggaccguggccaacggcguccuccagaccuucaugcggauggccuggggcgggagcuacaucgcccuggacuccggcugcgggaagugggacugcaucaugaccagcuaccaguaccugaucauccagaacacgaccugggaggaccacugccaguucucccgccccagccccaucggcuaccucgggcugcugucccagcggacccgcgacaucuacaucagccggcgccuccugggcaccuucacguggacccugagcgacuccgagggcaacgagacccccgggggcuacugccucacccgguggaugcugaucgaggcggagcugaagugcuucgggaacacggccguggccaagugcaacgagaagcacgacgaggaguucugcgacaugcuccgccuguucgacuucaacaagcaggccauccggcgccugaaggccgaggcgcagaugagcauccagcucaucaacaaggccgugaacgcccugaucaacgaccagcugaucaugaagaaccaccuccgggacaucaugugcauccccuacugcaacuacuccaaguacugguaccugaaccacaccagcaccggccgcaccucccugccccggugcuggcucgucagcaacggguccuaccugaacgagacgcacuucagcgacgacaucgagcagcaggccgacaacaugaucaccgagaugcugcagaaggaguaccuggaccgccagggcaagaccccgcucggccugguggaccuguucguguucuccaccagcuucuaccucaucuccaucuuccugcaccuggucaagaucccgacgcaccggcacaucguggggaagcccugccccaagccccaccgccucaaccacaugggcaucugcagcugcgggcuguacaagcagccgggcgugcccguccgguggaagcgcuga

SEQ ID NO: 34907 - RNA, 1476 nt, Artificial Sequence
  derived and/or modified CDS sequence (opt1) from LASV(G1180-SLE-2010;Clade IV)__AIT17168__GPCmut9
augggccagaucgugaccuucuuccaggaggucccccacgugaucgaggaggugaugaacaucguccugaucgcccucagcauccuggccgugcugaaggggcucuacaacuucgcgaccugcggccugguggggcugcucaccuuccugcugcucugcggccgcuccugcaccgccagccgguacaagggggucuacgagcugcagacccuggagcucaacauggagacccugaacaugacgaugccgcuguccugcaccaagaacaacagccaccacuacaucauggugggcaacgagaccggccucgagcugacccugacgaacaccuccaucaucaaccacaaguucugcaaccucagcgacgcccacaagaagaaccuguacgaccacgcccugauguccaucaucagcaccuuccaccucuccauccccaacuucaaccaguacgaggccaugagcugcgacuucaacgggggcaagaucuccgugcaguacaaccugagccacuccuacgcgggggacgccgccaaccacugcggcaccgucgccaacggggugcugcagacguucaugcgcauggcguggggcggcagcuacaucgcccucgacuccgggugcggcagcugggacugcaucaugaccuccuaccaguaccugaucauccagaacaccaccugggaggaccacugccaguucagccggcccucccccaucggguaccugggccuccugagccagcgcacgcgggacaucuacaucagccgccggcugcucggcaccuucaccuggacccuguccgacagcgaggggaaggacacgccgggcggguacugccugacccgcuggaugcucaucgaggccgagcugaagugcuucggcaacaccgccguggccaagugcaacgagaagcacgacgaggaguucugcgacaugcugcggcuguucgacuucaacaagcaggcgauccagcgccugaaggccgaggcccagauguccauccagcugaucaacaaggccgucaacgcccucaucaacgaccagcugaucaugaagaaccaccuccgggacaucaugugcauccccuacugcaacuacagcaaguacugguaccucaaccacaccacgaccgggaagaccucccugcccaagugcuggcuggugagcaacggcuccuaccucaacgagacccacuucagcgacgacaucgagcagcaggcggacaacaugaucacggagaugcugcagaaggaguacauggagcgccagggcaagacgccccuggggcugguggaccucuucgucuucuccaccagcuucuaccugaucuccaucuuccugcaccucgugaagaucccgacccaccggcacaucgugggcaagagcugccccaagccccaccgccugaaccacauggggaucugcuccugcggccuguacaagcagcccggggucccggugaaguggaagcgguga

SEQ ID NO: 34908 - RNA, 1476 nt, Artificial Sequence
  derived and/or modified CDS sequence (opt1) from LASV(G1442-SLE-2011;Clade IV)__AIT17180__GPCmut9
augggccagaucgugaccuucuuccaggaggucccccacgugaucgaggaggugaugaacaucguccugaucgcccucagcauccuggccgugcugaaggggcucuacaacguggcgaccugcggccugaucgggcuggucacguuccuccugcugugcggccgcuccugcaccaccacccucuacaaggggguguacgagcugcagacgcuggagcucaacauggagacccugaacaugaccaugccgcugagcugcaccaagaacaacucccaccacuacauccgggugggcaacgagacgggccucgagcugacccugaccaacaccagcaucaucaaccacaaguucugcaaccucuccgacgcccacaagaagaaccuguacgaccacgcccugaugagcaucaucuccacguuccaccucagcauccccaacuucaaccaguacgaggccauguccugcgacuucaacgggggcaagaucagcguccaguacaaccugucccacagcuacgccggggacgcggccaaccacugcggcaccguggccaacggggugcugcagaccuucaugcgcauggccuggggcggcuccuacaucgcgcucgacagcgggugcggcaacugggacugcaucaugaccuccuaccaguaccugaucauccagaacacgaccugggacgaccacugccaguucagccggcccucccccaucggguaccugggccuccugagccagcgcacccgggacgucuacaucucccgccggcugcucggcaccuucacguggacccugagcgacagcgaggggaaggacaccccgggcggguacugccugacccgcuggaugcucaucgaggccgagcugaagugcuucggcaacacggccguggccaagugcaacgagaagcacgacgaggaguucugcgacaugcugcggcuguucgacuucaacaagcaggccauccagcgccugaaggcggaggcccagauguccauccagcugaucaacaaggccgugaacgcccucaucaacgaccagcugaucaugaagaaccaccuccgggacaucaugugcauccccuacugcaacuacagcaaguacugguaccucaacaacaccgccaccgggaagaccucccugcccaagugcuggcugaucagcaacggcuccuaccucaacgagacgcacuucagcgacgacaucgagcaggaggcggacaacaugaucaccgagaugcugcagaaggaguacauggagcgccagggcaagacgccccuggggcuggucgaccucuucguguucuccaccagcuucuaccugaucuccaucuuccugcaccucgugaagaucccgacccaccggcacaucgucggcaagagcugccccaagccccaccgccugaaccacauggggaucugcuccugcggccuguacaagcagcccggggugccggugcgguggaagcgcuga

SEQ ID NO: 34909 - RNA, 1476 nt, Artificial Sequence
  derived and/or modified CDS sequence (opt1) from LASV(G3010-SLE-2013;Clade IV)__AIT17344__GPCmut9
augggccagaucgugaccuucuuccaggaggucccccacgugaucgaggaggugaugaacaucguccugaucgcccucagcauccuggccgugcugaaggggcucuacaacuucgcgaccugcggccugguggggcuggucacguuccuccugcugugcggccgcuccugcaccaccagccucuacaaggggguguacgagcugcagacccuggagcucaacauggagacgcugaacaugaccaugccgcuguccugcaccaagaacaacagccaccacuacaucauggugggcaacgagaccggccucgagcugacgcugaccaacaccuccaucaucaaccacaaguucugcaaccucagcgacgcccacaagaagaaccuguacaaccacgcccugauguccaucaucagcaccuuccaccucuccauccccaacuucaaccaguacgaggccaugagcugcgacuucaacgggggcaagaucuccguccaguacaaccugagccacuccuacgccggggacgcggccagccacugcggcacgguggccaacggggugcugcagaccuucaugcggauggccuggggcggcuccuacaucgcgcucgacagcgggugcggcaagugggacugcaucaugaccuccuaccaguaccugaucauccagaacaccacgugggaggaccacugccaguucagccgccccucccccaucggguaccugggccuccugagccagcggacccgcgacaucuacaucagccggcgccugcucggcaccuucaccuggacgcuguccgacagcgaggggaaggacaccccgggcggguacugccugacccgguggaugcucaucgaggccgagcugaagugcuucggcaacaccgccgucgccaagugcaacgagaagcacgacgaggaguucugcgacaugcugcgccucuucgacuucaacaagcaggccauccagcggcugaagacggaggcgcagauguccauccagcugaucaacaaggccgugaacgcccucaucaacgaccagcugaucaugaagaaccaccuccgcgacaucaugugcauccccuacugcaacuacagcaaguacugguaccugaaccacaccaccaccgggaagacgucccugcccaagugcuggcuggugagcaacggcuccuaccucaacgagacccacuucagcgacgacaucgagcagcaggccgacaacaugaucaccgagaugcugcagaaggaguacauggagcggcagggcaagacgccccuggggcuggucgaccucuucguguucuccaccagcuucuaccugaucuccaucuuccugcaccucgugaagaucccgacccaccgccacaucgucggcaagagcugccccaagccccaccggcugaaccacauggggaucugcuccugcggccuguacaagcagcccggggugccggugcgcuggaagcgguga

SEQ ID NO: 34910 - RNA, 1476 nt, Artificial Sequence
  derived and/or modified CDS sequence (opt1) from LASV(G502-SLE-2009;Clade IV)__AIT17126__GPCmut9
augggccagaucgugaccuucuuccaggaggucccccacgugaucgaggaggugaugaacaucguccugaucgcccucagcauccuggccgugcugaaggggcucuacaacuucgcgaccugcggccugguggggcugcucacguuccugcugcucugcggccgcuccugcaccaccgggcuguacaagggcgucuacgagcugcagacccucgagcugaacauggagacgcugaacaugaccaugccgcucagcugcaccaagaacaacucccaccacuacaucauggugggcaacgagaccgggcuggagcugacgcucaccaacaccagcaucaucaaccacaaguucugcaaccuguccgacgcccacaagaagaaccuguacgaccacgcccucaugagcaucaucuccaccuuccaccugagcauccccaacuucaaccaguacgaggccauguccugcgacuucaacggcgggaagaucagcgugcaguacaaccugucccacagcuacgccggcgacgcggccgaccacugcgggacggucgccaacggcgugcuccagaccuucaugcggauggccuggggcggguccuacaucgcgcuggacagcggcugcgggcgcugggacugcaucaugaccuccuaccaguaccugaucauccagaacaccacgugggaggaccacugccaguucagccggcccucccccaucggcuaccucggccugcugagccagcgcacccgggacaucuacaucucccgccggcuccuggggaccuucaccuggacgcugagcgacagcgagggcaaggacacccccgggggcuacugccucacccgcuggaugcugaucgaggccgagcugaagugcuucgggaacaccgccguggccaagugcaacgagaagcacgacgaggaguucugcgacaugcuccggcuguucgacuucaacaagcaggccauccagcgccugaaggcggaggcccagauguccauccagcucaucaacaaggccgucaacgcccugaucaacgaccagcuggugaugaagaaccaccuccgggacaucaugugcauccccuacugcaacuacagccgcuacugguaccugaaccacacgaccaccggccggaccucccugcccaagugcuggcucgugagcaacggcuccuaccugaacgagacgcacuucagcgacgacaucgagcagcaggccgacaacaugaucaccgagaugcugcagaaggaguacauggagcgccaggggaagaccccgcugggccucgucgaccuguucguguucuccaccagcuucuaccugaucuccaucuuccuccaccuggugaagaucccgacgcaccggcacaucgucggcaagagcugccccaagccccaccgccugaaccacauggggaucugcuccugcgggcucuacaagcagcccggcgugccggugaaguggaagcgguga

SEQ ID NO: 34911 - RNA, 1476 nt, Artificial Sequence
  derived and/or modified CDS sequence (opt1) from LASV(G733-SLE-2010;Clade IV)__AIT17154__GPCmut9
augggccagaucgugaccuucuuccaggaggucccccacgugaucgaggaggugaugaacaucguccugaucgcccucagcauccuggccgugcugaaggggcucuacaacuucgcgaccugcggcaucguggggcuggucuccuuccugcuccugugcggccgcagcugcacgaccucccuguacaaggggguguacgagcuccagacccuggagcugaacauggagacccucaacaugacgaugccgcugagcugcaccaagaacaacucccaccacuacaucauggugggcaacgagaccggccuggagcucacccugacgaacaccagcaucaucaaccacaaguucugcaaccuguccgacgcccacaagaagaaccucuacgaccacgcccugaugagcaucaucuccaccuuccaccugagcauccccaacuucaaccaguacgaggccauguccugcgacuucaacgggggcaagaucagcguccaguacaaccucucccacagcuacgccggggacgcggccaaccacugcggcaccaucgccaacggggugcugcagacguucaugcggauggccuggggcggcuccuacaucgcgcuggacagcgggugcgaccgcugggacugcaucaugaccuccuaccaguaccucaucauccagaacaccaccugggaggaccacugccaguucagccggcccucccccaucggcuaccuggggcugcucagccagcgcacgcgggacaucuacaucagccgccggcugcugggcaccuucaccuggacccucuccgacagcgagggcaaggacacgcccgggggcuacugccugacccgcuggaugcugaucgaggccgagcucaagugcuucgggaacaccgccguggccaagugcaacgagaagcacgacgaggaguucugcgacaugcugcggcuguucgacuucaacaagcaggccauccagcgccucaaggcggaggcccagauguccauccagcugaucaacaaggccgucaacgcccugaucaacgaccagcucaucaugaagaaccaccuccgggacaucaugugcauccccuacugcaacuacagcaaguacugguaccugaaccacaccacgaccggcaagaccucccugcccaagugcuggcuggugagcaacggguccuaccugaacgagacccacuucagcgacgacaucgagcagcaggccgacaacaugaucacggagaugcuccagaaggaguacauggagcgccagggcaagaccccgcugggccugguggaccuguucgucuucuccaccagcuucuaccucaucuccaucuuccugcaccuggugaagaucccgacccaccggcacguggucggcaagagcugccccaagccccaccgccucaaccacauggggaucugcuccugcgggcuguacggccagcccggggugccggugaaguggaagcgguga

SEQ ID NO: 34912 - RNA, 1476 nt, Artificial Sequence
  derived and/or modified CDS sequence (opt1) from MOPV/LASV reassortant(IGS-1;Clade IV)__AFY05576__GPCmut9
augggccagaucgugaccuucuuccaggaggucccccacgugaucgaggaggugaugaacaucguccugaucgcccucagcgugcuggccgugcugaaggggcucuacaacuucgcgaccugcggccuggucgggcuggugacguuccuccugcugugcggccgcuccugcaccaccagccucuacaaggggguguacgagcugcagacccuggagcucaacauggagacgcugaacaugaccaugccgcuguccugcaccaagaacaacagccaccacuacaucauggucggcaacgagaccggccucgagcugacgcugaccaacaccuccaucaucaaccacaaguucugcaaccucagcgacgcccacaagaagaaccuguacgaccacgcccugauguccaucaucagcaccuuccaccucuccauccccaacuucaaccaguacgaggccaugagcugcgacuucaacgggggcaagaucuccgugcaguacaaccugagccacuccuacgccggggacgcggccaaccacugcggcacgguggccaacgggguccugcagaccuucaugcggauggccuggggcggcagcuacaucgcgcucgacuccgggugcggcaacugggacugcaucaugaccagcuaccaguaccugaucauccagaacaccacgugggaggaccacugccaguucucccgccccagccccaucggguaccugggccuccugucccagcggacccgcgacaucuacaucagccggcgccugcucggcaccuucaccuggacgcugagcgacuccgagggggaggacaccccgggcggguacugccugacccgguggaugcucaucgaggccgagcugaagugcuucggcaacaccgccguggccaagugcaacgagaagcacgacgaggaguucugcgacaugcugcgccucuucgacuucaacaagcaggccauccagcggcugaaggcggaggcccagaugagcauccagcugaucaacaaggccgugaacgcccucaucaacgaccagcugaucaugaagaaccaccuccgcgacaucaugugcauccccuacugcaacuacuccaaguacugguaccugaaccacacgaccaccgggcggaccagccugcccaagugcuggcuggucuccaacggcagcuaccucaacgagacgcacuucuccgacgacaucgagcagcaggccgacaacaugaucaccgagaugcugcagaaggaguacauggagcgccagggcaagacgccccuggggcugguggaccucuucguguucagcaccuccuucuaccugaucagcaucuuccugcaccucgucaagaucccgacccaccggcacaucgugggcaaguccugccccaagccccaccgccugaaccacauggggaucugcagcugcggccuguacaagcagcccggggugccggucaaguggaagcgguga

SEQ ID NO: 34913 - RNA, 1476 nt, Artificial Sequence
  derived and/or modified CDS sequence (opt1) from LASV(LM765-SLE-2012;Clade IV)__AIT17814__GPCmut9
augggccagaucgugaccuucuuccaggaggucccccacgugaucgaggaggugaugaacaucguccugaucgcccucagcauccuggccgugcugaaggggcucuacaacuucgcgaccugcggccugguggggcuggucacguuccuccugcugugcggccgcuccugcaccaccagccucuacaaggggguguacgagcugcagacccuggagcucaacauggagacgcugaacaugaccaugccgcuguccugcaccaagaacaacagccaccacuacaucauggugggcaacgagaccggccucgagcugacgcugaccaacaccuccaucaucgaccacaaguucugcaaccucagcgacgcccaccggaagaaccuguacgaccacgcccugauguccaucaucagcaccuuccaccucuccauccccaacuucaaccaguacgaggccaugagcugcgacuucaacgggggcaagaucuccguccaguacaaccugagccacuccuacgccaaggacgcggccgaccacugcgggacgguggccaacggcgugcugcagaccuucaugcgcauggccuggggcgggagcuacaucgcgcucgacuccggcugcgggcggugggacugcaucaugaccagcuaccaguaccugaucauccagaacaccacgugggaggaccacugccaguucucccgccccagccccaucggcuaccuggggcuccugucccagcggacccgcgacaucuacaucagccggcgccugcucggcaccuucaccuggacgcugagcgacuccgagggcaaggacacccccgggggcuacugccugacccgguggaugcucaucgaggccgagcugaagugcuucgggaacaccgccgucgccaagugcaacgagaagcacgacgaggaguucugcgacaugcugcgccucuucgacuucaacaagcaggccauccagcggcugaaggcggaggcccagaugagcauccagcugaucaacaaggccgugaacgcccucaucaacgaccagcugaucaugaagaaccaccuccgcgacaucaugugcauccccuacugcaacuacuccaaguacugguaccugaaccacacgaccaccggcaagaccagccugcccaagugcuggcugguguccaacgggagcuaccucaacgagacgcacuucuccgacgacaucgagcagcaggccgacaacaugaucaccgagaugcugcagaaggaguacauggagcggcagggcaagaccccgcugggccuggucgaccucuucguguucagcaccuccuucuaccugaucagcaucuuccugcaccucgugaagaucccgacgcaccgccacaucgucgggaagcccugccccaagccccaccggcugaaccacaugggcaucugcuccugcgggcuguacaagcagccgggcgugcccgugaaguggaagcgcuga

SEQ ID NO: 34914 - RNA, 1476 nt, Artificial Sequence
  derived and/or modified CDS sequence (opt1) from LASV(LM776-SLE-2012;Clade IV)__AIT17824__GPCmut9
augggccagaucgugaccuucuuccaggaggucccccacgugaucgaggaggugaugaacaucguccugaucgcccucagcauccuggccgugcugaaggggcucuacaacuucgcgaccugcggccugguggggcuggucacguuccuccugcugugcggccgcuccugcaccaccagcguguacaaggggguguacgagcuccagacccuggagcugaacauggagacgcucaacaugaccaugccgcuguccugcaccaagaacaacagccaccacuacaucauggucggcaacgagaccggccuggagcucacgcugaccaacaccuccaucaucaaccacaaguucugcaaccugagcgacgcccacaagaagaaccucuacgaccacgcccugauguccaucaucagcaccuuccaccuguccauccccaacuucaaccaguacgaggccaugagcugcgacuucaacgggggcaagaucuccgugcaguacaaccucagccacuccuacgccggggacgcggccaaccacugcggcacgguggccaacgggguccugcagaccuucaugcggauggccuggggcggcagcuacaucgcgcuggacuccgggugcggcaagugggacugcaucaugaccagcuaccaguaccucaucauccagaacaccacgugggaggaccacugccaguucucccgccccagccccaucggguaccugggccugcucucccagcggacccgcgacaucuacaucagccggcgccugcugggcaccuucaccuggacgcucagcgacuccgaggggaaggacaccccgggcggguacugccugacccgguggaugcugaucgaggccgagcucaagugcuucggcaacaccgccguggccaagugcaacgagaagcacgacgaggaguucugcgacaugcugcgccuguucgacuucaacaagcaggccauccagcggcucaaggcggaggcccagaugagcauccagcugaucaacaaggccgugaacgcccugaucaacgaccagcucaucaugaagaaccaccuccgcgacaucaugugcauccccuacugcaacuacuccaaguacugguaccugaaccacacgaccaccgggaagaccagccugcccaagugcuggcuggucuccaacggcagcuaccugaacgagacgcacuucuccgacgacaucgagcagcaggccgacaacaugaucaccgagaugcuccagaaggaguacauggagcggcagggcaagacgccccuggggcugguggaccuguucguguucagcaccuccuucuaccucaucagcaucuuccugcaccuggucaagaucccgacccaccgccacaucgugggcaaguccugccccaagccccaccggcucaaccacauggggaucugcagcugcggccuguacaagcagcccggggugccgguccgcuggaagcgguga

SEQ ID NO: 34915 - RNA, 1476 nt, Artificial Sequence
  derived and/or modified CDS sequence (opt1) from LASV(Mad39;Clade IV)__ANH09722__GPCmut9
augggccagaucgugaccuucuuccaggaggucccccacgugaucgaggaggugaugaacaucguccugaucgcccucagcauccuggccgugcugaaggggcucuacaacguggcgaccugcggccugaucgggcuggucacguuccuccugcugugcggccgcuccugcaccaccacccucuacaaggggguguacgagcugcaggcccuggagcucaacauggagacgcugaacaugaccaugccgcugagcugcaccaagaacaacucccaccacuacauccgggugggcaacgagaccggccucgagcugacgcugaccaacaccagccucaucaaccacaaguucugcaaccuguccgacgcccacaagaagaaccuguacgaccacgcccucaugagcaucaucuccaccuuccaccugagcauccccaacuucaaccaguacgaggccauguccugcgacuucaacgacgggaagaucagcguccaguacaaccugucccacacguacgcgggcgacaccgccaaccacugcgggaccguggccaacggcgugcuccagaccuucaugcgcauggccuggggcgggagcuacaucgcgcuggacuccggcugcgggggcugggacugcaucaugacgagcuaccaguaccugaucauccagaacaccaccugggaggaccacugccaguucucccggcccagccccaucggguaccucggccugcugucccagcgcacccgggacaucuacaucagccgccggcuccugggcacguucaccuggacccuguccgacagcgaggggaaggacaccccgggcggguacugccucacgcgcuggaugcugaucgaggccgagcugaagugcuucggcaacaccgccgucgccaagugcaacgagaagcacgacgaggaguucugcgacaugcuccggcuguucgacuucaacaagcaggccauccagcgccugaaggcggaggcccagaugagcauccagcucaucaacaaggccgugaacgcccugaucaacgaccagcugaucaugaagaaccaccuccgggacaucaugugcauccccuacugcaacuacuccaaguacugguaccugaaccacaccgugaccgggaagacgagccugcccaagugcuggcucgucuccaacggcagcuaccugaacgagacccacuucuccgacgacaucgagcagcaggccgacaacaugaucaccgagaugcugcagaaggaguacauggagcgccagggcaagacgccccuggggcucguggaccuguucguguucagcaccuccuucuaccugaucagcaucuuccuccaccuggucaagaucccgacccaccggcacguggugggcaagcccugccccaagccccaccgccugaaccacauggggaucugcuccugcggcuucuacaagcagccggggguccccgugcgguggaagcgcuga

SEQ ID NO: 34916 - RNA, 1476 nt, Artificial Sequence
  derived and/or modified CDS sequence (opt1) from LASV(Z0947-SLE-2011;Clade IV)__AIT17840__GPCmut9
augggccagaucgugaccuucuuccaggaggucccccacgugaucgaggaggugaugaacaucguccugaucgcccucagcauccuggccgugcugaaggggcucuacaacuucgcgaccugcggccugguggggcuggucacguuccuccugcugugcggccgcuccugcaccaucagccucuacaaggggguguacgagcugcagacccuggagcucaacauggagacccugaacaugacgaugccgcuguccugcaccaagaacaacagccaccacuacaucauggugggcaacgagaccggccucgagcugacccugacgaacaccuccaucaucaaccacaaguucugcaaccucagcgacgcccacaagaagaaccuguacgaccacgcccugauguccaucaucagcaccuuccaccucuccauccccaacuucaaccaguacgaggccaugagcugcgacuucaacgggggcaagaucuccguccaguacaaccugagccacuccuacgccggggacgcggccaaccacugcggcaccguggccaacggggugcugcagacguucaugcggauggccuggggcggcagcuacaucgcgcucgacuccgggugcgaccgcugggacugcaucaugaccagcuaccaguaccugaucauccagaacaccaccugggaggaccacugccaguucucccggcccagccccaucggcuaccuggggcuccugucccagcgcacgcgggacaucuacaucagccgccggcugcucggcaccuucaccuggacccugagcgacuccgagggcaaggacacgcccgggggcuacugccugacccgcuggaugcucaucgaggccgagcugaagugcuucgggaacaccgccgucgccaagugcaacgagaagcacgacgaggaguucugcgacaugcugcggcuguucgacuucaacaagcaggccauccagcgccugaaggcggaggcccagaugagcauccagcugaucaacaaggccgugaacgcccucaucaacgaccagcugaucaugaagaaccaccuccgggacaucaugugcauccccuacugcaacuacuccaaguacugguaccucaaccacaccacgaccggcaagaccagccugcccaagugcuggcugguguccaacgggagcuaccucaacgagacccacuucuccgacgacaucgagcagcaggccgacaacaugaucacggagaugcugcagaaggaguacauggagcgccagggcaagaccccgcugggccuggucgaccucuucguguucagcaccuccuucuaccugaucagcaucuuccugcaccucgugaagaucccgacccaccggcacaucgucgggaagcccugccccaagccccaccgccugaaccacaugggcaucugcuccugcgggcuguacaagcagccgggcgugcccgugaaguggaagcgguga

SEQ ID NO: 34917 - RNA, 1476 nt, Artificial Sequence
  derived and/or modified CDS sequence (opt4) from LASV(Josiah;Clade IV)__NP_694870__GPCmut9
augggccagaucgugaccuucuuccaggaggugccccacgugaucgaggaggugaugaacaucgugcugaucgcccugagcgugcuggccgugcugaagggccuguacaacuucgccaccugcggccuggugggccuggugaccuuccugcugcugugcggcagaagcugcaccaccagccuguacaagggcguguacgagcugcagacccuggagcugaacauggagacccugaacaugaccaugccccugagcugcaccaagaacaacagccaccacuacaucauggugggcaacgagaccggccuggagcugacccugaccaacaccagcaucaucaaccacaaguucugcaaccugagcgacgcccacaagaagaaccuguacgaccacgcccugaugagcaucaucagcaccuuccaccugagcauccccaacuucaaccaguacgaggccaugagcugcgacuucaacggcggcaagaucagcgugcaguacaaccugagccacagcuacgccggcgacgccgccaaccacugcggcaccguggccaacggcgugcugcagaccuucaugagaauggccuggggcggcagcuacaucgcccuggacagcggcugcggcaacugggacugcaucaugaccagcuaccaguaccugaucauccagaacaccaccugggaggaccacugccaguucagcagacccagccccaucggcuaccugggccugcugagccagagaaccagagacaucuacaucagcagaagacugcugggcaccuucaccuggacccugagcgacagcgagggcaaggacacccccggcggcuacugccugaccagauggaugcugaucgaggccgagcugaagugcuucggcaacaccgccguggccaagugcaacgagaagcacgacgaggaguucugcgacaugcugagacuguucgacuucaacaagcaggccauccagagacugaaggccgaggcccagaugagcauccagcugaucaacaaggccgugaacgcccugaucaacgaccagcugaucaugaagaaccaccugagagacaucaugugcauccccuacugcaacuacagcaaguacugguaccugaaccacaccaccaccggcagaaccagccugcccaagugcuggcuggugagcaacggcagcuaccugaacgagacccacuucagcgacgacaucgagcagcaggccgacaacaugaucaccgagaugcugcagaaggaguacauggagagacagggcaagaccccccugggccugguggaccuguucguguucagcaccagcuucuaccugaucagcaucuuccugcaccuggugaagauccccacccacagacacaucgugggcaagagcugccccaagccccacagacugaaccacaugggcaucugcagcugcggccuguacaagcagcccggcgugcccgugaaguggaagagauga

SEQ ID NO: 34918 - RNA, 1473 nt, Artificial Sequence
  derived and/or modified CDS sequence (opt4) from LASV(LP;Clade I)__AAF86701__GPCmut9
augggccagaucaucaccuucuuccaggaggugccccacgugaucgaggaggugaugaacaucgugcugaucgcccugagccugcuggccauccugaagggccuguacaacaucgccaccugcggcaucaucggccugguggccuuccuguuccugugcggcaagagcugcagccugacccugaagggcggcuacgagcugcagacccuggagcugaacauggagacccugaacaugaccaugccccugagcugcaccaagaacagcagccaccacuacaucagagugggcaacgagaccggccuggagcugacccugaccaacaccagcaucaucaaccacaaguucugcaaccugagcgacgcccacaagaagaaccuguacgaccacgcccugaugagcaucaucagcaccuuccaccugagcauccccaacuucaaccaguacgaggccaugagcugcgacuucaacggcggcaagaucagcgugcaguacaaccugagccacagcuacgccggcgacgccgccgagcacugcggcaccguggccaacggcgugcugcagaccuucaugagaauggccuggggcggcagauacaucgcccuggacagcggcugcggcaacugggacugcaucaugaccagcuaccaguaccugaucauccagaacaccaccugggaggaccacugccaguucagcagacccagccccaucggcuaccugggccugcugagccagagaaccagagacaucuacaucagcagaagacugcugggcaccuucaccuggacccugagcgacagcgagggcaacgagacccccggcggcuacugccugaccagauggaugcugaucgaggccgagcugaagugcuucggcaacaccgccguggccaagugcaacgagaagcacgacgaggaguucugcgacaugcugagacuguucgacuucaacaagcaggccaucagaagacugaaggccgaggcccagaugagcauccagcugaucaacaaggccgugaacgcccugaucaacgaccagcugaucaugaagaaccaccugagagacaucaugugcauccccuacugcaacuacagcaaguacugguaccugaaccacaccagcagcggcagaaccagccugcccaagugcuggcugaucagcaacggcagcuaccugaacgagacccaguucagcgacgacaucgagcagcaggccgacaacaugaucaccgagaugcugcagaaggaguacaucgagagacagggcaagaccccccugggccugguggacaucuucaucuucagcaccagcuucuaccugaucagcaucuuccugcaccugaucaagauccccacccacagacacaucgugggcaagcccugccccaagccccacagacugaaccacaugggcgugugcagcugcggccuguacaagcaccccggcgugcccaccaaguggaagagauga

SEQ ID NO: 34919 - RNA, 1473 nt, Artificial Sequence
  derived and/or modified CDS sequence (opt4) from LASV(803213;Clade II)__AAF86703__GPCmut9
augggccagaucaucaccuucuuccaggaggugccccacgugaucgaggaggugaugaacaucgugcugaucgcccugagccugcuggccauccugaagggcaucuacaacguggccaccugcggccuguucggccugaucagcuuccugcugcugugcggcagaagcugcagcgugaccuacaagggcguguacgagcugcagacccuggagcugaacauggccaaccugaacaugaccaugccccugagcugcaccaagaacaacagccaccacuacaucauggugggcaacgagaccggccuggagcugacccugaccaacaccagcaucaucaaccacaaguucugcaaccugagcgacgcccacaagaagaaccuguacgaccacgcccugaugagcaucaucagcaccuuccaccugagcauccccaacuucaaccaguacgaggccaugagcugcgacuucaacggcggcaagaucagcgugcaguacaaccugagccacagcuucgccguggacgccgccaaccacugcggcaccaucgccaacggcgugcugcagaccuucaugagaauggccuggggcggcagcuacaucgcccuggacagcggcugcggcaacugggacugcaucaugaccagcuaccaguaccugaucauccagaacaccaccugggaggaccacugccaguucagcagacccagccccaucggcuaccugggccugcugagccagagaaccagagacaucuacaucagcagaagacugcugggcaccuucaccuggacccugagcgacagcgagggcaacgaggcccccggcggcuacugccugaccagauggaugcugaucgaggccgagcugaagugcuucggcaacaccgccguggccaagugcaacgagaagcacgacgaggaguucugcgacaugcugagacuguucgacuucaacaagcaggccaucaagagacugaagaccgaggcccagaugagcauccagcugaucaacaaggccgugaacgcccugaucaacgaccagcugaucaugaagaaccaccugagagacaucaugugcauccccuacugcaacuacagcagauacugguaccugaaccacaccgugaccggcaagaccagccugcccagaugcuggcuggugagcaacggcagcuaccugaacgagacccacuucagcgacgacaucgagcagcaggccgacaacaugaucaccgagaugcugcagaaggaguacauggacagacagggcaagaccccccugggccugguggaccuguucguguucagcaccagcuucuaccugaucagcaucuuccugcaccuggugaagauccccacccacagacacaucgugggcaagcccugccccaagccccacagacugaaccacaugggcaucugcagcugcggccuguacaagcaccccggcgugcccgugaaguggaagagauga

SEQ ID NO: 34920 - RNA, 1473 nt, Artificial Sequence
  derived and/or modified CDS sequence (opt4) from LASV(GA391;Clade III)__CAA36645__GPCmut9
augggccagaucgugaccuucuuccaggaggugccccacgugaucgaggaggugaugaacaucgugcugaucgcccugagcauccuggccauccugaagggccuguacaacguggccaccugcggccugaucggccuggugaccuuccugcugcugagcggcagaagcugcagccugaucuacaagggcaccuacgagcugcagacccuggagcugaacauggagacccugaacaugaccaugccccugagcugcaccaagaacaacagccaccacuacaucagagugggcaacgagaccggccuggagcugacccugaccaacaccagcauccugaaccacaaguucugcaaccugagcgacgcccacaagagaaaccuguacgaccacagccugaugagcaucaucagcaccuuccaccugagcauccccaacuucaaccaguacgaggccaugagcugcgacuucaacggcggcaagaucaccgugcaguacaaccugagccacagcuucgccguggacgccgccggccacugcggcacccuggccaacggcgugcugcagaccuucaugagaauggccuggggcggcagcuacaucgcccuggacagcggcugcggcaacugggacugcaucaugaccagcuaccaguaccugaucauccagaacaccaccugggacgaccacugccaguucagcagacccagccccaucggcuaccugggccugcugagccagagaaccagagacaucuacaucagcagaagacugcugggcaccuucaccuggacccugagcgacagcgagggcaacgagacccccggcggcuacugccugaccagauggaugcugaucgaggccgagcugaagugcuucggcaacaccgccguggccaagugcaacgagaagcacgacgaggaguucugcgacaugcugagacuguucgacuucaacaagcaggccaucagaagacugaagaccgaggcccagaugagcauccagcugaucaacaaggccgugaacgcccugaucaacgaccagcugaucaugaagaaccaccugagagacaucaugugcauccccuacugcaacuacagcagauacugguaccugaaccacaccagcaccggcaagaccagccugcccagaugcuggcugaucagcaacggcagcuaccugaacgagaccaaguucagcgacgacaucgagcagcaggccgacaacaugaucaccgagaugcugcagaaggaguacaucgacagacagggcaagaccccccugggccugguggaccuguucguguucagcaccagcuucuaccugaucagcaucuuccugcaccuggugaagauccccacccacagacacaucgugggcaagcccugccccaagccccacagacugaaccacaugggcaucugcagcugcggccuguacaagcagcccggcgugcccgugagauggaagagauga

SEQ ID NO: 34921 - RNA, 1476 nt, Artificial Sequence
  derived and/or modified CDS sequence (opt4) from LASV(AV;Clade V)__CCA30314__GPCmut9
augggccagaucgugaccuucuuccaggaggugccccacgugaucgaggaggugaugaacaucgugcugaucgcccugagcauccuggccgugcugaagggccuguacaacaucgccaccugcggccugaucggccugaucaccuuccugcugcugugcggcagaagcugcagcagcaaccuguacaagggcguguacgagcugcagagccuggaccugaacauggagacccugaacaugaccaugccccugagcugcaccaagaacaacagccaccacuacaucagagugggcaacgacaccggccuggagcugacccugaccaacaccagcauccugaaccacaaguucugcaaccugagcgacgcccacaagaaggaccuguacgaccacgcccugaugagcaucaucagcaccuuccaccugagcauccccaacuucaaccaguacgaggccaugagcugcgacuucaacggcggcaagaucagcgugcaguacaaccugagccacagcuacgccaucgacgccgccaaccacugcggcaccguggccaacggcauccugcagaccuucaugagaauggccuggggcggcagcuacaucgcccuggacagcggcugcggcaacugggacugcaucaugaccagcuaccaguaccugaucauccagaacaccaccugggagaaccacugccaguucagcagacccagccccaucggcuaccugggccugcugagccagagaaccagagacaucuacaucagcagaagacugcugggcaccuucaccuggacccugagcgacagcgagggcaacgccacccccggcggcuacugccugaccagauggaugcugaucgaggccgagcugaagugcuucggcaacaccgccguggccaagugcaacgagaagcacgacgaggaguucugcgacaugcugagacuguucgacuucaacaagcaggccaucagcagacugaagagcgaggcccagaugagcauccagcugaucaacaaggccgugaacgcccugaucaacgaccagcugaucaugaagaaccaccugagagacaucaugugcauccccuacugcaacuacagcaaguacugguaccugaaccacaccaucaccggcaagaccagccugcccaagugcuggcuggugagcaacggcagcuaccugaacgagacccacuucagcgacgacaucgagcagcaggccgacaacaugaucaccgagaugcugcagaaggaguacauggagagacagggcaagaccccccugggccugguggaccuguucguguucagcaccagcuucuaccugaucagcaucuuccugagacuggugaagauccccacccacagacacaucgugggcaagcccugccccaagccccacagacugaaccacaugggcaucugcagcugcggccuguacaagcagcccggcgugcccgugagauggaagagauga

SEQ ID NO: 34922 - RNA, 1473 nt, Artificial Sequence
  derived and/or modified CDS sequence (opt4) from LASV(Togo/2016/7082;Clade VI)__AMR44577__GPCmut9
augggccagaucaucaccuucuuccaggaggugccccacgugaucgaggaggugaugaacaucgugcugaucgcccugagccugcuggccauccugaagggcguguacaacguggccaccugcggcaucaucggccuggugaccuuccuguuccugugcggcagaagcugcagccugaucuacaagggcagcuacgagcugcagacccuggagcugaacauggagacccugaacaugaccaugccccugagcugcaccaagaacagcagccaccacuacaucagagugggcaacgagaccggccuggagcugacccugaccaacaccagcaucaucaaccacaaguucugcaaccugagcgacgcccacaagagaaaccuguacgaccacgcccugaugagcauccugagcaccuuccaccugagcauccccaacuucaaccaguacgaggccaugagcugcgacuucaacggcggcaagaucagcgugcaguacaaccugagccacgccuacgccguggacgccgccgagcacugcggcaccguggccaacggcgugcugcagaccuucaugagaauggccuggggcggcagcuacaucgcccuggacagcggcugcggcaacugggacugcaucaugaccagcuaccaguaccugaucauccagaacaccaccugggaggaccacugccaguucagcagacccagccccaucggcuaccugggccugcugagccagagaaccagagacaucuacaucagcagaagacugcugggcaccuucaccuggacccugagcgacagcgagggcaacgagacccccggcggcuacugccugaccagauggaugcugaucgaggccgagcugaagugcuucggcaacaccgccguggccaagugcaacgagaagcacgacgaggaguucugcgacaugcugagacuguucgacuucaacaagcaggccauccagagacugaagagcgaggcccagaugagcauccagcugaucaacaaggccgugaacgcccugaucaacgaccagcugaucaugaagaaccaccugagagacaugaugugcauccccuacugcaacuacagcaaguacugguaccugaaccacaccagcagcggcagaaccagccugcccaagugcuggcuggugagcaacggcagcuaccugaacgagacccacuucagcgacgacaucgagcagcaggccgacaacaugaucaccgagaugcugcagaaggaguacaucgacagacagggcaagaccccccugggccugguggaccuguucguguucagcaccagcuucuaccugaucagcaucuuccugcaccugaucaagauccccacccacagacacaucgugggcaagcccugccccaagccccacagacugaaccacaugggcaucugcagcugcggccuguacaagcagcccggcgugcccaccagauggaagagauga

SEQ ID NO: 34923 - RNA, 1473 nt, Artificial Sequence
  derived and/or modified CDS sequence (opt4) from LASV(KAK-428;Clade n.d. (VII))__ANH09740__GPCmut9
augggccagaucgugaccuucuuccaggaggugccccacgugaucgaggaggugaugaacaucgugcugaucgcccugagccugcuggccauccugaagggccuguacaacuucgccaccugcggcgugaucggccugaucaccuuccugcugcugugcggcagaagcugcagcgccaccuacaagggccaguacgagcugcagacccuggagcugaacauggagagccugaacaugaccaugccccugagcugcaccaagaacaacagccaccacuacaucagagccggcaacaacaccggccuggagcugacccugaccaacaccagcaucaucagccacaaguucugcaaccugagcgacgcccacaagaagaaccuguacgaccacacccugaugagcaucaucaccaccuuccaccugagcauccccaacuucaaccaguacgaggccaugagcugcgacuucaacggcggcaagaucagcauccaguacaaccugagccacagcuacgccggcgacgccgcccagcacugcggcaccguggccaacggcgugcugcagaccuucaugagaauggccuggggcggcagcuaccuggcccuggacagcggcugcagaggcugggacugcaucaucagcagcuaccaguaccugaucauccagaacaccaccugggacgaccacugccaguucagcagacccagccccaucggcuaccugggcuucgugagccagaagaccagagacaucuacaucagcagaagacugcugggcaccuucaccuggacccugagcgacagcgagggccacgacaugcccggcggcuacugccugaccagauggaugcugaucgaggccgaccugaagugcuucggcaacaccgccguggccaagugcaacgagaagcacgacgaggaguucugcgacauguggagacuguucgacuucaacaagcaggccauccagagacugaaggccgaggcccagaugaacauccagcugaucaacaaggccgugaacgcccugaucaacgaccagcugaugaugaagaaccaccugagagacaucaugugcauccccuacugcaacuacagcaaguucugguaccugaacaacaccaccaccggcagaaccagccugcccagaugcuggcugaucagcaacggcagcuaccugaacgagacccacuucagcgacgacaucgagcagcaggccgacaacaugaucaccgagaugcugcagaaggaguacauggacagacagggcaagaccccccugggccugguggaccuguucguguucagcaccagcuucuaccugaucaccaucuuccugcaccuggugaagauccccacccacagacacaucgugggcaagcccugccccaagccccacagacugaaccacaugggcaucugcagcugcggccuguacaagcagcccggcgugcccgugagauggaagagauga

SEQ ID NO: 34924 - RNA, 1473 nt, Artificial Sequence; identical to SEQ ID NO: 34918
  derived and/or modified CDS sequence (opt4) from LASV(Pinneo-NIG-1969;Clade I)__AIT17836__GPCmut9

SEQ ID NO: 34925 - RNA, 1473 nt, Artificial Sequence
  derived and/or modified CDS sequence (opt4) from LASV(ISTH0009-NIG-2011;Clade II)__AIT17404__GPCmut9
augggccagaucaucaccuucuuccaggaggugccccacgugaucgaggaggugaugaacaucgugcugaucgcccugagccugcuggccauccugaagggcaucuacaacguggccaccugcggccuguucggccuggugagcuuccugcugcugugcggcagaagcugcagcaccaccuacaagggcguguacgagcugcagacccuggagcuggacauggccagccugaacaugaccaugccccugagcugcaccaagaacaacagccaccacuacaucauggugggcaacgagaccggccuggagcugacccugaccaacaccagcaucaucaaccacaaguucugcaaccugagcgacgcccacaagaagaaccuguacgaccacgcccugaugagcaucaucagcaccuuccaccugagcauccccaacuucaaccaguacgaggccaugagcugcgacuucaacggcggcaagaucagcgugcaguacaaccugagccacgccuacgccguggacgccgccaaccacugcggcaccaucgccaacggcgugcugcagaccuucaugagaauggccuggggcggcagcuacaucgcccuggacagcggcugcggcagcugggacugcaucaugaccagcuaccaguaccugaucauccagaacaccaccugggaggaccacugccaguucagcagacccagccccaucggcuaccugggccugcugagccagagaaccagagacaucuacaucagcagaagacugcugggcaccuucaccuggacccugagcgacagcgagggcaacgagacccccggcggcuacugccugaccagauggaugcugaucgaggccgagcugaagugcuucggcaacaccgccguggccaagugcaacgagaagcacgacgaggaguucugcgacaugcugagacuguucgacuucaacaagcaggccaucagaagacugaagaccgaggcccagaugagcauccagcugaucaacaaggccgugaacgcccugaucaacgaccagcugaucaugaagaaccaccugagagacaucaugugcauccccuacugcaacuacagcaaguacugguaccugaaccacaccgugaccggcaagaccagccugcccagaugcuggcuggugagcaacggcagcuaccugaacgagacccacuucagcgacgacaucgagcagcaggccgacaacaugaucaccgagcugcugcagaaggaguacauggacagacagggcaagaccccccugggccugguggaccuguucguguucagcaccagcuucuaccugaucagcaucuuccugcaccugaucaagauccccacccacagacacaucaccggcaagcccugccccaagccccacagacugaaccacaugggcaucugcagcugcggccuguacaagcaccccggcgugcccgugaaguggaagagauga

SEQ ID NO: 34926 - RNA, 1473 nt, Artificial Sequence
  derived and/or modified CDS sequence (opt4) from LASV(ISTH2010-NIG-2012;Clade II)__AIT17482__GPCmut9
augggccagaucaucaccuucuuccaggaggugccccacgugaucgaggaggugaugaacaucgugcugaucgcccugagccugcuggccauccugaagggcaucuacaacguggccaccugcggccuguucggccuggugagcuuccugcugcugugcggcagaagcugcagcaccaccuacaagggcguguacgagcugcagacccuggagcuggacauggccagccugaacaugaccaugccccugagcugcaccaagaacaacagccaccacuacaucauggugggcaacgagaccggccuggagcugacccugaccaacaccagcaucaucaaccacaaguucugcaaccugagcgacgcccacaagaagaaccuguacgaccacgcccugaugagcaucaucagcaccuuccaccugagcauccccaacuucaaccaguacgaggccaugagcugcgacuucaacggcggcaagaucagcgugcaguacaaccugagccacgccuacgccguggacgccgccaaccacugcggcaccaucgccaacggcgugcugcagaccuucaugagaauggccuggggcggcagcuacaucgcccuggacagcggcugcggcagcugggacugcaucaugaccagcuaccaguaccugaucauccagaacaucaccugggaggaccacugccaguucagcagacccagccccaucggcuaccugggccugcugagccagagaaccagagacaucuacaucagcagaagacugcugggcaccuucaccuggacccugagcgacagcgagggcaacgagacccccggcggcuacugccugaccagauggaugcugaucgaggccgagcugaagugcuucggcaacaccgccguggccaagugcaacgagaagcacgacgaggaguucugcgacaugcugagacuguucgacuucaacaagcaggccaucagaagacugaagaccgaggcccagaugagcauccagcugaucaacaaggccgugaacgcccugaucaacgaccagcugaucaugaagaaccaccugagagacaucaugugcauccccuacugcaacuacagcaaguacugguaccugaaccacaccgugaccggcaagaccagccugcccagaugcuggcuggugagcaacggcagcuaccugaacgagacccacuucagcgacgacaucgagcagcaggccgacaacaugaucaccgagcugcugcagaaggaguacaucgacagacagggcaagaccccccugggccugguggaccuguucguguucagcaccagcuucuaccugaucagcaucuuccugcaccuggugaagauccccacccacagacacguggugggcaagcccugccccaagccccacagacugaaccacaugggcaucugcagcugcggccuguacaagcaccccggcgugcccgugaaguggaagagauga

SEQ ID NO: 34927 - RNA, 1473 nt, Artificial Sequence
  derived and/or modified CDS sequence (opt4) from LASV(Lassa virus/H.sapiens-wt/NGA/2015/ISTH_0543;Clade II)__AVO03639__GPCmut9
augggccagaucaucaccuucuuccaggaggugccccacgugaucgaggaggugaugaacaucgugcugaucgcccugagccugcuggccauccugaagggcaucuacaacguggccaccugcggccuguucggccuggugagcuuccugcugcugugcggcagaagcugcagcaccaccuacaagggcguguacgagcugcagacccuggagcuggacauggccaaccugaacaugaccaugccccugagcugcaccaagaacaacagccaccacuacaucauggugggcaacgagaccggccuggagcugacccugaccaacaccagcaucaucaaccacaaguucugcaaccugagcgacgcccacaagaagaaccuguacgaccacgcccugaugagcaucaucagcaccuuccaccugagcauccccaacuucaaccaguacgaggccaugagcugcgacuucaacggcggcaagaucagcgugcaguacaaccugagccacaccuacgccguggacgccgccaaccacugcggcaccaucgccaacggcgugcugcagaccuucaugagaauggccuggggcggcagcuacaucgcccuggacagcggcugcggcagcugggacugcaucaugaccagcuaccaguaccuggugauccagaacaccaccugggaggaccacugccaguucagcagacccagccccaucggcuaccugggccugcugagccagagaaccagagacaucuacaucagcagaagacugcugggcaccuucaccuggacccugagcgacagcgagggcaacgagacccccggcggcuacugccugaccagauggaugcugaucgaggccgagcugaagugcuucggcaacaccgccguggccaagugcaacgagaagcacgacgaggaguucugcgacaugcugagacuguucgacuucaacaagcaggccaucagaagacugaagaccgaggcccagaugagcauccagcugaucaacaaggccgugaacgcccugaucaacgaccagcugaucaugaagaaccaccugagagacaucaugugcauccccuacugcaacuacagcaaguacugguaccugaaccacaccgugaccggcaagaccagccugcccagaugcuggcuggugagcaacggcagcuaccugaacgagacccacuucagcgacgacaucgagcagcaggccgacaacaugaucaccgagcugcugcagaaggaguacaucgacagacagggcaagaccccccugggccugguggaccuguucguguucagcaccagcuucuaccugaucagcaucuuccugcaccuggugaagauccccacccacagacacaucaccggcaagcccugccccaagccccacagacugaaccacaugggcaucugcagcugcggccuguacaagcaccccggcgugcccgugaaguggaagagauga

SEQ ID NO: 34928 - RNA, 1473 nt, Artificial Sequence
  derived and/or modified CDS sequence (opt4) from LASV(Lassa virus/H.sapiens-wt/NGA/2016/ISTH_0009;Clade II)__AVO03571__GPCmut9
augggccagaucaucaccuucuuccaggaggugccccacgugaucgaggaggugaugaacaucgugcugaucgcccugagccugcuggccauccugaagggcaucuacaacguggccaccugcggccugcugggccuggugagcuuccugcugcugugcggcagaagcugcagcaccaccuacaagggcguguacgagcugcagacccuggagcuggacauggccagccugaacaugaccaugccccugagcugcaccaagaacaacagccaccacuacaucauggugggcaacgagaccggccuggagcugacccugaccaacaccagcaucaucaaccacaaguucugcaaccugagcgacgcccacaagaagaaccuguacgaccacgcccugaugagcaucaucagcaccuuccaccugagcauccccaacuucaaccaguacgaggccaugagcugcgacuucaacggcggcagaaucagcgugcaguacaaccugagccacagcuacgccguggacgccgccaaccacugcggcaccaucgccaacggcgugcugcagaccuucaugagaauggccuggggcggcagcuacaucgcccuggacagcggcugcggcagcugggacugcaucaugaccagcuaccaguaccugaucauccagaacaccaccugggaggaccacugccaguucagcagacccagccccaucggcuaccugggccugcugagccagagaaccagagacaucuacaucagcagaagacugcugggcaccuucaccuggacccugagcgacagcgagggcaacgagacccccggcggcuacugccugaccagauggaugcugaucgaggccgagcugaagugcuucggcaacaccgccguggccaagugcaacgagaagcacgacgaggaguucugcgacaugcugagacuguucgacuucaacaagcaggccaucagaagacugaagaccgaggcccagaugagcauccagcugaucaacaaggccgugaacgcccugaucaacgaccagcugaucaugaagaaccaccugagagacaucaugugcauccccuacugcaacuacagcaaguacugguaccugaaccacaccgugaccggcaagaccagccugcccagaugcuggcuggugagcaacggcagcuaccugaacgagacccacuucagcgacgacaucgagcagcaggccgacaacaugaucaccgagcugcugcagaaggaguacaucgacagacagggcaagaccccccugggccugguggaccuguucguguucagcaccagcuucuaccugaucagcaucuuccugcaccuggugaagauccccacccacagacacaucaccggcaagcccugccccaagccccacagacugaaccacaugggcaucugcagcugcggccuguacaaccaccccggcgugcccgugaaguggaagagauga

SEQ ID NO: 34929 - RNA, 1473 nt, Artificial Sequence
  derived and/or modified CDS sequence (opt4) from LASV(Lassa virus/H.sapiens-wt/NGA/2016/ISTH_0017;Clade II)__AVO03567__GPCmut9
augggccagaucaucaccuucuuccaggaggugccccacgugaucgaggaggugaugaacaucgugcugaucgcccugagccugcuggccauccugaagggcaucuacaacguggccaccugcggccuguucggccuggugagcuuccugcugcugugcggcagaagcugcagcaccaccuacaagggcguguacgagcugcagacccuggagcuggacauggccagccugaacaugaccaugccccugagcugcaccaagaacaacagccaccacuacaucauggugggcaacgagaccggccuggagcugacccugaccaacaccagcaucaucaaccacaaguucugcaaccugagcgacgcccacaagaagaaccuguacgaccacgcccugaugagcaucaucagcaccuuccaccugagcauccccaacuucaaccaguacgaggccaugagcugcgacuucaacggcggcaagaucagcgugcaguacaaccugagccacaccuacgccaucgacgccgccaaccacugcggcaccaucgccaacggcgugcugcagaccuucaugagaauggccuggggcggcagcuacaucgcccuggacagcggcugcggcagcugggacugcaucaugaccagcuaccaguaccugaucauccagaacaccaccugggaggaccacugccaguucagcagacccagccccaucggcuaccugggccugcugagccagagaaccagagacaucuacaucagcagaagacugcugggcaccuucaccuggacccugagcgacagcgagggcaacgagacccccggcggcuacugccugaccagauggaugcugaucgaggccgagcugaagugcuucggcaacaccgccguggccaagugcaacgagaagcacgacgaggaguucugcgacaugcugagacuguucgacuucaacaagcaggccaucagaagacugaagaccgaggcccagaugagcauccagcugaucaacaaggccgugaacgcccugaucaacgaccagcugaucaugaagaaccaccugagagacaucaugugcauccccuacugcaacuacagcaaguacugguaccugaaccacaccgugaccggcaagaccagccugcccagaugcuggcuggugagcaacggcagcuaccugaacgagacccacuucagcgacgacaucgagcagcaggccgacaacaugaucaccgagcugcugcagaaggaguacauggacagacagggcaagaccccccugggccugguggaccuguucguguucagcaccagcuucuaccugaucagcaucuuccugcaccuggugagaauccccacccacagacacgugaucggcaagcccugccccaagccccacagacugaaccacaugggcaucugcagcugcggccuguacaagcaccccggcgugcccgugaaguggaagagauga

SEQ ID NO: 34930 - RNA, 1473 nt, Artificial Sequence
  derived and/or modified CDS sequence (opt4) from LASV(Lassa virus/H.sapiens-wt/NGA/2018/ISTH_0959;Clade II)__AVV65099__GPCmut9
augggccagaucaucaccuucuuccaggaggugccccacgugaucgaggaggugaugaacaucgugcugaucgcccugagccugcuggccauccugaagggcaucuacaacguggugaccugcggccuguucggccuggugagcuuccugcugcugugcggcagaagcugcagcaccaccuacaagggcguguacgagcugcagacccuggagcuggacauggccagccugaacaugaccaugccccugagcugcaccaagaacaacagccaccacuacaucauggugggcaacgagaccggccuggagcugacccugaccaacaccagcaucaucaaccacaaguucugcaaccugagcgacgcccacaagaagaaccuguacgaccacgcccugaugagcaucaucagcaccuuccaccugagcauccccaacuucaaccaguacgaggccaugagcugcgacuucaacggcggcaagaucagcgugcaguacaaccugagccacgccuacgccaucgacgccgccaaccacugcggcaccaucgccaacggcgugcugcagaccuucaugagaauggccuggggcggcagcuacaucgcccuggacagcggcugcggcagcugggacugcaucaugaccagcuaccaguaccugaucauccagaacaccaccugggaggaccacugccaguucagcagacccagccccaucggcuaccugggccugcugagccagagaaccagagacaucuacaucagcagaagacugcugggcaccuucaccuggacccugagcgacagcgagggcaacgagacccccggcggcuacugccugaccagauggaugcugaucgaggccgagcugaagugcuucggcaacaccgccguggccaagugcaacgagaagcacgacgaggaguucugcgacaugcugagacuguucgacuucaacaagcaggccaucagaagacugaagaccgaggcccagaugagcauccagcugaucaacaaggccgugaacgcccugaucaacgaccagcugaucaugaagaaccaccugagagacaucaugugcauccccuacugcaacuacagcaaguacugguaccugaaccacaccgugaccggcaagaccagccugcccagaugcuggcuggugagcaacggcagcuaccugaacgagacccacuucagcgacgacaucgagcagcaggccgacaacaugaucaccgagcugcugcagaaggaguacaucgacagacagggcaagaccccccugggccugguggaccuguucguguucagcaccagcuucuaccugaucagcaucuuccugcaccuggugaagauccccacccacagacacgugaucggcaagcccugccccaagccccacagacugaaccacaugggcaucugcagcugcggccuguacaagcaccccggcgugcccgugaaguggaagagauga

SEQ ID NO: 34931 - RNA, 1473 nt, Artificial Sequence
  derived and/or modified CDS sequence (opt4) from LASV(LASV003-NIG-2008;Clade II)__AIT17580__GPCmut9
augggccagaucaucaccuucuuccaggaggugccccacgugaucgaggaggugaugaacaucgugcugaucgcccugagccugcuggccauccugaagggcaucuacaacguggccaccugcggccuguucggccuggugagcuuccugcugcugugcggcagaagcugcagcaccaccuacaagggcguguacgagcugcagacccuggagcuggacauggccagccugaacaugaccaugccccugagcugcaccaagaacaacagccaccacuacaucauggugggcaacgagaccggccuggagcugacccugaccaacaccagcaucaucaaccacaaguucugcaaccugagcgacgcccacaagaagaaccuguacgaccacgcccugaugagcaucaucagcaccuuccaccugagcauccccaacuucaaccaguacgaggccaugagcugcgacuucaacggcggcaagaucagcgugcaguacaaccugagccacaccuacgccguggacgccgccaaccacugcggcaccaucgccaacggcgugcugcagaccuucaugagaauggccuggggcggcagcuacaucgcccuggacagcggcugcggcagcugggacugcaucaugaccagcuaccaguaccugaucauccagaacaccaccugggaggaccacugccaguucagcagacccagccccaucggcuaccugggccugcugagccagagaaccagagacaucuacaucagcagaagacugcugggcaccuucaccuggacccugagcgacagcgagagcaacgagacccccggcggcuacugccugaccagauggaugcugaucgaggccgagcugaagugcuucggcaacaccgccguggccaagugcaacgagaagcacgacgaggaguucugcgacaugcugagacuguucgacuucaacaagcaggccaucagaagacugaaggccgaggcccagaugagcauccagcugaucaacaaggccgugaacgcccugaucaacgaccagcugaucaugaagaaccaccugagagacaucaugugcauccccuacugcaacuacagcaaguacugguaccugaaccacaccgugaccggcagaaccagccugcccagaugcuggcuggugagcaacggcagcuaccugaacgagacccacuucagcgacgacaucgagcagcaggccgacaacaugaucaccgagcugcugcagaaggaguacauggacagacagggcaagaccccccugggccugguggaccuguucguguucagcaccagcuucuaccugaucagcaucuuccugcaccuggugaagauccccacccacagacacgugaucggcaagcccugccccaagccccacagacugaaccacaugggcaucugcagcugcggccuguacaagcaccccggcgugcccgugaaguggaagagauga

SEQ ID NO: 34932 - RNA, 1473 nt, Artificial Sequence
  derived and/or modified CDS sequence (opt4) from LASV(LASV035-NIG-2009;Clade II)__AIT17588__GPCmut9
augggccagaucaucaccuucuuccaggaggugccccacgugaucgaggaggugaugaacaucgugcugaucgcccugagccugcuggccauccugaagggcaucuacaacguggccaccugcggccuguucggccuggugagcuuccugcugcugugcggcagaagcugcagcaccaccuacaagggcguguacgagcugcagacccuggagcuggacauggccagccugaacaugaccaugccccugagcugcaccaagaacaacagccaccacuacaucauggugggcaacgagaccggccuggagcugacccugaccaacaccagcaucaucaaccacaaguucugcaaccugagcgacgcccacaagaagaaccuguacgaccacgcccugaugagcaucaucagcaccuuccaccugagcauccccaacuucaaccaguacgaggccaugagcugcgacuucaacggcggcaagaucagcgugcaguacaaccugagccacgccuacgccguggacgccgccaaccacugcggcaccaucgccaacggcgugcugcagaccuucaugagaauggccuggggcggcagcuacaucgcccuggacagcggcugcggcagcugggacugcaucaugaccagcuaccaguaccugaucauccagaacaccaccugggaggaccacugccaguucagcagacccagccccaucggcuaccugggccugcugagccagagaaccagagacaucuacaucagcagaagacugcugggcaccuucaccuggacccugagcgacagcgagggcaacgagacccccggcggcuacugccugaccagauggaugcugaucgaggccgagcugaagugcuucggcaacaccgccguggccaagugcaacgagaagcacgacgaggaguucugcgacaugcugagacuguucgacuucaacaagcaggccaucagaagacugaaggccgaggcccagaugagcauccagcugaucaacaaggccgugaacgcccugaucaacgaccagcugaucaugaagaaccaccugagagacaucaugugcauccccuacugcaacuacagcaaguacugguaccugaaccacaccgugaccggcaagaccagccugcccagaugcuggcuggugagcaacggcagcuaccugaacgagacccacuucagcgacgacaucgagcagcaggccgacaacaugaucaccgagcugcugcagaaggaguacaucgacagacagggcaagaccccccugggccugguggaccuguucguguucagcaccagcuucuaccugaucagcaucuuccugcaccuggugaagauccccacccacagacacgugaucggcaagcccugccccaagccccacagacugaaccacaugggcaucugcagcugcggccuguacaagcaccccggcgugcccgugaaguggaagagauga

SEQ ID NO: 34933 - RNA, 1473 nt, Artificial Sequence
  derived and/or modified CDS sequence (opt4) from LASV(LASV1000-NIG-2009;Clade II)__AIT17782__GPCmut9
augggccagaucaucaccuucuuccaggaggugccccacgugaucgaggaggugaugaacaucgugcugaucgcccugagccugcuggccauccugaagggcaucuacaacguggccaccugcggccuguucggccuggugagcuuccugcugcugugcggcagaagcugcagcaccaccuacaagggcguguacgagcugcagacccuggagcuggacauggccagccugaacaugaccaugccccugagcugcaccaagaacaacagccaccacuacaucauggugggcaacgagaccggccuggagcugacccugaccaacaccagcaucaucaaccacaaguucugcaaccugagcgacgcccacaagaagaaccuguacgaccacgcccugaugagcaucaucagcaccuuccaccugagcauccccaacuucaaccaguacgaggccaugagcugcgacuucaacggcggcaagaucagcgugcaguacaaccugagccacaccuacgccguggacgccgccaaccacugcggcaccaucgccaacggcgugcugcagaccuucaugagaauggccuggggcggcagcuacaucgcccuggacagcggcugcggcagcugggacugcaucaugaccagcuaccaguaccugaucauccagaacaccaccugggaggaccacugccaguucagcagacccagccccaucggcuaccugggccugcugagccagagaaccagagacaucuacaucagcagaagacugcugggcaccuucaccuggacccugagcgacagcgagggcaacgagacccccggcggcuacugccugaccagauggaugcugaucgaggccgagcugaagugcuucggcaacaccgccguggccaagugcaacgagaagcacgacgaggaguucugcgacaugcugagacuguucgacuucaacaagcaggccaucaagagacugaagaccgaggcccagaugagcauccagcugaucaacaaggccgugaacgcccugaucaacgaccagcugaucaugaagaaccaccugagagacaucaugugcauccccuacugcaacuacagcaaguacugguaccugaaccacaccgugaccggcaagaccagccugcccagaugcuggcuggugagcaacggcagcuaccugaacgagacccacuucagcgacgacaucgagcagcaggccgacaacaugaucaccgagcugcugcagaaggaguacaucgacagacagggcaagaccccccugggccugguggaccuguucguguucagcaccagcuucuaccugaucagcaucuuccugcaccuggugaagauccccacccacagacacguggugggcaagcccugccccaagccccacagacugaaccacaugggcaucugcagcugcggccuguacaagcaccccggcgugcccgugaaguggaagagauga

SEQ ID NO: 34934 - RNA, 1473 nt, Artificial Sequence
  derived and/or modified CDS sequence (opt4) from LASV(LASV221-NIG-2010;Clade II)__AIT17624__GPCmut9
augggccagaucaucaccuucuuccaggaggugccccacgugaucgaggaggugaugaacaucgugcugaucgcccugagccugcuggccauccugaagggcaucuacaacguggccaccugcggccuguucggccuggugagcuuccugcugcugugcggcagaagcugcagcaccaccuacaagggcguguacgagcugcagacccuggagcuggacauggccagccugaacaugaccaugccccugagcugcaccaagaacaacagccaccacuacaucauggugggcaacgagaccggccuggagcugacccugaccaacaccagcaucaucaaccacaaguucugcaaccugagcgacgcccacaagaagaaccuguacgaccacgcccugaugagcaucaucagcaccuuccaccugagcauccccaacuucaaccaguacgaggccaugagcugcgacuucaacggcggcaagaucagcgugcaguacaaccugagccacaccuacgccaucgacgccgccaaccacugcggcaccaucgccaacggcgugcugcagaccuucaugagaauggccuggggcggcagcuacaucgcccuggacagcggcugcggcagcugggacugcaucaugaccagcuaccaguaccugaucauccagaacaccaccugggaggaccacugccaguucagcagacccagccccaucggcuaccugggccugcugagccagagaaccagagacaucuacaucagcagaagacugcugggcaccuucaccuggacccugagcgacagcgagggcaacgagacccccggcggcuacugccugaccagauggaugcugaucgaggccgagcugaagugcuucggcaacaccgccguggccaagugcaacgagaagcacgacgaggaguucugcgacaugcugagacuguucgacuucaacaagcaggccaucagaagacugaagaccgaggcccagaugagcauccagcugaucaacaaggccgugaacgcccugaucaacgaccagcugaucaugaagaaccaccugagagacaucaugugcauccccuacugcaacuacagcaaguacugguaccugaaccacaccgugaccggcaagaccagccugcccagaugcuggcuggugagcaacggcagcuaccugaacgagacccacuucagcgacgacaucgagcagcaggccgacaacaugaucaccgagaugcugcagaaggaguacauggacagacagggcaagaccccccugggccugguggaccuguucguguucagcaccagcuucuaccugaucagcaucuuccugcaccuggugaagauccccacccacagacacgugaucggcaagcccugccccaagccccacagacugaaccacaugggcaucugcagcugcggccuguacaagcaccccggcgugcccgugaaguggaagagauga

SEQ ID NO: 34935 - RNA, 1473 nt, Artificial Sequence
  derived and/or modified CDS sequence (opt4) from LASV(LASV237-NIG-2010;Clade II)__AIT17638__GPCmut9
augggccagaucaucaccuucuuccaggaggugccccacgugaucgaggaggugaugaacaucgugcugaucgcccugagccugcuggccauccugaagggcaucuacaacguggccaccugcggccuguucggccuggugagcuuccugcugcugugcggcagaagcugcagcaccaccuacaagggcguguacgagcugcagacccuggagcuggacauggccagccugaacaugaccaugccccugagcugcaccaagaacaacagccaccacuacaucauggugggcaacgagaccggccuggagcugacccugaccaacaccagcaucaucaaccacaaguucugcaaccugagcgacgcccacaagaaggaccuguacgaccacgcccugaugagcaucaucagcaccuuccaccugagcauccccaacuucaaccaguacgaggccaugagcugcgacuucaacggcggcaagaucagcgugcaguacaaccugagccacaccuacgccguggacgccgccaaccacugcggcaccaucgccaacggcgugcugcagaccuucaugagaauggccuggggcggcagcuacaucgcccuggacagcggcugcggcagcugggacugcaucaugaccagcuaccaguaccugaucauccagaacaccaccugggaggaccacugccaguucagcagacccagccccaucggcuaccugggccugcugagccagagaaccagagacaucuacaucagcagaagacugcugggcaccuucaccuggacccugagcgacagcgagggcaacgagacccccggcggcuacugccugaccagauggaugcugaucgaggccgagcugaagugcuucggcaacaccgccguggccaagugcaacgagaagcacgacgaggaguucugcgacaugcugagacuguucgacuucaacaagcaggccaucagaagacugaagaccgaggcccagaugagcauccagcugaucaacaaggccgugaacgcccugaucaacgaccagcugaucaugaagaaccaccugagagacaucaugugcauccccuacugcaacuacagcaaguacugguaccugaaccacaccgugaccggcaagaccagccugcccagaugcuggcuggugagcaacggcagcuaccugaacgagacccacuucagcgacgacaucgagcagcaggccgacaacaugaucaccgagcugcugcagaaggaguacauggacagacagggcaagaccccccugggccugguggaccuguucguguucagcaccagcuucuaccugaucagcaucuuccugcaccugaucaagauccccacccacagacacaucaccggcaagcccugccccaagccccacagacugaaccacaugggcaucugcagcugcggccuguacaagcaccccggcgugcccgugaaguggaagagauga

SEQ ID NO: 34936 - RNA, 1473 nt, Artificial Sequence
  derived and/or modified CDS sequence (opt4) from LASV(LASV253-NIG-2011;Clade II)__AIT17670__GPCmut9
augggccagaucaucaccuucuuccaggaggugccccacgugaucgaggaggugaugaacaucgugcugaucgcccugagccugcuggccauccugaagggcaucuacaacguggccaccugcggccuguucggccuggugagcuuccugcugcugugcggcagaagcugcagcaccaccuacaagggcguguacgagcugcagacccuggagcuggacauggccagccugaacaugaccaugccccugagcugcaccaagaacaacagccaccacuacaucauggugggcaacgagaccggccuggagcugacccugaccaacaccagcaucaucaaccacaaguucugcaaccugagcgacgcccacaagaagaaccuguacgaccacgcccugaugagcaucaucagcaccuuccaccugagcauccccaacuucaaccaguacgaggccaugagcugcgacuucaacggcggcaagaucagcgugcaguacaaccugagccacaccuacgccguggacgccgccaaccacugcggcaccaucgccaacggcgugcugcagaccuucaugagaauggccuggggcggcagcuacaucgcccuggacagcggcugcggcagcugggacugcaucaugaccagcuaccaguaccugaucauccagaacaccaccugggaggaccacugccaguucagcagacccagccccaucggcuaccugggccugcugagccagagaaccagagacaucuacaucagcagaagacugcugggcaccuucaccuggacccugagcgacagcgagggcaacgagacccccggcggcuacugccugaccagauggaugcugaucgaggccgagcugaagugcuucggcaacaccgccguggccaagugcaacgagaagcacgacgaggaguucugcgacaugcugagacuguucgacuucaacaagcaggccaucagaagacugaaggccgaggcccagaugagcauccagcugaucaacaaggccgugaacgcccugaucaacgaccagcugaucaugaagaaccaccugagagacaucaugugcauccccuacugcaacuacagcaaguacugguaccugaaccacaccgugaccggcagaaccagccugcccagaugcuggcuggugagcaacggcagcuaccugaacgagacccacuucagcgacgacaucgagcagcaggccgacaacaugaucaccgagcugcugcagaaggaguacaucgacagacagggcaagaccccccugggccugguggaccuguucguguucagcaccagcuucuaccugaucagcaucuuccugcaccuggugaagauccccacccacagacacaucaucggcaagcccugccccaagccccacagacugaaccacaugggcaucugcagcugcggccuguacaagcaccccggcgugcccgugaaguggaagagauga

SEQ ID NO: 34937 - RNA, 1473 nt, Artificial Sequence
  derived and/or modified CDS sequence (opt4) from LASV(LASV254-NIG-2011;Clade II)__AIT17674__GPCmut9
augggccagaucaucaccuucuuccaggaggugccccacgugaucgaggaggugaugaacaucgugcugaucgcccugagccugcuggccauccugaagggcaucuacaacguggccaccugcggccuguucggccuggugagcuuccugcugcugugcggcagaagcugcagcaccaccuacaagggcguguacgagcugcagacccuggagcuggacaugaccaaccugaacaugaccaugccccugagcugcaccaagaacaacagccaccacuacaucauggugggcaacgagaccggccuggagcugacccugaccaacaccagcaucaucaaccacaaguucugcaaccugagcgacgcccacaagaagaaccuguacaaccacgcccugaugagcaucaucagcaccuuccaccugagcauccccaacuucaaccaguacgaggccaugagcugcgacuucaacggcggcaagaucagcgugcaguacaaccugagccacagcuacgccguggacgccgccaaccacugcggcaccaucgccaacggcgugcugcagaccuucaugagaauggccuggggcggcagcuacaucgcccuggacagcggcugcggcaacugggacugcaucaugaccagcuaccaguaccugaucauccagaacaccaccugggaggaccacugccaguucagcagacccagccccaucggcuaccugggccugcugagccagagaaccagagacaucuacaucagcagaagacugcugggcaccuucaccuggacccugagcgacagcgagggcaacgagacccccggcggcuacugccugaccagauggaugcugaucgaggccgagcugaagugcuucggcaacaccgccguggccaagugcaacgagaagcacgacgaggaguucugcgacaugcugagacuguucgacuucaacaagcaggccaucagaagacugaagaccgaggcccaggccaacauccagcugaucaacaaggccgugaacgcccugaucaacgaccagcugaucaugaagaaccaccugagagacaucaugugcauccccuacugcaacuacagcaaguacugguaccugaaccacaccgugaccggcaagaccagccugcccagaugcuggcuggugagcaacggcagcuaccugaacgagacccacuucagcgacgacaucgagcagcaggccgacaacaugaucaccgagcugcugcagaaggaguacauggacagacagggcaagaccccccugggccugguggaccuguucguguucagcaccagcuucuaccugaucagcaucuuccugcaccuggugaagauccccacccacagacacgugaucggcaagcccugccccaagccccacagacugaaccacaugggcaucugcagcugcggccuguacaagcaccccggcgugcccgugaaguggaagagauga

SEQ ID NO: 34938 - RNA, 1473 nt, Artificial Sequence
  derived and/or modified CDS sequence (opt4) from LASV(Nig08-A19;Clade III)__ADU56618__GPCmut9
augggccagaucgugaccuucuuccaggaggugccccacgugaucgaggaggugaugaacaucgugcugaucgcccugagcauccuggccauccugaagggccuguacaacaucgccaccugcggccugaucggccuggugaccuuccugcugcugagcggcagaagcugcagcaugaccuacaagggcguguacgagcugcagacccuggagcugaacaugaacacccugaacaugaccaugccccugagcugcaccaagaacaacagccaccacuacaucauggugggcaacgagaccggccuggagcugacccugaccaacaccagccugcugcaccacaaguucugcaaccugagcgacgcccacaagaagaaccuguacgaccacacccugaugagcaucaucagcaccuuccaccugagcauccccaacuucaaccaguacgaggccaugagcugcgacuucaacggcggcaagaucaccgugcaguacaaccugagccacagcuacgccaucgacgccgccaaccacugcggcaccguggccaacggcgugcugcagaccuucaugagaauggccuggggcggcagcuacaucgcccuggacagcggcugcggcaagugggacugcaucaugaccagcuaccaguaccugaucauccagaacaccaccugggaggaccacugccaguucagcagacccagccccaucggcuaccugggccugcugagccagagaaccagagacaucuacaucagcagaagacugcugggcaccuucaccuggacccugagcgacagcgagggcaacgagacccccggcggcuacugccugaccagauggaugcugaucgaggccgagcugaagugcuucggcaacaccgccguggccaagugcaacgagaagcacgacgaggaguucugcgacaugcugagacuguucgacuucaacaagcaggccaucagaagacugaaggccgaggcccagaugagcauccagcugaucaacaaggccgugaacgcccugaucaacgaccagcugaucaugaagaaccaccugagagacaucaugugcauccccuacugcaacuacagcaaguacugguaccugaaccacaccagcaccggcagaaccagccugcccagaugcuggcuggugagcaacggcagcuaccugaacgagacccacuucagcgacgacaucgagcagcaggccgacaacaugaucaccgagaugcugcagaaggaguaccuggacagacagggcaagaccccccugggccugguggaccuguucguguucagcaccagcuucuaccugaucagcaucuuccugcaccuggugaagauccccacccacagacacaucgugggcaagcccugccccaagccccacagacugaaccacaugggcaucugcagcugcggccuguacaagcagcccggcgugcccgugagauggaagagauga

SEQ ID NO: 34939 - RNA, 1476 nt, Artificial Sequence
  derived and/or modified CDS sequence (opt4) from LASV(G1180-SLE-2010;Clade IV)__AIT17168__GPCmut9
augggccagaucgugaccuucuuccaggaggugccccacgugaucgaggaggugaugaacaucgugcugaucgcccugagcauccuggccgugcugaagggccuguacaacuucgccaccugcggccuggugggccugcugaccuuccugcugcugugcggcagaagcugcaccgccagcagauacaagggcguguacgagcugcagacccuggagcugaacauggagacccugaacaugaccaugccccugagcugcaccaagaacaacagccaccacuacaucauggugggcaacgagaccggccuggagcugacccugaccaacaccagcaucaucaaccacaaguucugcaaccugagcgacgcccacaagaagaaccuguacgaccacgcccugaugagcaucaucagcaccuuccaccugagcauccccaacuucaaccaguacgaggccaugagcugcgacuucaacggcggcaagaucagcgugcaguacaaccugagccacagcuacgccggcgacgccgccaaccacugcggcaccguggccaacggcgugcugcagaccuucaugagaauggccuggggcggcagcuacaucgcccuggacagcggcugcggcagcugggacugcaucaugaccagcuaccaguaccugaucauccagaacaccaccugggaggaccacugccaguucagcagacccagccccaucggcuaccugggccugcugagccagagaaccagagacaucuacaucagcagaagacugcugggcaccuucaccuggacccugagcgacagcgagggcaaggacacccccggcggcuacugccugaccagauggaugcugaucgaggccgagcugaagugcuucggcaacaccgccguggccaagugcaacgagaagcacgacgaggaguucugcgacaugcugagacuguucgacuucaacaagcaggccauccagagacugaaggccgaggcccagaugagcauccagcugaucaacaaggccgugaacgcccugaucaacgaccagcugaucaugaagaaccaccugagagacaucaugugcauccccuacugcaacuacagcaaguacugguaccugaaccacaccaccaccggcaagaccagccugcccaagugcuggcuggugagcaacggcagcuaccugaacgagacccacuucagcgacgacaucgagcagcaggccgacaacaugaucaccgagaugcugcagaaggaguacauggagagacagggcaagaccccccugggccugguggaccuguucguguucagcaccagcuucuaccugaucagcaucuuccugcaccuggugaagauccccacccacagacacaucgugggcaagagcugccccaagccccacagacugaaccacaugggcaucugcagcugcggccuguacaagcagcccggcgugcccgugaaguggaagagauga

SEQ ID NO: 34940 - RNA, 1476 nt, Artificial Sequence
  derived and/or modified CDS sequence (opt4) from LASV(G1442-SLE-2011;Clade IV)__AIT17180__GPCmut9
augggccagaucgugaccuucuuccaggaggugccccacgugaucgaggaggugaugaacaucgugcugaucgcccugagcauccuggccgugcugaagggccuguacaacguggccaccugcggccugaucggccuggugaccuuccugcugcugugcggcagaagcugcaccaccacccuguacaagggcguguacgagcugcagacccuggagcugaacauggagacccugaacaugaccaugccccugagcugcaccaagaacaacagccaccacuacaucagagugggcaacgagaccggccuggagcugacccugaccaacaccagcaucaucaaccacaaguucugcaaccugagcgacgcccacaagaagaaccuguacgaccacgcccugaugagcaucaucagcaccuuccaccugagcauccccaacuucaaccaguacgaggccaugagcugcgacuucaacggcggcaagaucagcgugcaguacaaccugagccacagcuacgccggcgacgccgccaaccacugcggcaccguggccaacggcgugcugcagaccuucaugagaauggccuggggcggcagcuacaucgcccuggacagcggcugcggcaacugggacugcaucaugaccagcuaccaguaccugaucauccagaacaccaccugggacgaccacugccaguucagcagacccagccccaucggcuaccugggccugcugagccagagaaccagagacguguacaucagcagaagacugcugggcaccuucaccuggacccugagcgacagcgagggcaaggacacccccggcggcuacugccugaccagauggaugcugaucgaggccgagcugaagugcuucggcaacaccgccguggccaagugcaacgagaagcacgacgaggaguucugcgacaugcugagacuguucgacuucaacaagcaggccauccagagacugaaggccgaggcccagaugagcauccagcugaucaacaaggccgugaacgcccugaucaacgaccagcugaucaugaagaaccaccugagagacaucaugugcauccccuacugcaacuacagcaaguacugguaccugaacaacaccgccaccggcaagaccagccugcccaagugcuggcugaucagcaacggcagcuaccugaacgagacccacuucagcgacgacaucgagcaggaggccgacaacaugaucaccgagaugcugcagaaggaguacauggagagacagggcaagaccccccugggccugguggaccuguucguguucagcaccagcuucuaccugaucagcaucuuccugcaccuggugaagauccccacccacagacacaucgugggcaagagcugccccaagccccacagacugaaccacaugggcaucugcagcugcggccuguacaagcagcccggcgugcccgugagauggaagagauga

SEQ ID NO: 34941 - RNA, 1476 nt, Artificial Sequence
  derived and/or modified CDS sequence (opt4) from LASV(G3010-SLE-2013;Clade IV)__AIT17344__GPCmut9
augggccagaucgugaccuucuuccaggaggugccccacgugaucgaggaggugaugaacaucgugcugaucgcccugagcauccuggccgugcugaagggccuguacaacuucgccaccugcggccuggugggccuggugaccuuccugcugcugugcggcagaagcugcaccaccagccuguacaagggcguguacgagcugcagacccuggagcugaacauggagacccugaacaugaccaugccccugagcugcaccaagaacaacagccaccacuacaucauggugggcaacgagaccggccuggagcugacccugaccaacaccagcaucaucaaccacaaguucugcaaccugagcgacgcccacaagaagaaccuguacaaccacgcccugaugagcaucaucagcaccuuccaccugagcauccccaacuucaaccaguacgaggccaugagcugcgacuucaacggcggcaagaucagcgugcaguacaaccugagccacagcuacgccggcgacgccgccagccacugcggcaccguggccaacggcgugcugcagaccuucaugagaauggccuggggcggcagcuacaucgcccuggacagcggcugcggcaagugggacugcaucaugaccagcuaccaguaccugaucauccagaacaccaccugggaggaccacugccaguucagcagacccagccccaucggcuaccugggccugcugagccagagaaccagagacaucuacaucagcagaagacugcugggcaccuucaccuggacccugagcgacagcgagggcaaggacacccccggcggcuacugccugaccagauggaugcugaucgaggccgagcugaagugcuucggcaacaccgccguggccaagugcaacgagaagcacgacgaggaguucugcgacaugcugagacuguucgacuucaacaagcaggccauccagagacugaagaccgaggcccagaugagcauccagcugaucaacaaggccgugaacgcccugaucaacgaccagcugaucaugaagaaccaccugagagacaucaugugcauccccuacugcaacuacagcaaguacugguaccugaaccacaccaccaccggcaagaccagccugcccaagugcuggcuggugagcaacggcagcuaccugaacgagacccacuucagcgacgacaucgagcagcaggccgacaacaugaucaccgagaugcugcagaaggaguacauggagagacagggcaagaccccccugggccugguggaccuguucguguucagcaccagcuucuaccugaucagcaucuuccugcaccuggugaagauccccacccacagacacaucgugggcaagagcugccccaagccccacagacugaaccacaugggcaucugcagcugcggccuguacaagcagcccggcgugcccgugagauggaagagauga

SEQ ID NO: 34942 - RNA, 1476 nt, Artificial Sequence
  derived and/or modified CDS sequence (opt4) from LASV(G502-SLE-2009;Clade IV)__AIT17126__GPCmut9
augggccagaucgugaccuucuuccaggaggugccccacgugaucgaggaggugaugaacaucgugcugaucgcccugagcauccuggccgugcugaagggccuguacaacuucgccaccugcggccuggugggccugcugaccuuccugcugcugugcggcagaagcugcaccaccggccuguacaagggcguguacgagcugcagacccuggagcugaacauggagacccugaacaugaccaugccccugagcugcaccaagaacaacagccaccacuacaucauggugggcaacgagaccggccuggagcugacccugaccaacaccagcaucaucaaccacaaguucugcaaccugagcgacgcccacaagaagaaccuguacgaccacgcccugaugagcaucaucagcaccuuccaccugagcauccccaacuucaaccaguacgaggccaugagcugcgacuucaacggcggcaagaucagcgugcaguacaaccugagccacagcuacgccggcgacgccgccgaccacugcggcaccguggccaacggcgugcugcagaccuucaugagaauggccuggggcggcagcuacaucgcccuggacagcggcugcggcagaugggacugcaucaugaccagcuaccaguaccugaucauccagaacaccaccugggaggaccacugccaguucagcagacccagccccaucggcuaccugggccugcugagccagagaaccagagacaucuacaucagcagaagacugcugggcaccuucaccuggacccugagcgacagcgagggcaaggacacccccggcggcuacugccugaccagauggaugcugaucgaggccgagcugaagugcuucggcaacaccgccguggccaagugcaacgagaagcacgacgaggaguucugcgacaugcugagacuguucgacuucaacaagcaggccauccagagacugaaggccgaggcccagaugagcauccagcugaucaacaaggccgugaacgcccugaucaacgaccagcuggugaugaagaaccaccugagagacaucaugugcauccccuacugcaacuacagcagauacugguaccugaaccacaccaccaccggcagaaccagccugcccaagugcuggcuggugagcaacggcagcuaccugaacgagacccacuucagcgacgacaucgagcagcaggccgacaacaugaucaccgagaugcugcagaaggaguacauggagagacagggcaagaccccccugggccugguggaccuguucguguucagcaccagcuucuaccugaucagcaucuuccugcaccuggugaagauccccacccacagacacaucgugggcaagagcugccccaagccccacagacugaaccacaugggcaucugcagcugcggccuguacaagcagcccggcgugcccgugaaguggaagagauga

SEQ ID NO: 34943 - RNA, 1476 nt, Artificial Sequence
  derived and/or modified CDS sequence (opt4) from LASV(G733-SLE-2010;Clade IV)__AIT17154__GPCmut9
augggccagaucgugaccuucuuccaggaggugccccacgugaucgaggaggugaugaacaucgugcugaucgcccugagcauccuggccgugcugaagggccuguacaacuucgccaccugcggcaucgugggccuggugagcuuccugcugcugugcggcagaagcugcaccaccagccuguacaagggcguguacgagcugcagacccuggagcugaacauggagacccugaacaugaccaugccccugagcugcaccaagaacaacagccaccacuacaucauggugggcaacgagaccggccuggagcugacccugaccaacaccagcaucaucaaccacaaguucugcaaccugagcgacgcccacaagaagaaccuguacgaccacgcccugaugagcaucaucagcaccuuccaccugagcauccccaacuucaaccaguacgaggccaugagcugcgacuucaacggcggcaagaucagcgugcaguacaaccugagccacagcuacgccggcgacgccgccaaccacugcggcaccaucgccaacggcgugcugcagaccuucaugagaauggccuggggcggcagcuacaucgcccuggacagcggcugcgacagaugggacugcaucaugaccagcuaccaguaccugaucauccagaacaccaccugggaggaccacugccaguucagcagacccagccccaucggcuaccugggccugcugagccagagaaccagagacaucuacaucagcagaagacugcugggcaccuucaccuggacccugagcgacagcgagggcaaggacacccccggcggcuacugccugaccagauggaugcugaucgaggccgagcugaagugcuucggcaacaccgccguggccaagugcaacgagaagcacgacgaggaguucugcgacaugcugagacuguucgacuucaacaagcaggccauccagagacugaaggccgaggcccagaugagcauccagcugaucaacaaggccgugaacgcccugaucaacgaccagcugaucaugaagaaccaccugagagacaucaugugcauccccuacugcaacuacagcaaguacugguaccugaaccacaccaccaccggcaagaccagccugcccaagugcuggcuggugagcaacggcagcuaccugaacgagacccacuucagcgacgacaucgagcagcaggccgacaacaugaucaccgagaugcugcagaaggaguacauggagagacagggcaagaccccccugggccugguggaccuguucguguucagcaccagcuucuaccugaucagcaucuuccugcaccuggugaagauccccacccacagacacguggugggcaagagcugccccaagccccacagacugaaccacaugggcaucugcagcugcggccuguacggccagcccggcgugcccgugaaguggaagagauga

SEQ ID NO: 34944 - RNA, 1476 nt, Artificial Sequence
  derived and/or modified CDS sequence (opt4) from MOPV/LASV reassortant(IGS-1;Clade IV)__AFY05576__GPCmut9
augggccagaucgugaccuucuuccaggaggugccccacgugaucgaggaggugaugaacaucgugcugaucgcccugagcgugcuggccgugcugaagggccuguacaacuucgccaccugcggccuggugggccuggugaccuuccugcugcugugcggcagaagcugcaccaccagccuguacaagggcguguacgagcugcagacccuggagcugaacauggagacccugaacaugaccaugccccugagcugcaccaagaacaacagccaccacuacaucauggugggcaacgagaccggccuggagcugacccugaccaacaccagcaucaucaaccacaaguucugcaaccugagcgacgcccacaagaagaaccuguacgaccacgcccugaugagcaucaucagcaccuuccaccugagcauccccaacuucaaccaguacgaggccaugagcugcgacuucaacggcggcaagaucagcgugcaguacaaccugagccacagcuacgccggcgacgccgccaaccacugcggcaccguggccaacggcgugcugcagaccuucaugagaauggccuggggcggcagcuacaucgcccuggacagcggcugcggcaacugggacugcaucaugaccagcuaccaguaccugaucauccagaacaccaccugggaggaccacugccaguucagcagacccagccccaucggcuaccugggccugcugagccagagaaccagagacaucuacaucagcagaagacugcugggcaccuucaccuggacccugagcgacagcgagggcgaggacacccccggcggcuacugccugaccagauggaugcugaucgaggccgagcugaagugcuucggcaacaccgccguggccaagugcaacgagaagcacgacgaggaguucugcgacaugcugagacuguucgacuucaacaagcaggccauccagagacugaaggccgaggcccagaugagcauccagcugaucaacaaggccgugaacgcccugaucaacgaccagcugaucaugaagaaccaccugagagacaucaugugcauccccuacugcaacuacagcaaguacugguaccugaaccacaccaccaccggcagaaccagccugcccaagugcuggcuggugagcaacggcagcuaccugaacgagacccacuucagcgacgacaucgagcagcaggccgacaacaugaucaccgagaugcugcagaaggaguacauggagagacagggcaagaccccccugggccugguggaccuguucguguucagcaccagcuucuaccugaucagcaucuuccugcaccuggugaagauccccacccacagacacaucgugggcaagagcugccccaagccccacagacugaaccacaugggcaucugcagcugcggccuguacaagcagcccggcgugcccgugaaguggaagagauga

SEQ ID NO: 34945 - RNA, 1476 nt, Artificial Sequence
  derived and/or modified CDS sequence (opt4) from LASV(LM765-SLE-2012;Clade IV)__AIT17814__GPCmut9
augggccagaucgugaccuucuuccaggaggugccccacgugaucgaggaggugaugaacaucgugcugaucgcccugagcauccuggccgugcugaagggccuguacaacuucgccaccugcggccuggugggccuggugaccuuccugcugcugugcggcagaagcugcaccaccagccuguacaagggcguguacgagcugcagacccuggagcugaacauggagacccugaacaugaccaugccccugagcugcaccaagaacaacagccaccacuacaucauggugggcaacgagaccggccuggagcugacccugaccaacaccagcaucaucgaccacaaguucugcaaccugagcgacgcccacagaaagaaccuguacgaccacgcccugaugagcaucaucagcaccuuccaccugagcauccccaacuucaaccaguacgaggccaugagcugcgacuucaacggcggcaagaucagcgugcaguacaaccugagccacagcuacgccaaggacgccgccgaccacugcggcaccguggccaacggcgugcugcagaccuucaugagaauggccuggggcggcagcuacaucgcccuggacagcggcugcggcagaugggacugcaucaugaccagcuaccaguaccugaucauccagaacaccaccugggaggaccacugccaguucagcagacccagccccaucggcuaccugggccugcugagccagagaaccagagacaucuacaucagcagaagacugcugggcaccuucaccuggacccugagcgacagcgagggcaaggacacccccggcggcuacugccugaccagauggaugcugaucgaggccgagcugaagugcuucggcaacaccgccguggccaagugcaacgagaagcacgacgaggaguucugcgacaugcugagacuguucgacuucaacaagcaggccauccagagacugaaggccgaggcccagaugagcauccagcugaucaacaaggccgugaacgcccugaucaacgaccagcugaucaugaagaaccaccugagagacaucaugugcauccccuacugcaacuacagcaaguacugguaccugaaccacaccaccaccggcaagaccagccugcccaagugcuggcuggugagcaacggcagcuaccugaacgagacccacuucagcgacgacaucgagcagcaggccgacaacaugaucaccgagaugcugcagaaggaguacauggagagacagggcaagaccccccugggccugguggaccuguucguguucagcaccagcuucuaccugaucagcaucuuccugcaccuggugaagauccccacccacagacacaucgugggcaagcccugccccaagccccacagacugaaccacaugggcaucugcagcugcggccuguacaagcagcccggcgugcccgugaaguggaagagauga

SEQ ID NO: 34946 - RNA, 1476 nt, Artificial Sequence
  derived and/or modified CDS sequence (opt4) from LASV(LM776-SLE-2012;Clade IV)__AIT17824__GPCmut9
augggccagaucgugaccuucuuccaggaggugccccacgugaucgaggaggugaugaacaucgugcugaucgcccugagcauccuggccgugcugaagggccuguacaacuucgccaccugcggccuggugggccuggugaccuuccugcugcugugcggcagaagcugcaccaccagcguguacaagggcguguacgagcugcagacccuggagcugaacauggagacccugaacaugaccaugccccugagcugcaccaagaacaacagccaccacuacaucauggugggcaacgagaccggccuggagcugacccugaccaacaccagcaucaucaaccacaaguucugcaaccugagcgacgcccacaagaagaaccuguacgaccacgcccugaugagcaucaucagcaccuuccaccugagcauccccaacuucaaccaguacgaggccaugagcugcgacuucaacggcggcaagaucagcgugcaguacaaccugagccacagcuacgccggcgacgccgccaaccacugcggcaccguggccaacggcgugcugcagaccuucaugagaauggccuggggcggcagcuacaucgcccuggacagcggcugcggcaagugggacugcaucaugaccagcuaccaguaccugaucauccagaacaccaccugggaggaccacugccaguucagcagacccagccccaucggcuaccugggccugcugagccagagaaccagagacaucuacaucagcagaagacugcugggcaccuucaccuggacccugagcgacagcgagggcaaggacacccccggcggcuacugccugaccagauggaugcugaucgaggccgagcugaagugcuucggcaacaccgccguggccaagugcaacgagaagcacgacgaggaguucugcgacaugcugagacuguucgacuucaacaagcaggccauccagagacugaaggccgaggcccagaugagcauccagcugaucaacaaggccgugaacgcccugaucaacgaccagcugaucaugaagaaccaccugagagacaucaugugcauccccuacugcaacuacagcaaguacugguaccugaaccacaccaccaccggcaagaccagccugcccaagugcuggcuggugagcaacggcagcuaccugaacgagacccacuucagcgacgacaucgagcagcaggccgacaacaugaucaccgagaugcugcagaaggaguacauggagagacagggcaagaccccccugggccugguggaccuguucguguucagcaccagcuucuaccugaucagcaucuuccugcaccuggugaagauccccacccacagacacaucgugggcaagagcugccccaagccccacagacugaaccacaugggcaucugcagcugcggccuguacaagcagcccggcgugcccgugagauggaagagauga

SEQ ID NO: 34947 - RNA, 1476 nt, Artificial Sequence
  derived and/or modified CDS sequence (opt4) from LASV(Mad39;Clade IV)__ANH09722__GPCmut9
augggccagaucgugaccuucuuccaggaggugccccacgugaucgaggaggugaugaacaucgugcugaucgcccugagcauccuggccgugcugaagggccuguacaacguggccaccugcggccugaucggccuggugaccuuccugcugcugugcggcagaagcugcaccaccacccuguacaagggcguguacgagcugcaggcccuggagcugaacauggagacccugaacaugaccaugccccugagcugcaccaagaacaacagccaccacuacaucagagugggcaacgagaccggccuggagcugacccugaccaacaccagccugaucaaccacaaguucugcaaccugagcgacgcccacaagaagaaccuguacgaccacgcccugaugagcaucaucagcaccuuccaccugagcauccccaacuucaaccaguacgaggccaugagcugcgacuucaacgacggcaagaucagcgugcaguacaaccugagccacaccuacgccggcgacaccgccaaccacugcggcaccguggccaacggcgugcugcagaccuucaugagaauggccuggggcggcagcuacaucgcccuggacagcggcugcggcggcugggacugcaucaugaccagcuaccaguaccugaucauccagaacaccaccugggaggaccacugccaguucagcagacccagccccaucggcuaccugggccugcugagccagagaaccagagacaucuacaucagcagaagacugcugggcaccuucaccuggacccugagcgacagcgagggcaaggacacccccggcggcuacugccugaccagauggaugcugaucgaggccgagcugaagugcuucggcaacaccgccguggccaagugcaacgagaagcacgacgaggaguucugcgacaugcugagacuguucgacuucaacaagcaggccauccagagacugaaggccgaggcccagaugagcauccagcugaucaacaaggccgugaacgcccugaucaacgaccagcugaucaugaagaaccaccugagagacaucaugugcauccccuacugcaacuacagcaaguacugguaccugaaccacaccgugaccggcaagaccagccugcccaagugcuggcuggugagcaacggcagcuaccugaacgagacccacuucagcgacgacaucgagcagcaggccgacaacaugaucaccgagaugcugcagaaggaguacauggagagacagggcaagaccccccugggccugguggaccuguucguguucagcaccagcuucuaccugaucagcaucuuccugcaccuggugaagauccccacccacagacacguggugggcaagcccugccccaagccccacagacugaaccacaugggcaucugcagcugcggcuucuacaagcagcccggcgugcccgugagauggaagagauga

SEQ ID NO: 34948 - RNA, 1476 nt, Artificial Sequence
  derived and/or modified CDS sequence (opt4) from LASV(Z0947-SLE-2011;Clade IV)__AIT17840__GPCmut9
augggccagaucgugaccuucuuccaggaggugccccacgugaucgaggaggugaugaacaucgugcugaucgcccugagcauccuggccgugcugaagggccuguacaacuucgccaccugcggccuggugggccuggugaccuuccugcugcugugcggcagaagcugcaccaucagccuguacaagggcguguacgagcugcagacccuggagcugaacauggagacccugaacaugaccaugccccugagcugcaccaagaacaacagccaccacuacaucauggugggcaacgagaccggccuggagcugacccugaccaacaccagcaucaucaaccacaaguucugcaaccugagcgacgcccacaagaagaaccuguacgaccacgcccugaugagcaucaucagcaccuuccaccugagcauccccaacuucaaccaguacgaggccaugagcugcgacuucaacggcggcaagaucagcgugcaguacaaccugagccacagcuacgccggcgacgccgccaaccacugcggcaccguggccaacggcgugcugcagaccuucaugagaauggccuggggcggcagcuacaucgcccuggacagcggcugcgacagaugggacugcaucaugaccagcuaccaguaccugaucauccagaacaccaccugggaggaccacugccaguucagcagacccagccccaucggcuaccugggccugcugagccagagaaccagagacaucuacaucagcagaagacugcugggcaccuucaccuggacccugagcgacagcgagggcaaggacacccccggcggcuacugccugaccagauggaugcugaucgaggccgagcugaagugcuucggcaacaccgccguggccaagugcaacgagaagcacgacgaggaguucugcgacaugcugagacuguucgacuucaacaagcaggccauccagagacugaaggccgaggcccagaugagcauccagcugaucaacaaggccgugaacgcccugaucaacgaccagcugaucaugaagaaccaccugagagacaucaugugcauccccuacugcaacuacagcaaguacugguaccugaaccacaccaccaccggcaagaccagccugcccaagugcuggcuggugagcaacggcagcuaccugaacgagacccacuucagcgacgacaucgagcagcaggccgacaacaugaucaccgagaugcugcagaaggaguacauggagagacagggcaagaccccccugggccugguggaccuguucguguucagcaccagcuucuaccugaucagcaucuuccugcaccuggugaagauccccacccacagacacaucgugggcaagcccugccccaagccccacagacugaaccacaugggcaucugcagcugcggccuguacaagcagcccggcgugcccgugaaguggaagagauga

SEQ ID NO: 34949 - RNA, 1476 nt, Artificial Sequence
  derived and/or modified CDS sequence (opt5) from LASV(Josiah;Clade IV)__NP_694870__GPCmut9
augggccagaucgugaccuucuuucaagaggucccccacguuauugaagaggugaugaacaucgugcugauugcccucagcguccuggcugugcuuaaggggcuguacaauuucgccacaugcggacucguuggccuggugacguuucuucugcucugugggagauccugcaccacaucucuguauaaaggagucuacgaacugcagacccucgagcugaacauggaaacacuuaauaugaccaugccucugagcuguacaaagaacaauucccaucacuauaucauggugggcaacgagaccgggcucgagcugacgcuuaccaauacaucuauuaucaaccauaaauucugcaaucugagcgacgcgcacaagaaaaaccucuacgaucaugcucugauguccaucauuucuaccuuucaccugagcaucccgaauuucaaccaguaugaagccauguccugugacuuuaauggaggcaagauuagcguucaguacaaccucucucacuccuaugccggcgaugcugccaaucauugcgggacaguggcuaacggaguccugcaaaccuucaugcggauggccuggggcgggagcuacaucgcgcuugacucuggauguggcaacugggauugcauuaugacguccuaccaguaucugaucauucagaauacaaccugggaggaccacugucaguuuagccgccccucuccuaucggguaccucggacugcuuucccaaagaacacgggauaucuauauuagccgcagacugcucggcaccuucaccuggacacuguccgacucugaaggcaaggauacgcccgggggauacugccugacccgguggaugcucaucgaggccgagcugaaauguuuuggcaacacagcuguggccaagugcaaugaaaaacaugacgaggaguucugcgauaugcuucgccuguuugacuucaacaagcaggcuauucagagacucaaagccgaagcgcagaugagcauccaacugauuaauaaggccgugaacgcucuuaucaaugaucagcugaucaugaagaaccaccuccgggacauuauguguaucccuuauugcaauuacuccaaauauugguaccugaaccacaccacaaccgggcgcacgagccugcccaaguguuggcucgucucuaauggauccuaccugaacgaaacacauuucagcgacgauauugagcagcaagccgacaauaugaucaccgagaugcuucagaaagaauauauggagagacagggcaagaccccucuggggcucguugaucuguuuguguucucuaccagcuuuuaccugauuuccaucuuccuucaccucgugaaaaucccgacacaucggcacauugucggaaagucuugccccaaaccucaucgccugaaccacaugggcaucuguagcugcggccuguauaagcagcccggggugccuguuaaguggaaaagauga

SEQ ID NO: 34950 - RNA, 1473 nt, Artificial Sequence
  derived and/or modified CDS sequence (opt5) from LASV(LP;Clade I)__AAF86701__GPCmut9
augggccagaucauuaccuucuuucaagaggugccccacgucaucgaagagguuaugaacauugugcugaucgcccucagccugcuugcuauucugaaggggcucuacaauaucgccacaugcggaaucauuggccugguggcguuccuuuuucugugugggaaauccugcucucucacgcugaagggaggcuaugaacugcagacccucgagcugaacauggaaacacuuaauaugaccaugccucugagcuguaccaaaaacuccucucaucacuacaucagagucgggaaugagacaggacucgagcugacacuuaccaacacgagcauuaucaaucauaaguucugcaaccuguccgacgcucacaaaaagaaucucuaugaucaugcccugaugucuauuaucagcaccuuucaccuguccauuccgaacuucaaucaguacgaagccaugagcugugacuuuaacggcggcaagaucucugugcaguauaaucucucccacagcuacgcuggggaugccgcugagcauugcggaacaguugccaacggcgugcugcaaaccuucaugcggauggcguggggagggcgcuauaucgcccuugacucuggcugugggaauugggauugcauuaugacauccuaccaguaccugaucauucagaacaccacgugggaagaccacugucaguuuagcagacccucuccuaucggauaucucggccugcuuucccaacggacacgcgauauuuacaucagcagacggcugcucggcaccuucacauggacccuguccgacucugaggggaacgagacccccggaggcuauugccugacacgcuggaugcucaucgaagcugagcugaaauguuuugggaauacggccgucgcuaagugcaacgaaaaacaugaugaggaguucugcgacaugcuuagacuguuugauuucaauaagcaggccauucggcgccucaaagcggaagcccagaugagcauccagcugauuaacaaggcugugaaugcccuuaucaacgaccaacugauuaugaagaaucaccucagagauaucauguguaucccuuacugcaacuauuccaaauacugguaucugaaucacaccagcucuggacggacaucccugcccaaguguuggcucauuagcaacggcucuuaccugaaugagacccaguucagcgacgacaucgaacagcaagcugauaacaugauuacagagaugcuucagaaagaauacaucgagcgccaggggaagaccccucugggacucguugacauuuuuaucuucuccacgucuuuuuaucugauuagcaucuuccugcaucuuaucaaaauuccgacacacagacauaucgugggcaagcccugcccuaaaccccaccggcucaaucauaugggcgucuguuccugcgggcuguacaagcacccuggagugcccaccaaguggaaacgcuga

SEQ ID NO: 34951 - RNA, 1473 nt, Artificial Sequence
  derived and/or modified CDS sequence (opt5) from LASV(803213;Clade II)__AAF86703__GPCmut9
augggccagaucauuaccuucuuucaagaggugccccacgucaucgaagagguuaugaacauugugcugaucgcccucagccugcuugcuauucugaaggggaucuacaauguggccacaugcggacucuucggccugaucuccuuucuucugcucugugggagaucuugcagcgucacguauaaaggaguguacgaacugcagacccuggagcucaacauggcgaaucugaacaugacaaugccucuuuccuguaccaagaauaacucucaucacuauauuaugguuggcaaugaaacagggcuggagcucacccugacaaacaccagcaucauuaaucauaaauucugcaaccuuuccgacgcucacaagaaaaaucuguacgaucaugcccucaugucuaucauuagcacguuucaccuguccaucccgaacuucaaucaguaugaggccaugagcugugacuuuaacggaggcaagauuucugugcaguacaaucugucccacagcuucgcugucgaugccgcuaaccauugcggcaccaucgccaacggggugcuccaaacauuuaugcggauggcguggggaggcucuuauaucgcccuggacuccggguguggaaauugggauugcauuaugaccagcuaccaguaccuuaucauucagaacacaaccugggaagaccacugucaguucucucgccccuccccuaucggcuaucuggggcuccugagccaaagaacgcgggauauuuacaucucccgcagacuucugggaacauuuaccuggacacucucugacagcgagggcaaugaagcucccggcggguauugccugacccgguggaugcugaucgaggccgagcucaaguguuucggaaacaccgcuguugccaaaugcaaugaaaagcaugaugaggaauuuugcgacaugcugcgccuuuucgauuucaacaaacaggcgauuaagagacugaaaacagaggcccagauguccauccagcucauuaauaaggcugugaacgcccugaucaaugaccaacuuauuaugaagaaccaucugcgggauaucauguguaucccuuacugcaauuauagccgcuacugguaucucaaccacacggucaccggcaaaacaucucugcccagauguuggcugguguccaaugggagcuaccucaacgaaacccacuuuucugacgacauugagcagcaggcugauaauaugaucacagagaugcugcaaaaggaauacauggaccggcagggaaaaaccccucuuggccugguggaucucuucgucuuuagcacguccuucuaucugauuucuaucuuucugcaccuuguuaagauuccgacacaucgccacaucguggggaaacccugcccuaagccccauagacucaaccacaugggaauuuguagcugcggccuguacaaacacccuggcgugcccgucaaguggaagcgguga

SEQ ID NO: 34952 - RNA, 1473 nt, Artificial Sequence
  derived and/or modified CDS sequence (opt5) from LASV(GA391;Clade III)__CAA36645__GPCmut9
augggccagaucgugaccuucuuucaagaggucccccacguuauugaagaggugaugaacaucgugcugauugcccucagcauccuggcuauucuuaaggggcuguacaaugucgccacaugcggacucaucggccuggugacguuccuucugcucuccgggagaucuuguagccugaucuauaaaggaaccuacgaacugcagacacucgagcugaacauggaaacccuuaauaugacaaugccucuguccugcaccaagaacaauucucaucacuauauucggguuggcaacgagacagggcucgagcugacccuuacgaauaccagcauccugaaccauaaauuuuguaaucucuccgacgcgcacaagcgcaaccuguacgaucauucucugaugagcauuaucuccacauuccaccucagcauuccgaauuuuaaccaguaugaagcuaugucuugcgacuucaauggaggcaaaaucaccgugcaguacaaccugucccacagcuuugccgucgaugccgcuggccauugugggacacuugccaauggagugcugcaaaccuucaugagaauggcuuggggcgggucuuauauugcccucgacuccggaugcggcaacugggauuguaucaugacgagcuaccaguaccugaucauucagaacacaaccugggacgaucacugccaguuuucucggcccuccccuaucggguaucuuggacugcucagccaacgcacaagagacauuuacaucucccggcgccugcugggcaccuucaccuggacacucucugauagcgagggcaaugaaacgcccgggggauauugucugaccagauggaugcuuauugaggcggagcugaagugcuuuggcaacacagccguugcuaaguguaaugaaaaacaugacgaggaguucugcgauaugcuccggcuguuugacuucaacaagcaggccauccgcagacuuaaaaccgaagcucagauguccauccagcugauuaauaaggccgugaacgcgcucaucaaugaucaacugauuaugaaaaaccaucugcgggacaucaugugcauuccuuacuguaauuauagccgcuacugguaucucaaccacacaucuaccgggaagacgucccugcccagaugcuggcuuaucagcaauggaucuuaccugaacgaaacaaaguucagcgacgauaucgagcagcaggccgacaauaugauuaccgagaugcuccaaaaagaauacaucgaucggcagggcaagaccccucuggggcuggucgaccuuuuuguguucuccacaucuuuuuaucucauuagcaucuuccugcaccuggugaaaauuccgacccaccgccauaucgucggaaagcccuguccuaaaccccacagacucaaccauaugggcauuugcuccuguggccuguacaagcagccugggguucccgugcgguggaaaagauga

SEQ ID NO: 34953 - RNA, 1476 nt, Artificial Sequence
  derived and/or modified CDS sequence (opt5) from LASV(AV;Clade V)__CCA30314__GPCmut9
augggccagaucgugaccuucuuucaagaggucccccacguuauugaagaggugaugaacaucgugcugauugcccucagcauccuggcuguccuuaaggggcuguacaauauugccacaugcggacucaucggccugaucacguuccuucugcucugugggagauccugcucuagcaaccuguauaaaggaguguacgaacugcagucccucgaccugaauauggagacccuuaacaugacaaugccucugucuuguaccaagaauaacagccaucacuauauucggguuggcaaugauacagggcucgaacugacccuuacaaacaccuccauccugaaucauaaauuuugcaaccucucugacgcgcacaagaaagaucuguacgaccaugcucugaugagcauuaucuccacguuccaccucagcauuccgaauuuuaaccaguaugaggccaugucuugugauuucaauggaggcaagaucuccgugcaguacaaccugagccacucuuaugccauugacgcugccaaucauugcggcaccgucgcuaacgggauccuucaaacauuuaugcgcauggccuggggaggcuccuacaucgcgcuggauagcggguguggaaacugggacugcauuaugaccucuuaccaguaucucaucauucagaauacaaccugggagaaccacugucaguucuccagacccagcccuaucggcuaccuggggcuucugucccaacggacgcgcgauauuuauaucucuagacggcuccugggaacauuuaccuggacacugagcgacuccgaaggcaaugccacccccggcggguacugccucacccgcuggaugcugaucgaggcugaacuuaaguguuucggaaacacagccguggcuaaaugcaaugagaagcaugaugaggaauuuugcgacaugcugagacucuucgauuuuaacaaacaggccauuagccggcugaagucugaggcgcagauguccauccagcuuauuaauaaagccguuaacgcucugaucaaugaccaacucauuaugaagaaccaucugcgcgacaucauguguaucccuuauugcaauuacagcaaguauugguaccugaaccacacgauuaccggcaaaacaucucuccccaaguguuggcuggugagcaauggguccuaccuuaacgaaacccacuucucugaugacaucgagcagcaggccgauaauaugauuacagaaaugcugcaaaaagaguauauggagagacagggaaagaccccucucggccuggucgaccuguucguguuuagcacguccuucuaccuuaucagcauuuuucuccggcuggugaaaaucccgacacaccgccauauugucgggaagcccugcccuaaaccccacagacugaaccauaugggaaucuguucuugcggccucuauaagcagccuggcguucccgugcgguggaagcgcuga

SEQ ID NO: 34954 - RNA, 1473 nt, Artificial Sequence
  derived and/or modified CDS sequence (opt5) from LASV(Togo/2016/7082;Clade VI)__AMR44577__GPCmut9
augggccagaucauuaccuucuuucaagaggugccccacgucaucgaagagguuaugaacauugugcugaucgcccucagccugcuugcuauucugaaggggguguacaaugucgccacaugcggaaucaucggccucgugacguuccuguuucuuugugggagauccugcucucugauuuauaaaggaagcuacgaacuccagacccuggagcugaacauggaaacacucaauaugaccaugccucuguccuguacaaagaacucuagccaucacuauauccggguuggcaaugagaccgggcuugagcugacacucaccaacacguccauuaucaaucauaaauucugcaaccugucugacgcgcacaagcgcaaucuuuacgaucaugcucugaugagcauucucuccaccuuucaccugagcaucccgaacuucaaucaguaugaagccaugucuugugacuuuaacggaggcaaaauuuccgugcaguacaaucugagccacgccuaugcugucgaugccgcugagcauugcggcacaguggccaacgggguucuccaaaccuucaugagaauggcguggggaggcucuuacaucgcccuggacuccggguguggaaauugggauugcaucaugacaagcuaccaguaucuuauuauccagaacaccacgugggaagaccacugucaguuuucucggcccuccccuauuggcuaccuggggcuccugagccaacgcacaagagauaucuauauuucccggcgccuucugggaaccuucacauggacccucucugacagcgagggcaacgagacccccggcggguacugccugacaagauggaugcugaucgaagcugagcucaaguguuuuggaaauacggccguggcuaagugcaacgaaaaacaugaugaggaguucugcgacaugcugcggcuuuuugauuucaauaagcaggccauccagcgccugaaauccgaagcgcagaugagcauucaacucaucaacaaggccgucaaugcucugauuaacgaccagcuuaucaugaaaaaucaccugagagauaugauguguauuccuuauugcaacuacucuaaguauugguaccucaaucacaccuccagcggccggacaucucugcccaaguguuggcuggugagcaacggguccuaccucaaugagacccauuucucugacgacaucgaacagcaagccgauaacaugaucacagagaugcugcagaaagaauauauugaccgccagggaaagaccccucuuggccugguggaucucuuugucuucagcacguccuuuuaccugaucagcauuuuccugcaccuuaucaaaauuccgacacauagacacaucguugggaagcccugcccuaaaccccaucggcucaaucacaugggaauuuguucuugcggccuguauaagcagccuggcgugcccacccgcuggaaaagauga

SEQ ID NO: 34955 - RNA, 1473 nt, Artificial Sequence
  derived and/or modified CDS sequence (opt5) from LASV(KAK-428;Clade n.d. (VII))__ANH09740__GPCmut9
augggccagaucgugaccuucuuucaagaggucccccacguuauugaagaggugaugaacaucgugcugauugcccucagccugcuugcuauccugaaggggcucuacaauuucgccacaugcggagucauuggccugaucacguuucuucugcucugugggagauccugcucugcgaccuauaaaggacaguacgaacugcagacacuggagcucaacauggaaagccugaauaugaccaugccucuuuccuguacaaagaacaauucucaucacuauauccgggcuggcaacaauaccgggcuggagcucacacugaccaacacgagcauuaucucccauaaauucugcaaucuuucugacgcccacaagaaaaaccuguacgaucauacccucaugagcauuaucacaaccuuucaccuguccauuccgaauuucaaccaguaugaggccaugagcugugacuuuaauggaggcaagaucucuauucaauacaaccugucccacagcuaugcuggcgaugccgcucagcauugcgggacaguggccaauggaguucuccagaccuucaugcgcauggcguggggcgggucuuaccuggcccuugacuccggauguagaggcugggauugcaucaucagcucuuaccaguaucugauuauccaaaacacgacaugggacgaucacugucaguuuucccggcccagcccuauuggguaccucggauucgugucccagaagacccgcgacaucuauauuucuagacggcugcuuggcacauuuaccuggacccugagcgauuccgaaggccaugacaugcccgggggauacugccucacacgcuggaugcugaucgaggcugaucugaaauguuucggcaacacggccgucgcuaagugcaaugaaaaacacgacgaggaguuuugcgauauguggagacucuucgacuucaacaagcaggccauccaacggcugaaagcggaagcccagaugaauauucagcuuaucaacaaggcugugaaugcccugauuaacgaccaacucaugaugaagaaucaucugcgcgauaucauguguauuccuuauugcaacuacagcaaauuuugguaucuuaauaacaccacaaccgggagaacaucucugccccgguguuggcucaucuccaauggaagcuaccugaacgagacccacuucucugacgauaucgaacagcaggcugacaauaugauuacggagaugcugcagaaggaauacauggaucgccaaggcaaaacaccucucgggcugguugaccuuuuuguguucagcaccuccuuuuaucugaucaccauuuuccuccaccuggucaagaucccgacacauagacacauugugggaaaacccugcccuaagccccaucggcugaaccacaugggcaucuguucuugcggccuuuacaaacagccuggggugcccguccgcuggaagagauga

SEQ ID NO: 34956 - RNA, 1473 nt, Artificial Sequence; identical to SEQ ID NO: 34950
  derived and/or modified CDS sequence (opt5) from LASV(Pinneo-NIG-1969;Clade I)__AIT17836__GPCmut9

SEQ ID NO: 34957 - RNA, 1473 nt, Artificial Sequence
  derived and/or modified CDS sequence (opt5) from LASV(ISTH0009-NIG-2011;Clade II)__AIT17404__GPCmut9
augggccagaucauuaccuucuuucaagaggugccccacgucaucgaagagguuaugaacauugugcugaucgcccucagccugcuugcuauucugaaggggaucuacaauguggccacaugcggacucuucggccuggucuccuuucuucugcucugugggagaucuugcagcacgaccuauaaaggaguguacgaacugcagacacuggagcucgacauggcgucccugaacaugaccaugccucuuucuuguacaaagaauaacagccaucacuauaucaugguuggcaaugaaaccgggcuggagcucacacugaccaacacguccauuaucaaucauaaauucugcaaccuuucugaugcucacaagaaaaaucuguacgaccaugcccucaugagcauuaucuccaccuuucaccugagcauuccgaacuucaaucaguaugaggccaugucuugugauuuuaacggaggcaagaucuccgugcaguacaaucugagccacgcuuaugccgucgacgcugccaaccauugcggcacaauugcgaauggggugcuccaaaccuucaugcggauggccuggggaggcucuuacaucgcucuggauuccggguguggaagcugggacugcaucaugacaucuuaccaguaucuuauuauccagaacaccacgugggaagaucacugucaguuuucccgccccagcccuauuggcuaccuggggcuccugucccaaagaacacgggacaucuauauuucucgcagacuucugggaaccuucacauggacccucagcgauuccgagggcaacgaaacccccggcggguacugccugacacgguggaugcugaucgaggccgagcucaaguguuuuggaaauacggcuguugccaaaugcaacgaaaagcaugacgaggaguucugcgauaugcugcgccuuuuugacuucaauaaacaggcgaucagacggcugaagaccgaagcccagaugagcauucagcucaucaacaaagcugugaaugcccugauuaacgaucaacuuaucaugaagaaucaucugcgcgacauuauguguaucccuuauugcaacuacucuaaguauugguaccucaaucacacagucaccggcaaaacaucccugcccagauguuggcuggugagcaacgggucuuaccucaaugaaacccacuucagcgacgauaucgagcagcaggcugacaacaugauuacggagcugcuucaaaaggaauauauggaucggcagggaaaaacaccucugggccucguggaccuguuugucuucuccaccucuuuuuaccugaucagcauuuuccuucaccucaucaagauuccgacccaucgccacaucacagggaaacccugcccuaagccccauagacugaaucacaugggaauuuguuccugcggccuguauaaacacccuggcguucccgugaaguggaagcgguga

SEQ ID NO: 34958 - RNA, 1473 nt, Artificial Sequence
  derived and/or modified CDS sequence (opt5) from LASV(ISTH2010-NIG-2012;Clade II)__AIT17482__GPCmut9
augggccagaucauuaccuucuuucaagaggugccccacgucaucgaagagguuaugaacauugugcugaucgcccucagccugcuugcuauucugaaggggaucuacaauguggccacaugcggacucuucggccuggucuccuuucuucugcucugugggagaucuugcagcacgaccuauaaaggaguguacgaacugcagacacuggagcucgacauggcgucccugaacaugaccaugccucuuucuuguacaaagaauaacagccaucacuauaucaugguuggcaaugaaaccgggcuggagcucacacugaccaacacguccauuaucaaucauaaauucugcaaccuuucugaugcucacaagaaaaaucuguacgaccaugcccucaugagcauuaucuccaccuuucaccugagcauuccgaacuucaaucaguaugaggccaugucuugugauuuuaacggaggcaagaucuccgugcaguacaaucugagccacgcuuaugccgucgacgcugccaaccauugcggcacaauugcgaauggggugcuccaaaccuucaugcggauggccuggggaggcucuuacaucgcucuggauuccggguguggaagcugggacugcaucaugacaucuuaccaguaucuuauuauccagaacauuaccugggaagaucacugucaguuuucccgccccagcccuaucggcuaccuggggcuccugucccaaagaacgcgggacauuuauaucucucgcagacuucugggaacauucaccuggacacucagcgauuccgagggcaacgaaacccccggcggguacugccugacccgguggaugcugaucgaggccgagcucaaguguuuuggaaauacagcuguugccaaaugcaacgaaaagcaugacgaggaguucugcgauaugcugcgccuuuuugacuucaauaaacaggcgauuagacggcugaagacggaagcccagaugagcauccagcucauuaacaaagcugugaaugcccugaucaacgaucaacuuauuaugaagaaucaucugcgcgacaucauguguaucccuuauugcaacuacucuaaguauugguaccucaaucacaccgucacaggcaaaaccucccugcccagauguuggcuggugagcaacgggucuuaccucaaugaaacacacuucagcgacgauauugagcagcaggcugacaacaugaucaccgagcugcuucaaaaggaauauauugaucggcagggaaaaacgccucugggccucguggaccuguuugucuucuccacaucuuuuuaccugaucagcauuuuccuucaccucguuaagaucccgacccaucgccacgugguggggaaacccugcccuaagccccauagacugaaucacaugggaauuuguuccugcggccuguauaaacacccuggcguccccgugaaguggaagcgguga

SEQ ID NO: 34959 - RNA, 1473 nt, Artificial Sequence
  derived and/or modified CDS sequence (opt5) from LASV(Lassa virus/H.sapiens-wt/NGA/2015/ISTH_0543;Clade II)__AVO03639__GPCmut9
augggccagaucauuaccuucuuucaagaggugccccacgucaucgaagagguuaugaacauugugcugaucgcccucagccugcuugcuauucugaaggggaucuacaauguggccacaugcggacucuucggccuggucuccuuucuucugcucugugggagaucuugcagcacgaccuauaaaggaguguacgaacugcagacacuggagcucgacauggcgaaccugaauaugaccaugccucuuuccuguacaaagaacaauucucaucacuauaucaugguuggcaacgaaaccgggcuggagcucacacugaccaauacgagcauuaucaaccauaaauucugcaaucuuuccgaugcucacaagaaaaaccuguacgaccaugcccucaugucuauuaucagcaccuuucaccuguccauuccgaauuucaaccaguaugaggccaugagcugugauuuuaauggaggcaagaucucugugcaguacaaccugucccacacauaugcugucgacgccgcuaaucauugcggcaccauugccaacggggugcuccaaacauucaugcggauggcguggggaggcagcuacaucgcccuggauucuggguguggauccugggacugcaucaugaccagcuaccaguaucuuguuauucagaacacgacaugggaagaucacugucaguuuucucgccccuccccuaucggcuaccuggggcuccugagccaaagaacccgggacauuuauaucucccgcagacuucugggaacauucaccuggacccucucugauagcgagggcaaugaaacacccggcggguacugccugacgcgguggaugcugauugaggcugagcucaaguguuuuggaaacaccgccguggcuaaaugcaaugaaaagcaugacgaggaguucugcgauaugcugcgccuuuuugacuucaacaaacaggccaucagacggcugaagacagaagcgcagauguccauccagcucauuaauaaagccgucaacgcucugaucaaugaucaacuuauuaugaagaaccaucugcgcgacaucauguguauuccuuauugcaauuacagcaaguauugguaccucaaccacaccgugacaggcaaaaccucucugcccagauguuggcugguguccaaugggagcuaccucaacgaaacgcacuucucugacgauaucgagcagcaggccgacaauaugaucacagagcugcuucaaaaggaauauauugaucggcagggaaaaaccccucugggccucgucgaccuguuuguuuucagcaccuccuuuuaccugaucucuauuuuccuucaccucgugaagaucccgacacaucgccacauuaccgggaaacccugcccuaagccccauagacugaaccacaugggaaucuguagcugcggccuguauaaacacccuggcgugcccgucaaguggaagcgguga

SEQ ID NO: 34960 - RNA, 1473 nt, Artificial Sequence
  derived and/or modified CDS sequence (opt5) from LASV(Lassa virus/H.sapiens-wt/NGA/2016/ISTH_0009;Clade II)__AVO03571__GPCmut9
augggccagaucauuaccuucuuucaagaggugccccacgucaucgaagagguuaugaacauugugcugaucgcccucagccugcuugcuauucugaaggggaucuacaauguggccacaugcggacuccugggccuugucuccuuccugcuccugugugggagaucuugcagcacgaccuauaaaggaguguacgaacugcagacacucgagcuggacauggcgucccuuaacaugaccaugccucugucuuguacaaagaauaacagccaucacuauaucaugguuggcaaugaaaccgggcucgagcugacacuuaccaacacguccauuaucaaucauaaauuuugcaaccugucugaugcucacaagaaaaaucucuacgaccaugcccugaugagcauuaucuccaccuuccaccugagcauuccgaacuuuaaucaguaugaggccaugucuugugauuucaacggaggccggaucuccgugcaguacaaucucagccacucuuaugcugucgacgccgcuaaccauugcggcacaauugccaauggggugcugcaaaccuuuaugcgcauggcguggggaggcuccuacaucgcccuugauagcggguguggaucuugggacugcaucaugacauccuaccaguaucugauuauccagaacaccacgugggaagaucacugucaguucagcagacccuccccuauuggcuaccucgggcugcuuucucaacggacacgcgacaucuauauuagcagacggcugcucggaaccuuuacauggacccuguccgauagcgagggcaacgaaacccccggcggguacugccugacacgcuggaugcucaucgaggcugagcugaaguguuucggaaauacggccguugcuaagugcaacgaaaaacaugacgaggaauuuugcgauaugcuuagacuguucgacuuuaauaagcaggccauccggcgccucaaaaccgaggcgcagaugucuauucagcugaucaacaaggccgugaaugcucuuauuaacgaucaacugaucaugaaaaaucaccucagagacauuauguguaucccuuauugcaacuacuccaaguauugguaccugaaucacacagucaccggcaagacaagccugccccgguguuggcucgugucuaacgggagcuaccugaaugaaacccauuucuccgacgauaucgagcagcaggccgacaacaugauuacggagcuucugcaaaaagaauauaucgaucgccagggaaagacaccucucggccugguggaccuguucgucuuuucuaccagcuucuaccuuauuuccaucuuucuccaccugguuaaaauuccgacccauagacacaucacagggaagcccugcccuaaaccccaucggcugaaucacaugggaauuuguagcugcggccucuauaaccacccuggcgugcccgugaaguggaaacgcuga

SEQ ID NO: 34961 - RNA, 1473 nt, Artificial Sequence
  derived and/or modified CDS sequence (opt5) from LASV(Lassa virus/H.sapiens-wt/NGA/2016/ISTH_0017;Clade II)__AVO03567__GPCmut9
augggccagaucauuaccuucuuucaagaggugccccacgucaucgaagagguuaugaacauugugcugaucgcccucagccugcuugcuauucugaaggggaucuacaauguggccacaugcggacucuucggccuggucuccuuucuucugcucugugggagaucuugcagcacgaccuauaaaggaguguacgaacugcagacacuggagcucgacauggcgucccugaacaugaccaugccucuuucuuguacaaagaauaacagccaucacuauaucaugguuggcaaugaaaccgggcuggagcucacacugaccaacacguccauuaucaaucauaaauucugcaaccuuucugaugcucacaagaaaaaucuguacgaccaugcccucaugagcauuaucuccaccuuucaccugagcauuccgaacuucaaucaguaugaggccaugucuugugauuuuaacggaggcaagaucuccgugcaguacaaucugagccacacauaugcuauugacgccgcuaaccauugcggcaccaucgccaaugggguccuccaaacauucaugcggauggcguggggaggcucuuacaucgcccuggauuccggguguggaagcugggacugcauuaugaccucuuaccaguaucuuaucauucagaacacgacaugggaagaucacugucaguuuucccgccccagcccuaucggcuaccuggggcuccugucccaaagaacccgggacauuuauaucucucgcagacuucugggaacauucaccuggacccucagcgauuccgagggcaacgaaacacccggcggguacugccugacgcgguggaugcugaucgaggcugagcucaaguguuuuggaaauaccgccguggcuaaaugcaacgaaaagcaugacgaggaguucugcgauaugcugcgccuuuuugacuucaauaaacaggccauuagacggcugaagacagaagcgcagaugagcauccagcucauuaacaaagccguuaaugcucugaucaacgaucaacuuauuaugaagaaucaucugcgcgacaucauguguaucccuuauugcaacuacucuaaguauugguaccucaaucacaccgugacaggcaaaaccucccugcccagauguuggcuggucagcaacgggucuuaccucaaugaaacgcacuucagcgacgauauugagcagcaggccgacaacaugaucacagagcugcuucaaaaggaauauauggaucggcagggaaaaaccccucugggccucguggaccuguuuguguucuccaccucuuuuuaccugauuagcaucuuccuucaccucguccgcauuccgacacauagacacguuaucgggaagcccugcccuaaaccccaucggcugaaucacaugggaauuuguuccugcggccuguauaagcacccuggcgugcccgugaaauggaagcgcuga

SEQ ID NO: 34962 - RNA, 1473 nt, Artificial Sequence
  derived and/or modified CDS sequence (opt5) from LASV(Lassa virus/H.sapiens-wt/NGA/2018/ISTH_0959;Clade II)__AVV65099__GPCmut9
augggccagaucauuaccuucuuucaagaggugccccacgucaucgaagagguuaugaacauugugcugaucgcccucagccugcuugcuauucugaaggggaucuacaauguggucacaugcggacucuucggccugguguccuuucuucugcucugugggagaucuugcagcacgaccuauaaaggaguuuacgaacugcagacacuggagcucgacauggccucccugaacaugaccaugccucuuucuuguacaaagaauaacagccaucacuauaucauggugggcaaugaaaccgggcuggagcucacacugaccaacacguccauuaucaaucauaaauucugcaaccuuucugaugcgcacaagaaaaaucuguacgaccaugcucucaugagcauuaucuccaccuuucaccugagcauuccgaacuucaaucaguaugaggccaugucuugugauuuuaacggaggcaagaucuccguccaguacaaucugagccacgccuaugcuauugacgccgcuaaccauugcggcacaaucgccaauggggugcuccaaaccuucaugcggauggcguggggaggcucuuacaucgcccuggauuccggguguggaagcugggacugcauuaugacaucuuaccaguaucuuaucauucagaacaccacgugggaagaucacugucaguuuucccgccccagcccuaucggcuaccuggggcuccugucccaaagaacacgggacauuuauaucucucgcagacuucugggaaccuucacauggacccucagcgauuccgagggcaacgaaacccccggcggguacugccugacacgguggaugcugaucgaggcugagcucaaguguuuuggaaauacggccguugcuaaaugcaacgaaaagcaugacgaggaguucugcgauaugcugcgccuuuuugacuucaauaaacaggccauuagacggcugaagaccgaagcgcagaugagcauccagcucauuaacaaagccgugaaugcucugaucaacgaucaacuuauuaugaagaaucaucugcgcgacaucauguguaucccuuauugcaacuacucuaaguauugguaccucaaucacacagucaccggcaaaacaucccugcccagauguuggcuggugagcaacgggucuuaccucaaugaaacccacuucagcgacgauauugagcagcaggccgacaacaugaucacggagcugcuucaaaaggaauauauugaucggcagggaaaaacaccucugggccucguggaccuguuugucuucuccaccucuuuuuaccugaucagcauuuuccuucaccucguuaagaucccgacccaucgccacgugauugggaaacccugcccuaagccccauagacugaaucacaugggaaucuguuccugcggccuguauaaacacccuggcgugcccgucaaguggaagcgguga

SEQ ID NO: 34963 - RNA, 1473 nt, Artificial Sequence
  derived and/or modified CDS sequence (opt5) from LASV(LASV003-NIG-2008;Clade II)__AIT17580__GPCmut9
augggccagaucauuaccuucuuucaagaggugccccacgucaucgaagagguuaugaacauugugcugaucgcccucagccugcuugcuauucugaaggggaucuacaauguggccacaugcggacucuucggccuggucuccuuucuucugcucugugggagaucuugcagcacgaccuauaaaggaguguacgaacugcagacacuggagcucgacauggcgucccugaacaugaccaugccucuuucuuguacaaagaauaacagccaucacuauaucaugguuggcaaugaaaccgggcuggagcucacacugaccaacacguccauuaucaaucauaaauucugcaaccuuucugaugcucacaagaaaaaucuguacgaccaugcccucaugagcauuaucuccaccuuucaccugagcauuccgaacuucaaucaguaugaggccaugucuugugauuuuaacggaggcaagaucuccgugcaguacaaucugagccacacauaugcugucgacgccgcuaaccauugcggcaccauugccaauggggugcuccaaacauucaugcggauggcguggggaggcucuuacaucgcccuggauuccggguguggaagcugggacugcaucaugaccucuuaccaguaucuuauuauccagaacacgacaugggaagaucacugucaguuuucccgccccagcccuauuggcuaccuggggcuccugucccaaagaacccgggacaucuauauuucucgcagacuucugggaacauucaccuggacccucagcgauuccgagagcaacgaaacacccggcggcuacugccugacgcgguggaugcugaucgaggcugagcucaaguguuuugggaauaccgccguugcuaaaugcaacgaaaagcaugacgaggaguucugcgauaugcugcgccuuuuugacuucaauaaacaggccaucagacggcugaaggcggaagcccagaugucuauucagcucaucaacaaagcugugaaugcccugauuaacgaucaacuuaucaugaagaaucaucugcgcgacauuauguguaucccuuauugcaacuacuccaaguauugguaccucaaucacacagucaccggaagaacaagccugccccgguguuggcuggugucuaacggcagcuaccucaaugaaacccacuucuccgacgauaucgagcagcaggcugacaacaugauuacggagcugcuucaaaaagaauauauggaucgccaggggaagacaccucugggacucguggaccuguuugucuucucuaccagcuuuuaccugaucuccauuuuccuucaccucguuaaaaucccgacccauagacacgugauuggcaagcccugcccuaaaccccaucggcugaaucacauggggaucuguagcugcggacuguauaagcacccuggcgugcccgucaaauggaagcgcuga

SEQ ID NO: 34964 - RNA, 1473 nt, Artificial Sequence
  derived and/or modified CDS sequence (opt5) from LASV(LASV035-NIG-2009;Clade II)__AIT17588__GPCmut9
augggccagaucauuaccuucuuucaagaggugccccacgucaucgaagagguuaugaacauugugcugaucgcccucagccugcuugcuauucugaaggggaucuacaauguggccacaugcggacucuucggccuggucuccuuucuucugcucugugggagaucuugcagcacgaccuauaaaggaguguacgaacugcagacacuggagcucgacauggcgucccugaacaugaccaugccucuuucuuguacaaagaauaacagccaucacuauaucaugguuggcaaugaaaccgggcuggagcucacacugaccaacacguccauuaucaaucauaaauucugcaaccuuucugaugcucacaagaaaaaucuguacgaccaugcccucaugagcauuaucuccaccuuucaccugagcauuccgaacuucaaucaguaugaggccaugucuugugauuuuaacggaggcaagaucuccgugcaguacaaucugagccacgcuuaugccgucgacgcugccaaccauugcggcacaauugcgaauggggugcuccaaaccuucaugcggauggccuggggaggcucuuacaucgcucuggauuccggguguggaagcugggacugcaucaugacaucuuaccaguaucuuauuauccagaacaccacgugggaagaucacugucaguuuucccgccccagcccuauuggcuaccuggggcuccugucccaaagaacacgggacaucuauauuucucgcagacuucugggaaccuucacauggacccucagcgauuccgagggcaacgaaacccccggcggguacugccugacacgguggaugcugaucgaggccgagcucaaguguuuuggaaauacggcuguugccaaaugcaacgaaaagcaugacgaggaguucugcgauaugcugcgccuuuuugacuucaauaaacaggcgaucagacggcugaaggccgaagcucagaugagcauucagcucaucaacaaagccgugaaugcucugauuaacgaucaacuuaucaugaagaaucaucugcgcgacauuauguguaucccuuauugcaacuacucuaaguauugguaccucaaucacaccgucacaggcaaaaccucccugcccagauguuggcuggugagcaacgggucuuaccucaaugaaacacacuucagcgacgauaucgagcagcaggccgacaacaugauuaccgagcugcuucaaaaggaauauaucgaucggcagggaaaaacgccucugggccucguggaccuguuugucuucuccacaucuuuuuaccugauuagcaucuuccuucaccucguuaagauuccgacccaucgccacgugaucgggaaacccugcccuaagccccauagacugaaucacaugggaauuuguuccugcggccuguauaaacacccuggcgugcccgucaaguggaagcgguga

SEQ ID NO: 34965 - RNA, 1473 nt, Artificial Sequence
  derived and/or modified CDS sequence (opt5) from LASV(LASV1000-NIG-2009;Clade II)__AIT17782__GPCmut9
augggccagaucauuaccuucuuucaagaggugccccacgucaucgaagagguuaugaacauugugcugaucgcccucagccugcuugcuauucugaaggggaucuacaauguggccacaugcggacucuucggccuggucuccuuucuucugcucugugggagaucuugcagcacgaccuauaaaggaguguacgaacugcagacacuggagcucgacauggcgucccugaacaugaccaugccucuuucuuguacaaagaauaacagccaucacuauaucaugguuggcaaugaaaccgggcuggagcucacacugaccaacacguccauuaucaaucauaaauucugcaaccuuucugaugcucacaagaaaaaucuguacgaccaugcccucaugagcauuaucuccaccuuucaccugagcauuccgaacuucaaucaguaugaggccaugucuugugauuuuaacggaggcaagaucuccgugcaguacaaucugagccacacauaugcugucgacgccgcuaaccauugcggcaccauugccaauggggugcuccaaacauucaugcggauggcguggggaggcucuuacaucgcccuggauuccggguguggaagcugggacugcaucaugaccucuuaccaguaucuuauuauccagaacacgacaugggaagaucacugucaguuuucccgccccagcccuauuggcuaccuggggcuccugucccaaagaacccgggacaucuauauuucucgcagacuucugggaacauucaccuggacccucagcgauuccgagggcaacgaaacacccggcggguacugccugacgcgguggaugcugaucgaggcugagcucaaguguuuuggaaauaccgccguugcuaaaugcaacgaaaagcaugacgaggaguucugcgauaugcugcgccuuuuugacuucaauaaacaggccaucaagagacugaaaacagaagcgcagaugagcauucagcucaucaacaaggccgugaaugcucugauuaacgaucaacuuaucaugaagaaucaucugcgggacauuauguguaucccuuauugcaacuacucuaaauauugguaccucaaucacaccgucacaggcaagaccucccugccccgcuguuggcuggugagcaacgggucuuaccucaaugaaacgcacuucagcgacgauaucgagcagcaggccgacaacaugauuacagagcugcuucaaaaagaauauaucgauagacagggaaagaccccucugggccucguggaccuguuugucuucuccaccucuuuuuaccugauuagcaucuuccuucaccucguuaaaauuccgacacaucggcacgugguggggaagcccugcccuaaaccccaucgccugaaucacaugggaaucuguuccugcggccuguauaagcacccuggcguccccgugaaguggaaaagauga

SEQ ID NO: 34966 - RNA, 1473 nt, Artificial Sequence
  derived and/or modified CDS sequence (opt5) from LASV(LASV221-NIG-2010;Clade II)__AIT17624__GPCmut9
augggccagaucauuaccuucuuucaagaggugccccacgucaucgaagagguuaugaacauugugcugaucgcccucagccugcuugcuauucugaaggggaucuacaauguggccacaugcggacucuucggccuggucuccuuucuucugcucugugggagaucuugcagcacgaccuauaaaggaguguacgaacugcagacacuggagcucgacauggcgucccugaacaugaccaugccucuuucuuguacaaagaauaacagccaucacuauaucaugguuggcaaugaaaccgggcuggagcucacacugaccaacacguccauuaucaaucauaaauucugcaaccuuucugaugcucacaagaaaaaucuguacgaccaugcccucaugagcauuaucuccaccuuucaccugagcauuccgaacuucaaucaguaugaggccaugucuugugauuuuaacggaggcaagaucuccgugcaguacaaucugagccacacauaugcuauugacgccgcuaaccauugcggcaccaucgccaaugggguccuccaaacauucaugcggauggcguggggaggcucuuacaucgcccuggauuccggguguggaagcugggacugcauuaugaccucuuaccaguaucuuaucauucagaacacgacaugggaagaucacugucaguuuucccgccccagcccuaucggcuaccuggggcuccugucccaaagaacccgggacauuuauaucucucgcagacuucugggaacauucaccuggacccucagcgauuccgagggcaacgaaacacccggcggguacugccugacgcgguggaugcugaucgaggcugagcucaaguguuuuggaaauaccgccguggcuaaaugcaacgaaaagcaugacgaggaguucugcgauaugcugcgccuuuuugacuucaauaaacaggccauuagacggcugaagacagaagcgcagaugagcauccagcucauuaacaaagccguuaaugcucugaucaacgaucaacuuauuaugaagaaucaucugcgcgacaucauguguaucccuuauugcaacuacucuaaguauugguaccucaaucacaccgugacaggcaaaaccucccugcccagauguuggcuggucagcaacgggucuuaccucaaugaaacgcacuucagcgacgauauugagcagcaggccgacaacaugaucacagagaugcugcaaaaggaauauauggaucggcagggaaaaaccccucuuggccugguggaccucuuuguguucuccaccucuuuuuaccugauuagcaucuuccugcaccuugucaagauuccgacacaucgccacguuaucgggaaacccugcccuaagccccauagacucaaucacaugggaauuuguuccugcggccuguauaaacacccuggcgugcccgugaaguggaagcgguga

SEQ ID NO: 34967 - RNA, 1473 nt, Artificial Sequence
  derived and/or modified CDS sequence (opt5) from LASV(LASV237-NIG-2010;Clade II)__AIT17638__GPCmut9
augggccagaucauuaccuucuuucaagaggugccccacgucaucgaagagguuaugaacauugugcugaucgcccucagccugcuugcuauucugaaggggaucuacaauguggccacaugcggacucuucggccuggucuccuuucuucugcucugugggagaucuugcagcacgaccuauaaaggaguguacgaacugcagacacuggagcucgacauggcgucccugaacaugaccaugccucuuucuuguacaaagaauaacagccaucacuauaucaugguuggcaaugaaaccgggcuggagcucacacugaccaacacguccauuaucaaucauaaauucugcaaccuuucugaugcucacaagaaagaccuguacgaucaugcccucaugagcauuaucuccaccuuucaccugagcauuccgaauuucaaccaguaugaggccaugucuugugacuuuaauggaggcaagaucuccgugcaguacaaccugagccacacauaugcugucgaugccgcuaaucauugcggcaccauugccaacggggugcuccaaacauucaugcggauggcguggggaggcucuuacaucgcccuggacuccggguguggaagcugggauugcaucaugaccucuuaccaguaucuuauuauccagaauacgacaugggaagaccacugucaguuuucccgccccagcccuauuggcuaccuggggcuccugucccaaagaacccgggauaucuauauuucucgcagacuucugggaacauucaccuggacccucagcgacuccgagggcaacgaaacacccggcggguacugccugacgcgguggaugcugaucgaggcugagcucaaguguuuuggaaacaccgccguugcuaaaugcaaugaaaagcaugaugaggaguucugcgacaugcugcgccuuuuugauuucaacaaacaggccaucagacggcugaagacagaagcgcagaugagcauucagcucaucaauaaagccgugaacgcucugauuaaugaccaacuuaucaugaagaaccaucugcgcgacauuauguguaucccuuauugcaauuacucuaaguauugguaccucaaccacaccgucacaggcaaaaccucccugcccagauguuggcuggugagcaaugggucuuaccucaacgaaacgcacuucagcgaugacaucgagcagcaggccgauaauaugauuacagagcugcuucaaaaggaauauauggaccggcagggaaaaaccccucugggccucguggaucuguuugucuucuccaccucuuuuuaccugaucagcauuuuccuucaccucaucaagauuccgacacaucgccacaucaccgggaaacccugcccuaagccccauagacugaaccacaugggaauuuguuccugcggccuguauaaacacccuggcguucccgugaaguggaagcgguga

SEQ ID NO: 34968 - RNA, 1473 nt, Artificial Sequence
  derived and/or modified CDS sequence (opt5) from LASV(LASV253-NIG-2011;Clade II)__AIT17670__GPCmut9
augggccagaucauuaccuucuuucaagaggugccccacgucaucgaagagguuaugaacauugugcugaucgcccucagccugcuugcuauucugaaggggaucuacaauguggccacaugcggacucuucggccuggucuccuuucuucugcucugugggagaucuugcagcacgaccuauaaaggaguguacgaacugcagacacuggagcucgacauggcgucccugaacaugaccaugccucuuucuuguacaaagaauaacagccaucacuauaucaugguuggcaaugaaaccgggcuggagcucacacugaccaacacguccauuaucaaucauaaauucugcaaccuuucugaugcucacaagaaaaaucuguacgaccaugcccucaugagcauuaucuccaccuuucaccugagcauuccgaacuucaaucaguaugaggccaugucuugugauuuuaacggaggcaagaucuccgugcaguacaaucugagccacacauaugcugucgacgccgcuaaccauugcggcaccauugccaauggggugcuccaaacauucaugcggauggcguggggaggcucuuacaucgcccuggauuccggguguggaagcugggacugcaucaugaccucuuaccaguaucuuauuauccagaacacgacaugggaagaucacugucaguuuucccgccccagcccuauuggcuaccuggggcuccugucccaaagaacccgggacaucuauauuucucgcagacuucugggaacauucaccuggacccucagcgauuccgagggcaacgaaacacccggcggguacugccugacgcgguggaugcugaucgaggcugagcucaaguguuuuggaaauaccgccguugcuaaaugcaacgaaaagcaugacgaggaguucugcgauaugcugcgccuuuuugacuucaauaaacaggccaucagacggcugaaggcggaagcccagaugagcauucagcucaucaacaaagcugugaaugcccugauuaacgaucaacuuaucaugaagaaucaucugcgcgacauuauguguaucccuuauugcaacuacucuaaguauugguaccucaaucacacagucaccggcagaacaucccugccccgguguuggcuggugagcaacgggucuuaccucaaugaaacccacuucagcgacgauaucgagcagcaggcugacaacaugauuacggagcugcuucaaaaagaauauaucgaucgccagggaaagacaccucugggccucguggaccuguuugucuucuccaccucuuuuuaccugauuagcaucuuccuucaccucguuaaaauuccgacccauagacacaucauugggaagcccugcccuaaaccccaucggcugaaucacaugggaaucuguuccugcggccuguauaagcacccuggcgugcccgugaaauggaagcgcuga

SEQ ID NO: 34969 - RNA, 1473 nt, Artificial Sequence
  derived and/or modified CDS sequence (opt5) from LASV(LASV254-NIG-2011;Clade II)__AIT17674__GPCmut9
augggccagaucauuaccuucuuucaagaggugccccacgucaucgaagagguuaugaacauugugcugaucgcccucagccugcuugcuauucugaaggggaucuacaauguggccacaugcggacucuucggccuggucuccuuucuucugcucugugggagaucuugcagcacgaccuauaaaggaguguacgaacugcagacacuggagcucgacaugaccaaccugaauaugacaaugccucuuuccuguaccaagaacaauucucaucacuauaucaugguuggcaacgaaacagggcuggagcucacccugacgaauaccagcauuaucaaccauaaauucugcaaucuuuccgaugcgcacaagaaaaaccuguacaaucaugcucucaugucuauuaucagcacauuucaccuguccauuccgaacuucaaucaguaugaggccaugagcugugacuuuaacggaggcaagaucucugugcaguacaaucugucccacagcuaugccgucgaugcugccaaccauugcggcaccauugcuaacggggugcuccaaacauucaugcggauggccuggggaggcucuuacaucgcgcuggacuccggguguggaaauugggauugcaucaugaccagcuaccaguaucuuauuauccagaacacgacaugggaagaccacugucaguuuucucgccccuccccuauuggcuaccuggggcuccugagccaaagaacccgggauaucuauauuucccgcagacuucugggaacauucaccuggacccucucugacagcgagggcaaugaaacacccggcggguacugccugacgcgguggaugcugaucgaggccgagcucaaguguuuuggaaacaccgcuguugccaaaugcaaugaaaagcaugaugaggaguucugcgacaugcugcgccuuuuugauuucaacaaacaggcuaucagacggcugaagacagaagcccaggcgaauauucagcucaucaacaaagccgugaaugcucugauuaacgaccaacuuaucaugaagaaucaucugcgcgauauuauguguaucccuuauugcaacuacuccaaguauugguaccucaaucacaccgucacaggcaaaaccagccugcccagauguuggcuggugucuaacggguccuaccucaaugaaacgcacuucagcgacgacaucgagcagcaggccgauaacaugauuacagagcugcuucaaaaggaauauauggaccggcagggaaaaaccccucugggccucguggaucuguuugucuucucuaccagcuuuuaccugaucuccauuuuccuucaccucguuaagaucccgacacaucgccacgugauugggaaacccugcccuaagccccauagacugaaccacaugggaaucuguucuugcggccuguauaaacacccuggcgugcccgucaaguggaagcgguga

SEQ ID NO: 34970 - RNA, 1473 nt, Artificial Sequence
  derived and/or modified CDS sequence (opt5) from LASV(Nig08-A19;Clade III)__ADU56618__GPCmut9
augggccagaucgugaccuucuuucaagaggucccccacguuauugaagaggugaugaacaucgugcugauugcccucagcauccuggcuauucuuaaggggcuguacaauaucgccacaugcggacucaucggccuggucacguuccuucugcucuccgggagaucuuguagcaugaccuauaaaggaguguacgaacugcagacacuggagcucaacaugaauacccugaacaugacaaugccucuuuccugcaccaagaauaacucucaucacuauauuaugguuggcaaugaaacagggcuggagcucacccugacgaacaccagccuucugcaucacaaauuuuguaaucucuccgacgcgcauaagaaaaaccuguacgaucacacacugaugucuaucauuagcaccuuccaccucuccaucccgaauuuuaaccaguaugaggcuaugagcugcgacuucaauggaggcaagauuacagugcaguacaaccugucucauuccuaugccaucgaugccgcuaaucacuguggcaccgucgccaacggggugcuucaaacguuuaugcggauggcuuggggaggcagcuacauugcccuggacucugggugcggaaagugggauuguaucaugacauccuaccaguaucucaucauucagaacaccacaugggaagaccauugccaguucagccgccccucuccuaucggcuaccuggggcuucugucccaaagaacccgggauauuuauaucagccgcagacuccugggaaccuuuacauggacgcuguccgacucugagggcaaugaaacccccggcggguacugucucacacgguggaugcugauugaggcggagcuuaaaugcuucggaaacaccgccguugcuaaguguaaugaaaaacacgaugaggaauuuugcgacaugcugcgccucuucgauuuuaacaagcaggccaucagacggcugaaagcugaggcccagaugagcauccagcuuauuaauaaggcggugaacgcccugaucaaugaccaacucauuaugaagaaccaucugcgcgauaucaugugcauuccuuauuguaauuacuccaaauauugguaccugaaccacacaagcaccggcagaacgucucucccccggugcuggcuggucuccaaugggagcuaccuuaacgaaacacacuucucugacgacaucgagcagcaggcugauaauaugaucaccgagaugcugcaaaaggaauaucucgaccgccagggaaaaaccccucugggccugguggaucuuuucguguuuagcacauccuucuaccucauuucuaucuuucugcaucuggucaagauuccgacccacagacauaucguugggaaacccuguccuaagccccaccggcucaaccacaugggaauuugcagcuguggccuguauaaacagccuggcgugcccgugcgcuggaagagauga

SEQ ID NO: 34971 - RNA, 1476 nt, Artificial Sequence
  derived and/or modified CDS sequence (opt5) from LASV(G1180-SLE-2010;Clade IV)__AIT17168__GPCmut9
augggccagaucgugaccuucuuucaagaggucccccacguuauugaagaggugaugaacaucgugcugauugcccucagcauccuggcuguccuuaaggggcuguacaauuucgccacaugcggacucgugggccugcuuacguuucugcuccugugugggagauccugcaccgcgucucgguauaaaggaguuuacgaacugcagacacucgagcugaacauggaaacccuuaauaugacaaugccucugagcuguaccaagaacaauucccaucacuauauuauggugggcaacgagacagggcucgagcugacccuuacgaauaccucuaucaucaaccauaaauucugcaaucugagcgacgcucacaagaaaaaccucuacgaucaugcccugauguccauuaucucuacauuucaccugagcauuccgaauuucaaccaguaugaagccauguccugugacuuuaauggaggcaagaucagcguccaguacaaccucucucacuccuaugcuggcgaugccgcuaaucauugcgggaccguggccaacggaguucugcaaacauucaugcgcauggcguggggcgggagcuacauugcccuugacucuggauguggcuccugggauugcaucaugaccagcuaccaguaucugauuauccagaacacgacaugggaggaccacugucaguuuucuagacccuccccuaucggguaccucggacugcuuagccaacggacccgcgauauuuauaucuccagacggcugcucggcacauucaccuggacccugucugacagcgaaggcaaggauacacccgggggauacugccugacgcgcuggaugcucauugaggcugagcugaaauguuuuggcaauaccgccguggcuaagugcaacgaaaaacaugacgaggaguucugcgauaugcuuagacuguuugacuucaauaagcaggccauccagcggcucaaagcggaagcccagauguccauucaacugaucaacaaggcugucaaugcccuuaucaacgaucagcugauuaugaagaaucaccuccgcgacaucauguguauuccuuauugcaacuacagcaaauauugguaccugaaucacacaaccacagggaagaccucucugcccaaauguuggcucguguccaacggaagcuaccugaaugaaacgcauuucucugacgauaucgagcagcaagcugacaacaugauuacagagaugcuucagaaggaauauauggagagacagggcaaaaccccucuggggcucguggaucuguuugucuucagcaccuccuuuuaccugaucucuaucuuccuucaccucguuaagauuccgacacaucggcacaucgugggaaaaagcugccccaagccucaucgccugaaucacaugggcauuuguuccugcggccuguauaagcagcccggggugccugucaaauggaagagauga

SEQ ID NO: 34972 - RNA, 1476 nt, Artificial Sequence
  derived and/or modified CDS sequence (opt5) from LASV(G1442-SLE-2011;Clade IV)__AIT17180__GPCmut9
augggccagaucgugaccuucuuucaagaggucccccacguuauugaagaggugaugaacaucgugcugauugcccucagcauccuggcuguccuuaaggggcuguacaauguggccacaugcggacucauuggccugguuacguuccuucugcucugugggagauccugcaccacaacccuguauaaaggaguguacgaacugcagacacucgagcugaacauggaaacccuuaauaugacaaugccucugucuuguaccaagaacaauagccaucacuauauccgggucggcaacgagacggggcucgagcugacccuuacaaauaccuccaucauuaaccauaaauuuugcaaucugucugacgcgcacaagaaaaaccucuacgaucaugcucugaugagcaucauuuccacauuccaccugucuaucccgaauuuuaaccaguaugaagccaugagcugugacuucaauggaggcaagauuuccgugcaguacaaccucagccacucuuaugccggcgaugcugccaaucauugcgggaccguugcuaacggagugcugcaaacguuuaugcgcauggccuggggcggguccuacaucgcgcuugacagcggauguggcaacugggauugcauuaugacaucuuaccaguaucugaucauccagaauaccacaugggacgaucacugucaguucuccagacccagcccuauuggguaccucggacugcuuucucaacggacccgcgacgucuauaucuccagacggcugcucggcaccuuuacauggacgcugagcgauuccgagggcaaggacacccccgggggauacugccugacacgcuggaugcucauugaagccgagcugaaauguuucggcaacaccgcuguggccaagugcaaugagaaacaugaugaagaguuuugcgacaugcuuagacuguucgauuuuaacaagcaggcuauccagcggcucaaagccgaagcgcagaugucuauucaacugaucaauaaggccgugaacgcucuuaucaaugaccagcugauuaugaagaaccaccuccgcgacaucauguguauuccuuauugcaauuacagcaaauauugguaccugaacaauacagccaccgggaagacgucccugcccaaauguuggcucaucagcaacggaucuuaccugaaugagacacacuucuccgaugacauugaacaggaggcugauaacaugaucaccgagaugcuucaaaaggaauauauggagagacagggcaaaaccccucuggggcucgucgaccuguucguuuuuagcacaucuuucuaccugaucagcauuuuucuucaucucgugaagaucccgacccaccggcauauugugggaaaauccugccccaagccucaccgccugaaucauaugggcaucuguucuugcggccuguauaagcagcccggggucccugugagauggaaacgguga

SEQ ID NO: 34973 - RNA, 1476 nt, Artificial Sequence
  derived and/or modified CDS sequence (opt5) from LASV(G3010-SLE-2013;Clade IV)__AIT17344__GPCmut9
augggccagaucgugaccuucuuucaagaggucccccacguuauugaagaggugaugaacaucgugcugauugcccucagcauccuggcuguccuuaaggggcuguacaauuucgccacaugcggacucgugggccugguuacguuucuucugcucugugggagauccugcaccacaucucuguauaaaggaguguacgaacugcagacccucgagcugaacauggaaacacuuaauaugaccaugccucugagcuguacaaagaacaauucccaucacuauauuauggucggcaacgagaccgggcucgagcugacgcuuaccaauacaucuaucaucaaccauaaauucugcaaucugagcgacgcgcacaagaaaaaccucuacaaucaugcucugauguccauuaucucuaccuuucaccugagcauuccgaacuucaaucaguaugaagccauguccugugauuuuaacggaggcaagaucagcgugcaguacaaucucucucacuccuaugccggcgacgcugccagccauugcgggacaguugcuaacggagugcugcaaaccuucaugcggauggccuggggcgggucuuacauugcgcuugauuccggauguggcaagugggacugcaucaugacgagcuaccaguaucugauuauccagaacacaaccugggaggaucacugucaguuuucucgccccuccccuaucggguaccucggacugcuuagccaaagaacacgggacauuuauaucucccgcagacugcucggcaccuucaccuggacacugucugauagcgaaggcaaagacacgcccgggggauacugccugacccgguggaugcucauugaggccgagcugaaguguuuuggcaauacagcugucgccaaaugcaacgaaaagcaugaugaggaguucugcgacaugcuucgccuguuugauuucaauaaacaggcuauccagagacucaagaccgaagcccagauguccauucaacugaucaacaaggcggugaaugcccuuaucaacgaccagcugauuaugaaaaaucaccuccgggauaucauguguauuccuuauugcaacuacagcaaguauugguaccugaaucacacaaccacggggaaaacaucucugcccaaguguuggcucguguccaacggaagcuaccugaaugaaacccauuucucugacgacaucgagcagcaagcugauaacaugauuaccgagaugcuucagaaagaauauauggagcgccagggcaagacaccucuggggcucgucgaccuguuuguuuucagcaccuccuuuuaccugaucucuaucuuccuucaccucgugaaaauuccgacacauagacacaucgugggaaagagcugccccaagccucaucggcugaaucacaugggcauuuguuccugcggccuguauaaacagcccggggucccugugcgcuggaagagauga

SEQ ID NO: 34974 - RNA, 1476 nt, Artificial Sequence
  derived and/or modified CDS sequence (opt5) from LASV(G502-SLE-2009;Clade IV)__AIT17126__GPCmut9
augggccagaucgugaccuucuuucaagaggucccccacguuauugaagaggugaugaacaucgugcugauugcccucagcauccuggcuguccuuaaggggcuguacaauuucgccacaugcggacucgugggccugcuuacguuucugcuccugugugggagauccugcaccacaggacuguauaaaggcguuuacgaacuccagacccuggagcuuaacauggaaacacugaauaugaccaugccucucucuuguacaaagaacaauagccaucacuauauuaugguggggaacgagaccggacuggagcuuacgcugaccaauacauccaucaucaaccauaaauucugcaaucucucugacgcgcacaagaaaaaccuguacgaucaugcucugaugagcauuaucuccaccuuucaccucucuauuccgaauuucaaccaguaugaagccaugagcugugacuuuaauggcggcaagaucuccguccaguacaaccugagccacucuuaugccggggaugcugccgaccauugcggaacaguggcuaauggcguucuucaaaccuucaugcggauggccuggggaggguccuacauugcgcuggauagcggcugugggcgcugggacugcaucaugacgucuuaccaguaucucauuauccagaacacaaccugggaggaucacugucaguuuuccagacccagcccuaucggauaccugggccuucugucucaacggacacgcgacauuuauaucuccagacggcuccugggcaccuucaccuggacacugagcgauuccgaagggaaggacacgcccggaggcuacugccucacccgcuggaugcugauugaggccgagcuuaaauguuuugggaacacagcuguggccaagugcaaugaaaaacaugaugaggaguucugcgacaugcugagacucuuugauuucaacaagcaggcuauccagcggcugaaagccgaagcgcagaugucuauucaacuuaucaauaaggccgucaacgcucugaucaaugaccagcucgugaugaagaaccaucugcgcgacauuauguguaucccuuauugcaauuacagcagauauugguaccugaaccacaccacaaccggacggacgucccuccccaaauguuggcuggugagcaauggcucuuaccuuaacgaaacacacuucuccgaugacauugagcagcaagccgauaauaugaucaccgagaugcugcagaaggaauauauggagcgccaggggaaaaccccucucggacuggucgaccuguuuguuuucagcacaucuuuuuaccuuauuagcaucuuccuccaccuggugaagaucccgacccauagacacauugugggcaaauccugccccaagccucaucggcugaaccacaugggcaucuguucuugcgggcucuauaaacagcccggagucccugugaaguggaagcgcuga

SEQ ID NO: 34975 - RNA, 1476 nt, Artificial Sequence
  derived and/or modified CDS sequence (opt5) from LASV(G733-SLE-2010;Clade IV)__AIT17154__GPCmut9
augggccagaucgugaccuucuuucaagaggucccccacguuauugaagaggugaugaacaucgugcugauugcccucagcauccuggcuguccuuaaggggcuguacaauuucgccacaugcggaauugugggccucguuuccuuucugcuucugugugggagaucuugcacgaccagccucuauaaaggaguguacgaacugcagacacuggagcucaacauggaaacccugaauaugacaaugccucuuuccuguaccaagaacaauucucaucacuauaucauggucggcaacgagacagggcuggagcucacccugacgaauaccagcaucauuaaccauaaauucugcaaucuuuccgacgcgcacaagaaaaaccuguacgaucaugcucucaugucuaucauuagcacauuucaccuguccaucccgaauuucaaccaguaugaagccaugagcugugacuuuaauggaggcaagauuucugugcaguacaaccugucccacagcuaugccggcgaugcugccaaucauugcgggaccaucgcuaacggaguucuccaaacauucaugcggauggccuggggcgggucuuacauugcgcuggacuccggaugugaucgcugggacugcaucaugaccagcuaccaguaucuuaucauucagaacacgacaugggaggaucacugucaguuuucuagacccuccccuaucggcuaccuggggcuccugagccaacggacccgcgacauuuauaucuccagacggcuucugggaacauucaccuggacccucucugauagcgaaggcaaggacacacccggcggguacugccugacgcgcuggaugcugauugaggccgagcucaaauguuuuggaaauaccgcuguggccaagugcaacgaaaaacaugaugaggaguucugcgacaugcugagacuuuuugauuucaauaagcaggcuauccagcggcugaaagccgaagcgcagauguccauccaacucauuaacaaggccgucaaugcucugaucaacgaccagcuuauuaugaagaaucaucugcgcgacaucauguguauuccuuauugcaacuacagcaaauauugguaccucaaucacacaaccacaggcaagaccucucugcccaaauguuggcugguguccaacgggagcuaccucaaugaaacgcacuucucugaugacaucgagcagcaagccgauaacaugaucacagagaugcugcagaaggaauauauggagagacagggaaaaaccccucuuggccugguggaccucuuugucuucagcaccuccuuuuaccugauuucuaucuuccugcaccuuguuaagauuccgacacaucggcacgugguggggaaaagcugccccaagccucaucgccucaaucacaugggaaucuguuccugcggccuguauggccagcccggggucccugugaaguggaaaagauga

SEQ ID NO: 34976 - RNA, 1476 nt, Artificial Sequence
  derived and/or modified CDS sequence (opt5) from MOPV/LASV reassortant(IGS-1;Clade IV)__AFY05576__GPCmut9
augggccagaucgugaccuucuuucaagaggucccccacguuauugaagaggugaugaacaucgugcugauugcccucagcguccuggcugugcuuaaggggcuguacaauuucgccacaugcggacucguuggccuggugacguuucuucugcucugugggagauccugcaccacaucucuguauaaaggagucuacgaacugcagacccucgagcugaacauggaaacacuuaauaugaccaugccucugagcuguacaaagaacaauucccaucacuauaucauggugggcaacgagaccgggcucgagcugacgcuuaccaauacaucuauuaucaaccauaaauucugcaaucugagcgacgcgcacaagaaaaaccucuacgaucaugcucugauguccaucauuucuaccuuucaccugagcaucccgaauuucaaccaguaugaagccauguccugugacuuuaauggaggcaagauuagcguucaguacaaccucucucacuccuaugccggcgaugcugccaaucauugcgggacaguggcuaacggaguccugcaaaccuucaugcggauggccuggggcgggagcuacaucgcgcuugacucuggauguggcaacugggauugcauuaugacguccuaccaguaucugaucauucagaauacaaccugggaggaccacugucaguuuagccgccccucuccuaucggguaccucggacugcuuucccaaagaacacgggauaucuauauuagccgcagacugcucggcaccuucaccuggacacuguccgacucugaaggcgaggauacgcccgggggauacugccugacccgguggaugcucaucgaggccgaacugaaguguuuuggcaacacagcuguggccaaaugcaaugagaagcaugacgaagaguucugcgauaugcuucgccuguuugacuucaacaaacaggcuauucagagacucaaggccgaagcgcagaugagcauccaacugauuaauaaagccgugaacgcucuuaucaaugaucagcugaucaugaagaaccaccuccgggacauuauguguaucccuuauugcaauuacuccaaguauugguaccugaaccacaccacaaccgggcgcacgagccugcccaaauguuggcucgucucuaauggauccuaccugaacgagacacauuucagcgacgauauugagcagcaagccgacaauaugaucaccgaaaugcuucagaaggaguauauggaaagacagggcaaaaccccucuggggcucguugaucuguuuguguucucuaccagcuuuuaccugauuuccaucuuccuucaccucgugaagaucccgacacaucggcacauugucggaaaaucuugccccaagccucaucgccugaaccacaugggcaucuguagcugcggccuguauaaacagcccggggugccuguuaaguggaagagauga

SEQ ID NO: 34977 - RNA, 1476 nt, Artificial Sequence
  derived and/or modified CDS sequence (opt5) from LASV(LM765-SLE-2012;Clade IV)__AIT17814__GPCmut9
augggccagaucgugaccuucuuucaagaggucccccacguuauugaagaggugaugaacaucgugcugauugcccucagcauccuggcuguccuuaaggggcuguacaauuucgccacaugcggacucgugggccugguuacguuucuucugcucugugggagauccugcaccacaucucuguauaaaggaguguacgaacugcagacccucgagcugaacauggaaacacuuaauaugaccaugccucugagcuguacaaagaacaauucccaucacuauauuauggucggcaacgagaccgggcucgagcugacgcuuaccaauacaucuaucaucgaccauaaauucugcaaccugagcgaugcgcaccggaagaaucucuacgaccaugcucugauguccauuaucucuaccuuucaccugagcauuccgaacuucaaucaguaugaagccauguccugugauuuuaacggaggcaaaaucagcgugcaguacaaucucucucacuccuaugccaaggacgcugccgaucauugcggcacaguugcuaacggggugcugcaaaccuucaugcgcauggccuggggaggcagcuacauugcgcuugacucuggguguggaagaugggauugcaucaugacguccuaccaguaucugauuauccagaauacaaccugggaggaccacugucaguuuagccggcccucuccuaucggcuaccucgggcugcuuucccaacgcacaagagauauuuauaucagccggcgccugcucggaaccuucaccuggacacuguccgacucugaaggcaaggauacgcccggcggguacugccugaccagauggaugcucauugaggccgagcugaaauguuuuggaaacacagcugucgccaagugcaacgaaaaacaugacgaggaguucugcgauaugcuucggcuguuugacuucaauaagcaggcuauccagcgccucaaagccgaagcgcagaugagcauucaacugaucaacaaggccgugaaugcucuuaucaacgaccagcugauuaugaagaaucaccucagagauaucauguguauuccuuauugcaacuacuccaaauauugguaccugaaucacaccacaaccggcaagacgagccugcccaaauguuggcucgugucuaacggguccuaccugaaugaaacacauuucagcgacgauaucgagcagcaagccgacaacaugauuaccgagaugcuucagaaggaauauauggagcggcagggaaaaaccccucugggccucgucgaucuguuuguuuucucuaccagcuuuuaccugaucuccaucuuccuucaccucgugaagauuccgacacaucgccacaucguggggaaacccugcccuaagccccauagacugaaucacaugggaauuuguucuugcggccuguauaagcagccuggcguccccgugaaauggaagcgguga

SEQ ID NO: 34978 - RNA, 1476 nt, Artificial Sequence
  derived and/or modified CDS sequence (opt5) from LASV(LM776-SLE-2012;Clade IV)__AIT17824__GPCmut9
augggccagaucgugaccuucuuucaagaggucccccacguuauugaagaggugaugaacaucgugcugauugcccucagcauccuggcuguccuuaaggggcuguacaauuucgccacaugcggacucgugggccugguuacguuucuucugcucugugggagauccugcaccacaucuguguauaaaggagucuacgaacugcagacccuggagcucaacauggaaacacugaauaugaccaugccucuuagcuguacaaagaacaauucccaucacuauauuauggugggcaacgagaccgggcuggagcucacgcugaccaauacaucuaucaucaaccauaaauucugcaaucuuagcgacgcgcacaagaaaaaccuguacgaucaugcucucauguccauuaucucuaccuuucaccugagcauuccgaauuucaaccaguaugaagccauguccugugacuuuaauggaggcaagaucagcguucaguacaaccugucucacuccuaugccggcgaugcugccaaucauugcgggacaguggcuaacggaguccuccaaaccuucaugcggauggccuggggcgggagcuacauugcgcuggacucuggauguggcaagugggauugcaucaugacguccuaccaguaucuuauuauccagaacacaaccugggaggaccacugucaguuuagccgccccucuccuaucggguaccugggacuccugucccaaagaacacgggauauuuauaucagccgcagacuucugggcaccuucaccuggacacucuccgacucugaaggcaaagauacgcccgggggauacugccugacccgguggaugcugauugaggccgagcucaaguguuuuggcaauacagcuguggccaaaugcaacgaaaagcaugacgaggaguucugcgauaugcugcgccuuuuugacuucaauaaacaggcuauccagagacugaaggccgaagcgcagaugagcauucaacucaucaacaaggccgugaaugcucugaucaacgaucagcuuauuaugaaaaaucaucugcgggacaucauguguauuccuuauugcaacuacuccaaguauugguaccucaaucacaccacaaccgggaaaacgagccugcccaaguguuggcuggucucuaacggauccuaccucaaugaaacacacuucagcgacgauaucgagcagcaagccgacaacaugauuaccgagaugcugcagaaagaauauauggagcgccagggcaagaccccucuugggcugguugaucucuuuguguucucuaccagcuuuuaccugaucuccaucuuccugcaccuugugaaaauuccgacacauagacacaucgucggaaagucuugccccaagccucaucggcucaaucacaugggcauuuguagcugcggccuguauaaacagcccggggugccuguucgcuggaagagauga

SEQ ID NO: 34979 - RNA, 1476 nt, Artificial Sequence
  derived and/or modified CDS sequence (opt5) from LASV(Mad39;Clade IV)__ANH09722__GPCmut9
augggccagaucgugaccuucuuucaagaggucccccacguuauugaagaggugaugaacaucgugcugauugcccucagcauccuggcuguccuuaaggggcuguacaauguggccacaugcggacucauuggccugguuacguuccuucugcucugugggagauccugcaccacaacccuguauaaaggaguguacgaacugcaggcgcucgagcugaacauggaaacacuuaauaugaccaugccucugucuuguacaaagaacaauagccaucacuauauccgggucggcaacgagaccgggcucgagcugacgcuuaccaauacaucccugaucaaccauaaauuuugcaaucucucugacgcucacaagaaaaaccuguacgaucaugcccugaugagcauuaucuccaccuuccaccucucuauuccgaauuuuaaccaguaugaagccaugagcugugacuucaaugauggaaagaucuccgugcaguacaaccugagccacacauaugcuggcgacaccgccaaucauugcggcacgguugcuaacggggugcuucaaacauuuaugcgcauggccuggggaggcucuuacauugcgcuggauuccggguguggaggcugggacugcaucaugaccagcuaccaguaucucauuauccagaacacaaccugggaggaucacugucaguucucuagacccuccccuaucggguaccugggacuucugagccaacggacccgcgacauuuauaucucuagacggcuccugggcacauuuacguggacccuguccgauagcgaaggcaaggacacacccgggggauacugccucacccgcuggaugcugauugaggccgagcuuaaauguuucggcaauacagcugucgccaagugcaacgaaaaacaugaugaggaauuuugcgacaugcugagacucuucgauuuuaauaagcaggcuauccagcggcugaaagccgaggcgcagauguccauucaacuuaucaacaaggccgugaaugcucugaucaacgaccagcucauuaugaagaaucaucugcgcgacaucauguguauuccuuauugcaacuacucuaaauauugguaccugaaucacaccgugacggggaagacaagccuccccaaauguuggcuggucuccaacggaagcuaccuuaaugaaacccacuucucugaugacaucgagcagcaagccgauaacaugauuaccgagaugcugcagaaggaauauauggagagacagggcaaaacaccucucgggcugguugaccuguucguguuuuccaccagcuucuaccuuaucucuaucuuucuccaccuggugaagauuccgacacaucggcacgucgugggaaaacccugcccuaagccccaucgccugaaucacaugggcaucuguagcugcggcuucuauaagcagccugggguucccgugagauggaaacgguga

SEQ ID NO: 34980 - RNA, 1476 nt, Artificial Sequence
  derived and/or modified CDS sequence (opt5) from LASV(Z0947-SLE-2011;Clade IV)__AIT17840__GPCmut9
augggccagaucgugaccuucuuucaagaggucccccacguuauugaagaggugaugaacaucgugcugauugcccucagcauccuggcuguccuuaaggggcuguacaauuucgccacaugcggacucgugggccugguuacguuucuucugcucugugggagauccugcaccauuucucuguauaaaggaguguacgaacugcagacacucgagcugaacauggaaacccuuaauaugacaaugccucugagcuguaccaagaacaauucccaucacuauaucauggucggcaacgagacagggcucgagcugacccuuacgaauaccucuaucauuaaccauaaauucugcaaucugagcgacgcgcacaagaaaaaccucuacgaucaugcucugauguccaucauuucuacauuucaccugagcaucccgaauuucaaccaguaugaagccauguccugugacuuuaauggaggcaagauuagcgugcaguacaaccucucucacuccuaugccggcgaugcugccaaucauugcgggaccguugcuaacggagugcugcaaacauucaugcggauggccuggggcgggagcuacaucgcgcuugacucuggaugugaucgcugggacugcauuaugaccuccuaccaguaucugaucauccagaacacgacaugggaggaucacugucaguuuagcagacccucuccuauuggcuaccucgggcugcuuucccaacggacccgcgacaucuauauuagcagacggcugcucggaacauucaccuggacccuguccgauucugaaggcaaggacacacccggcggguacugccugacgcgcuggaugcucaucgaggccgagcugaaauguuuuggaaauaccgcugucgccaagugcaacgaaaaacaugaugaggaguucugcgacaugcuuagacuguuugauuucaauaagcaggcuauucagcggcucaaagccgaagcgcagaugagcauccaacugaucaacaaggccgugaaugcucuuauuaacgaccagcugaucaugaagaaucaccuccgcgacauuauguguaucccuuauugcaacuacuccaaauauugguaccugaaucacacaaccacaggcaagaccagccugcccaaauguuggcucgugucuaacggguccuaccugaaugaaacgcauuucagcgaugacauugagcagcaagccgauaacaugaucacagagaugcuucagaaggaauauauggagagacagggaaaaaccccucugggccucgucgaccuguuuguuuucucuaccagcuuuuaccugaucuccauuuuccuucaccucgugaagaucccgacacaucggcacauuguggggaaacccugcccuaagccccaucgccugaaucacaugggaaucuguucuugcggccuguauaagcagccuggcguccccgugaaauggaagagauga

SEQ ID NO: 34981 - RNA, 1717 nt, Artificial Sequence
  mRNA product Design a-1 (hSL-A64-N5) comprising derived and/or modified sequence from LASV(Josiah;Clade IV)__NP_694870__GPCmut9 (opt1)
aggagagucccgcagucggcguccagcggcucugcuuguucgugugugugucguugcaggccuuauucaagcuuaccaugggccagaucgugaccuucuuccaggaggucccccacgugaucgaggaggugaugaacaucguccugaucgcccucagcgugcuggccgugcugaaggggcucuacaacuucgcgaccugcggccuggucgggcuggugacguuccuccugcugugcggccgcuccugcaccaccagccucuacaaggggguguacgagcugcagacccuggagcucaacauggagacgcugaacaugaccaugccgcuguccugcaccaagaacaacagccaccacuacaucauggucggcaacgagaccggccucgagcugacgcugaccaacaccuccaucaucaaccacaaguucugcaaccucagcgacgcccacaagaagaaccuguacgaccacgcccugauguccaucaucagcaccuuccaccucuccauccccaacuucaaccaguacgaggccaugagcugcgacuucaacgggggcaagaucuccgugcaguacaaccugagccacuccuacgccggggacgcggccaaccacugcggcacgguggccaacgggguccugcagaccuucaugcggauggccuggggcggcagcuacaucgcgcucgacuccgggugcggcaacugggacugcaucaugaccagcuaccaguaccugaucauccagaacaccacgugggaggaccacugccaguucucccggcccagccccaucggguaccugggccuccugucccagcgcacccgggacaucuacaucagccgccggcugcucggcaccuucaccuggacgcugagcgacuccgaggggaaggacaccccgggcggguacugccugacccgcuggaugcucaucgaggccgagcugaagugcuucggcaacaccgccguggccaagugcaacgagaagcacgacgaggaguucugcgacaugcugcggcuguucgacuucaacaagcaggccauccagcgccugaaggcggaggcccagaugagcauccagcugaucaacaaggccgugaacgcccucaucaacgaccagcugaucaugaagaaccaccuccgggacaucaugugcauccccuacugcaacuacuccaaguacugguaccucaaccacacgaccaccggccgcaccagccugcccaagugcuggcuggucuccaacggcagcuaccucaacgagacgcacuucuccgacgacaucgagcagcaggccgacaacaugaucaccgagaugcugcagaaggaguacauggagcggcaggggaagacgccccugggccucguggaccuguucguguucagcaccuccuucuaccugaucagcaucuuccugcaccucgucaagaucccgacccaccgccacaucguggggaaguccugccccaagccccaccggcugaaccacaugggcaucugcagcugcgggcuguacaagcagcccggcgugccggucaaguggaagcgcugaggacuagucccuguucccagagcccacuuuuuuuucuuuuuuugaaauaaaauagccugucuuucagaucucaaaggcucuuuucagagccaccaaaaaaaaaaaaaaaaaaaaaaaaaaaaaaaaaaaaaaaaaaaaaaaaaaaaaaaaaaaaaaaaagaauu

SEQ ID NO: 34982 - RNA, 1714 nt, Artificial Sequence
  mRNA product Design a-1 (hSL-A64-N5) comprising derived and/or modified sequence from LASV(LP;Clade I)__AAF86701__GPCmut9 (opt1)
aggagagucccgcagucggcguccagcggcucugcuuguucgugugugugucguugcaggccuuauucaagcuuaccaugggccagaucaucaccuucuuccaggaggugccccacgucaucgaggaggugaugaacaucgugcugaucgcccucagccugcuggccauccucaaggggcuguacaacaucgcgaccugcggcaucaucgggcuggucgccuuccucuuccugugcggcaaguccugcagccugacgcucaagggcggguacgagcugcagacccuggagcucaacauggagacccugaacaugaccaugccgcuguccugcacgaagaacagcucccaccacuacauccgcgugggcaacgagaccgggcucgagcugacccugaccaacacgagcaucaucaaccacaaguucugcaaccucuccgacgcccacaagaagaaccuguacgaccacgcccugaugagcaucaucuccaccuuccaccucagcauccccaacuucaaccaguacgaggccauguccugcgacuucaacggcgggaagaucagcgugcaguacaaccugucccacagcuacgcgggcgacgccgccgagcacugcgggaccgucgccaacggcgugcugcagaccuucaugcggauggcguggggcgggcgcuacaucgcccucgacuccggcugcgggaacugggacugcaucaugacgagcuaccaguaccugaucauccagaacaccaccugggaggaccacugccaguucucccggcccagccccaucggcuaccugggccuccugucccagcgcacccgggacaucuacaucagccgccggcugcucgggacguucaccuggacccugagcgacuccgagggcaacgagacccccgggggcuacugccugacgcgcuggaugcucaucgaggccgagcugaagugcuucgggaacaccgccguggccaagugcaacgagaagcacgacgaggaguucugcgacaugcugcggcuguucgacuucaacaagcaggcgauccgccggcugaaggccgaggcccagaugagcauccagcugaucaacaaggccgucaacgcccucaucaacgaccagcugaucaugaagaaccaccuccgcgacaucaugugcauccccuacugcaacuacuccaaguacugguaccucaaccacaccagcuccggccggaccagccugcccaagugcuggcugaucuccaacgggagcuaccucaacgagacgcaguucuccgacgacaucgagcagcaggcggacaacaugaucaccgagaugcugcagaaggaguacaucgagcgccagggcaagaccccgcuggggcucguggacaucuucaucuucagcaccuccuucuaccugaucagcaucuuccugcaccugaucaagaucccgacgcaccggcacaucgugggcaagcccugccccaagccccaccgccucaaccacaugggggucugcuccugcggccuguacaagcacccgggcgugcccaccaaguggaagcggugaggacuagucccuguucccagagcccacuuuuuuuucuuuuuuugaaauaaaauagccugucuuucagaucucaaaggcucuuuucagagccaccaaaaaaaaaaaaaaaaaaaaaaaaaaaaaaaaaaaaaaaaaaaaaaaaaaaaaaaaaaaaaaaaagaauu

SEQ ID NO: 34983 - RNA, 1714 nt, Artificial Sequence
  mRNA product Design a-1 (hSL-A64-N5) comprising derived and/or modified sequence from LASV(803213;Clade II)__AAF86703__GPCmut9 (opt1)
aggagagucccgcagucggcguccagcggcucugcuuguucgugugugugucguugcaggccuuauucaagcuuaccaugggccagaucaucaccuucuuccaggaggugccccacgucaucgaggaggugaugaacaucgugcugaucgcccucagccugcuggccauccucaaggggaucuacaacgucgcgaccugcggccuguucgggcugaucuccuuccuccugcugugcggccgcagcugcuccgugacguacaaggggguguacgagcuccagacccuggagcugaacauggccaaccucaacaugaccaugccgcugagcugcaccaagaacaacucccaccacuacaucauggucggcaacgagacgggccuggagcucacccugaccaacaccagcaucaucaaccacaaguucugcaaccuguccgacgcccacaagaagaaccucuacgaccacgcccugaugagcaucaucuccacguuccaccugagcauccccaacuucaaccaguacgaggccauguccugcgacuucaacgggggcaagaucagcgugcaguacaaccucucccacagcuucgcgguggacgccgccaaccacugcgggaccaucgccaacggcguccugcagaccuucaugcggauggcguggggcggguccuacaucgcccuggacagcggcugcgggaacugggacugcaucaugaccuccuaccaguaccucaucauccagaacacgaccugggaggaccacugccaguucagccgccccucccccaucggcuaccuggggcugcucagccagcggacccgcgacaucuacaucagccggcgccugcugggcaccuucacguggacccucuccgacagcgagggcaacgaggcccccgggggcuacugccugacccgguggaugcugaucgaggccgagcucaagugcuucgggaacaccgccguggcgaagugcaacgagaagcacgacgaggaguucugcgacaugcugcgccuguucgacuucaacaagcaggccaucaagcggcucaagacggaggcccagauguccauccagcugaucaacaaggccgugaacgcccugaucaacgaccagcucaucaugaagaaccaccuccgcgacaucaugugcauccccuacugcaacuacagccgguacugguaccugaaccacaccgucaccgggaagaccucccugccccgcugcuggcuggugagcaacggcuccuaccugaacgagacgcacuucagcgacgacaucgagcagcaggcggacaacaugaucaccgagaugcuccagaaggaguacauggaccggcagggcaagaccccgcuggggcugguggaccucuucgucuucuccaccagcuucuaccugaucuccaucuuccugcaccuggugaagaucccgacgcaccgccacaucgugggcaagcccugccccaagccccaccggcucaaccacauggggaucugcagcugcggccuguacaagcacccggggguccccgugaaguggaagcgcugaggacuagucccuguucccagagcccacuuuuuuuucuuuuuuugaaauaaaauagccugucuuucagaucucaaaggcucuuuucagagccaccaaaaaaaaaaaaaaaaaaaaaaaaaaaaaaaaaaaaaaaaaaaaaaaaaaaaaaaaaaaaaaaaagaauu

SEQ ID NO: 34984 - RNA, 1714 nt, Artificial Sequence
  mRNA product Design a-1 (hSL-A64-N5) comprising derived and/or modified sequence from LASV(GA391;Clade III)__CAA36645__GPCmut9 (opt1)
aggagagucccgcagucggcguccagcggcucugcuuguucgugugugugucguugcaggccuuauucaagcuuaccaugggccagaucgugaccuucuuccaggaggucccccacgugaucgaggaggugaugaacaucguccugaucgcccucagcauccuggccauccugaaggggcucuacaacguggcgaccugcggccugaucgggcuggugacguuccuccugcuguccggccgcagcugcucccucaucuacaaggggaccuacgagcugcagacccuggagcucaacauggagacccugaacaugacgaugccgcugagcugcaccaagaacaacucccaccacuacauccgggucggcaacgagaccggccucgagcugacccugacgaacaccagcauccucaaccacaaguucugcaaccuguccgacgcccacaagcgcaaccuguacgaccacagccucauguccaucaucagcaccuuccaccuguccauccccaacuucaaccaguacgaggccaugagcugcgacuucaacgggggcaagaucaccgugcaguacaaccugucccacagcuucgccguggacgccgcggggcacugcggcacgcucgccaacgggguccugcagaccuucaugcggauggccuggggcggcuccuacaucgcccuggacagcgggugcggcaacugggacugcaucaugaccuccuaccaguaccucaucauccagaacaccacgugggacgaccacugccaguucagccggcccucccccaucggguaccugggccugcucagccagcgcacccgggacaucuacaucagccgccggcugcugggcaccuucaccuggacgcucuccgacagcgaggggaacgagaccccgggcggguacugccugacccgcuggaugcugaucgaggcggagcucaagugcuucggcaacaccgccguggccaagugcaacgagaagcacgacgaggaguucugcgacaugcugcggcuguucgacuucaacaagcaggccauccgccggcucaagacggaggcccagauguccauccagcugaucaacaaggcggugaacgcccugaucaacgaccagcucaucaugaagaaccaccuccgcgacaucaugugcauccccuacugcaacuacagccgguacugguaccugaaccacaccuccaccggcaagaccagccugccccgcugcuggcugaucuccaacggcagcuaccugaacgagacgaaguucuccgacgacaucgagcagcaggccgacaacaugaucaccgagaugcuccagaaggaguacaucgaccggcaggggaagacgccccugggccuggucgaccuguucguguucagcaccuccuucuaccucaucagcaucuuccugcaccuggugaagaucccgacccaccgccacaucgucgggaagcccugccccaagccccaccggcucaaccacaugggcaucugcuccugcgggcuguacaagcagccgggcgugcccgugcgcuggaagcggugaggacuagucccuguucccagagcccacuuuuuuuucuuuuuuugaaauaaaauagccugucuuucagaucucaaaggcucuuuucagagccaccaaaaaaaaaaaaaaaaaaaaaaaaaaaaaaaaaaaaaaaaaaaaaaaaaaaaaaaaaaaaaaaaagaauu

SEQ ID NO: 34985 - RNA, 1717 nt, Artificial Sequence
  mRNA product Design a-1 (hSL-A64-N5) comprising derived and/or modified sequence from LASV(AV;Clade V)__CCA30314__GPCmut9 (opt1)
aggagagucccgcagucggcguccagcggcucugcuuguucgugugugugucguugcaggccuuauucaagcuuaccaugggccagaucgugaccuucuuccaggaggucccccacgugaucgaggaggugaugaacaucguccugaucgcccucagcauccuggccgugcugaaggggcucuacaacaucgcgaccugcggccugaucgggcugaucacguuccuccugcugugcggccgcuccugcagcuccaaccucuacaaggggguguacgagcugcagagccuggaccucaacauggagacccugaacaugaccaugccgcuguccugcaccaagaacaacagccaccacuacauccgggucggcaacgacacgggccucgagcugacccugaccaacaccuccauccucaaccacaaguucugcaaccugagcgacgcccacaagaaggaccuguacgaccacgcccucauguccaucaucagcacguuccaccuguccauccccaacuucaaccaguacgaggccaugagcugcgacuucaacgggggcaagaucuccgugcaguacaaccugagccacuccuacgccaucgacgcggccaaccacugcgggaccguggccaacggcauccuccagaccuucaugcgcauggccuggggcgggagcuacaucgcgcuggacuccggcugcgggaacugggacugcaucaugaccagcuaccaguaccugaucauccagaacacgaccugggagaaccacugccaguucucccgccccagccccaucggcuaccucgggcugcugagccagcggacccgcgacaucuacaucucccggcgccuccugggcaccuucacguggacccugagcgacuccgagggcaacgccacccccgggggcuacugccucacccgguggaugcugaucgaggccgagcugaagugcuucgggaacacggccgucgccaagugcaacgagaagcacgacgaggaguucugcgacaugcuccgccuguucgacuucaacaagcaggcgaucagccggcugaaguccgaggcccagaugagcauccagcucaucaacaaggccgugaacgcccugaucaacgaccagcugaucaugaagaaccaccuccgcgacaucaugugcauccccuacugcaacuacuccaaguacugguaccugaaccacaccaucaccgggaagaccagccugcccaagugcuggcucguguccaacggcagcuaccugaacgagacgcacuucuccgacgacaucgagcagcaggccgacaacaugaucaccgagaugcugcagaaggaguacauggagcggcagggcaagaccccgcucgggcuggucgaccuguucguguucagcaccuccuucuaccugaucagcaucuuccuccgccuggugaagaucccgacgcaccggcacaucgucggcaagcccugccccaagccccaccgccugaaccacauggggaucugcuccugcggccucuacaagcagccgggggugcccgugcgguggaagcgcugaggacuagucccuguucccagagcccacuuuuuuuucuuuuuuugaaauaaaauagccugucuuucagaucucaaaggcucuuuucagagccaccaaaaaaaaaaaaaaaaaaaaaaaaaaaaaaaaaaaaaaaaaaaaaaaaaaaaaaaaaaaaaaaaagaauu

SEQ ID NO: 34986 - RNA, 1714 nt, Artificial Sequence
  mRNA product Design a-1 (hSL-A64-N5) comprising derived and/or modified sequence from LASV(Togo/2016/7082;Clade VI)__AMR44577__GPCmut9 (opt1)
aggagagucccgcagucggcguccagcggcucugcuuguucgugugugugucguugcaggccuuauucaagcuuaccaugggccagaucaucaccuucuuccaggaggugccccacgucaucgaggaggugaugaacaucgugcugaucgcccucagccugcuggccauccucaagggggucuacaacguggcgaccugcggcaucaucgggcuggugacguuccuguuccucugcggccgcuccugcagccugaucuacaagggguccuacgagcugcagacccucgagcugaacauggagacccugaacaugaccaugccgcucagcugcacgaagaacuccagccaccacuacauccgggucggcaacgagaccggccuggagcugacccucaccaacacguccaucaucaaccacaaguucugcaaccugagcgacgcccacaagcgcaaccuguacgaccacgcccucauguccauccugagcaccuuccaccuguccauccccaacuucaaccaguacgaggccaugagcugcgacuucaacgggggcaagaucuccgugcaguacaaccucagccacgccuacgcgguggacgccgccgagcacugcgggaccgucgccaacggcgugcugcagaccuucaugcggauggcguggggcggguccuacaucgcccuggacagcggcugcgggaacugggacugcaucaugacguccuaccaguaccucaucauccagaacaccaccugggaggaccacugccaguucagccggcccucccccaucggcuaccuggggcugcucagccagcgcacccgggacaucuacaucagccgccggcugcugggcacguucaccuggacccucuccgacagcgagggcaacgagacccccgggggcuacugccugacgcgcuggaugcugaucgaggccgagcucaagugcuucgggaacaccgccguggccaagugcaacgagaagcacgacgaggaguucugcgacaugcugcggcuguucgacuucaacaagcaggcgauccagcgccucaaguccgaggcccagaugagcauccagcugaucaacaaggccgucaacgcccugaucaacgaccagcucaucaugaagaaccaccuccgggacaugaugugcauccccuacugcaacuacuccaaguacugguaccugaaccacaccagcuccgggcgcaccagccugcccaagugcuggcugguguccaacggcagcuaccugaacgagacgcacuucuccgacgacaucgagcagcaggccgacaacaugaucaccgagaugcuccagaaggaguacaucgaccggcagggcaagaccccgcuggggcugguggaccucuucgucuucagcaccuccuucuaccugaucagcaucuuccugcaccugaucaagaucccgacgcaccgccacaucgugggcaagcccugccccaagccccaccggcucaaccacauggggaucugcuccugcggccuguacaagcagccgggggugcccacccgcuggaagcggugaggacuagucccuguucccagagcccacuuuuuuuucuuuuuuugaaauaaaauagccugucuuucagaucucaaaggcucuuuucagagccaccaaaaaaaaaaaaaaaaaaaaaaaaaaaaaaaaaaaaaaaaaaaaaaaaaaaaaaaaaaaaaaaaagaauu

SEQ ID NO: 34987 - RNA, 1714 nt, Artificial Sequence
  mRNA product Design a-1 (hSL-A64-N5) comprising derived and/or modified sequence from LASV(KAK-428;Clade n.d. (VII))__ANH09740__GPCmut9 (opt1)
aggagagucccgcagucggcguccagcggcucugcuuguucgugugugugucguugcaggccuuauucaagcuuaccaugggccagaucgugaccuucuuccaggaggucccccacgugaucgaggaggugaugaacaucguccugaucgcccucagccugcuggccauccucaaggggcuguacaacuucgcgaccugcggcgugaucgggcugaucacguuccuccugcugugcggccgcuccugcagcgccaccuacaaggggcaguacgagcuccagacccuggagcugaacauggagucccucaacaugaccaugccgcugagcugcacgaagaacaacucccaccacuacauccgggccggcaacaacaccggccuggagcucacccugaccaacacgagcaucaucucccacaaguucugcaaccugagcgacgcccacaagaagaaccucuacgaccacacccugauguccaucaucaccaccuuccaccugagcauccccaacuucaaccaguacgaggccauguccugcgacuucaacgggggcaagaucagcauccaguacaaccucucccacagcuacgcgggggacgccgcccagcacugcggcacgguggccaacgggguccugcagaccuucaugcgcauggcguggggcggcuccuaccuggcccucgacagcgggugccgcggcugggacugcaucaucuccagcuaccaguaccugaucauccagaacaccaccugggacgaccacugccaguucucccggcccagccccaucggguaccugggcuucgugagccagaagacgcgcgacaucuacaucucccggcgccuccugggcaccuucaccuggacccugagcgacuccgaggggcacgacaugccgggcggguacugccucacgcgguggaugcugaucgaggccgaccugaagugcuucggcaacaccgccguggccaagugcaacgagaagcacgacgaggaguucugcgacauguggcgccucuucgacuucaacaagcaggcgauccagcggcugaaggccgaggcccagaugaacauccagcugaucaacaaggccgucaacgcccucaucaacgaccagcugaugaugaagaaccaccuccgcgacaucaugugcauccccuacugcaacuacagcaaguucugguaccugaacaacaccaccacgggccggaccucccugccccgcugcuggcugaucagcaacggcuccuaccucaacgagacccacuucagcgacgacaucgagcagcaggcggacaacaugaucaccgagaugcugcagaaggaguacauggaccggcaggggaagacgccccugggccucguggaccuguucguguucuccaccagcuucuaccugaucaccaucuuccuccaccuggucaagaucccgacccaccgccacaucguggggaagcccugccccaagccccaccggcugaaccacaugggcaucugcuccugcgggcuguacaagcagccgggcgugcccguccgcuggaagcggugaggacuagucccuguucccagagcccacuuuuuuuucuuuuuuugaaauaaaauagccugucuuucagaucucaaaggcucuuuucagagccaccaaaaaaaaaaaaaaaaaaaaaaaaaaaaaaaaaaaaaaaaaaaaaaaaaaaaaaaaaaaaaaaaagaauu

SEQ ID NO: 34988 - RNA, 1714 nt, Artificial Sequence; identical to SEQ ID NO: 34982
  mRNA product Design a-1 (hSL-A64-N5) comprising derived and/or modified sequence from LASV(Pinneo-NIG-1969;Clade I)__AIT17836__GPCmut9 (opt1)

SEQ ID NO: 34989 - RNA, 1714 nt, Artificial Sequence
  mRNA product Design a-1 (hSL-A64-N5) comprising derived and/or modified sequence from LASV(ISTH0009-NIG-2011;Clade II)__AIT17404__GPCmut9 (opt1)
aggagagucccgcagucggcguccagcggcucugcuuguucgugugugugucguugcaggccuuauucaagcuuaccaugggccagaucaucaccuucuuccaggaggugccccacgucaucgaggaggugaugaacaucgugcugaucgcccucagccugcuggccauccucaaggggaucuacaacgucgcgaccugcggccuguucgggcugguguccuuccuccugcugugcggccgcagcugcuccacgaccuacaaggggguguacgagcuccagacccuggagcuggacauggccagccucaacaugaccaugccgcuguccugcacgaagaacaacagccaccacuacaucauggucggcaacgagaccggccuggagcucacccugaccaacacguccaucaucaaccacaaguucugcaaccugagcgacgcccacaagaagaaccucuacgaccacgcccugauguccaucaucagcaccuuccaccuguccauccccaacuucaaccaguacgaggccaugagcugcgacuucaacgggggcaagaucuccgugcaguacaaccucagccacgcguacgccguggacgccgccaaccacugcgggaccaucgcgaacggcguccugcagaccuucaugcggauggccuggggcggguccuacaucgcccuggacagcggcugcggguccugggacugcaucaugacgagcuaccaguaccucaucauccagaacaccaccugggaggaccacugccaguucucccgccccagccccaucggcuaccuggggcugcucagccagcggacccgcgacaucuacaucucccggcgccugcugggcacguucaccuggacccucagcgacuccgagggcaacgagacccccgggggcuacugccugacgcgguggaugcugaucgaggccgagcucaagugcuucgggaacaccgccguggcgaagugcaacgagaagcacgacgaggaguucugcgacaugcugcgccuguucgacuucaacaagcaggccauccggcgccucaagaccgaggcccagaugagcauccagcugaucaacaaggccgugaacgcccugaucaacgaccagcucaucaugaagaaccaccuccgggacaucaugugcaucccguacugcaacuacuccaaguacugguaccugaaccacaccgucacggggaagaccagccugccccgcugcuggcugguguccaacggcagcuaccugaacgagacccacuucuccgacgacaucgagcagcaggcggacaacaugaucaccgagcuccugcagaaggaguacauggaccggcagggcaagacgccccuggggcucguggaccuguucgucuucagcaccuccuucuaccugaucagcaucuuccugcaccucaucaagaucccgacccaccgccacaucaccggcaagcccugccccaagccccaccggcugaaccacauggggaucugcuccugcggccuguacaagcacccgggggugcccgugaaguggaagcgcugaggacuagucccuguucccagagcccacuuuuuuuucuuuuuuugaaauaaaauagccugucuuucagaucucaaaggcucuuuucagagccaccaaaaaaaaaaaaaaaaaaaaaaaaaaaaaaaaaaaaaaaaaaaaaaaaaaaaaaaaaaaaaaaaagaauu

SEQ ID NO: 34990 - RNA, 1714 nt, Artificial Sequence
  mRNA product Design a-1 (hSL-A64-N5) comprising derived and/or modified sequence from LASV(ISTH2010-NIG-2012;Clade II)__AIT17482__GPCmut9 (opt1)
aggagagucccgcagucggcguccagcggcucugcuuguucgugugugugucguugcaggccuuauucaagcuuaccaugggccagaucaucaccuucuuccaggaggugccccacgucaucgaggaggugaugaacaucgugcugaucgcccucagccugcuggccauccucaaggggaucuacaacgucgcgaccugcggccuguucgggcugguguccuuccuccugcugugcggccgcagcugcuccacgaccuacaaggggguguacgagcuccagacccuggagcuggacauggccagccucaacaugaccaugccgcuguccugcacgaagaacaacagccaccacuacaucauggucggcaacgagaccggccuggagcucacccugaccaacacguccaucaucaaccacaaguucugcaaccugagcgacgcccacaagaagaaccucuacgaccacgcccugauguccaucaucagcaccuuccaccuguccauccccaacuucaaccaguacgaggccaugagcugcgacuucaacgggggcaagaucuccgugcaguacaaccucagccacgcguacgccguggacgccgccaaccacugcgggaccaucgcgaacggcguccugcagaccuucaugcggauggccuggggcggguccuacaucgcccuggacagcggcugcggguccugggacugcaucaugacgagcuaccaguaccucaucauccagaacaucaccugggaggaccacugccaguucucccgccccagccccaucggcuaccuggggcugcucagccagcggacccgcgacaucuacaucucccggcgccugcugggcaccuucacguggacccucagcgacuccgagggcaacgagacccccgggggcuacugccugacccgguggaugcugaucgaggccgagcucaagugcuucgggaacacggccguggcgaagugcaacgagaagcacgacgaggaguucugcgacaugcugcgccuguucgacuucaacaagcaggccauccggcgccucaagaccgaggcccagaugagcauccagcugaucaacaaggccgugaacgcccugaucaacgaccagcucaucaugaagaaccaccuccgggacaucaugugcauccccuacugcaacuacuccaaguacugguaccugaaccacaccgucaccgggaagacgagccugccccgcugcuggcugguguccaacggcagcuaccugaacgagacccacuucuccgacgacaucgagcagcaggcggacaacaugaucaccgagcuccugcagaaggaguacaucgaccggcagggcaagaccccgcuggggcucguggaccuguucgucuucagcacguccuucuaccugaucagcaucuuccugcaccucgugaagaucccgacccaccgccacguggucggcaagcccugccccaagccccaccggcugaaccacauggggaucugcuccugcggccuguacaagcacccgggggugcccgugaaguggaagcgcugaggacuagucccuguucccagagcccacuuuuuuuucuuuuuuugaaauaaaauagccugucuuucagaucucaaaggcucuuuucagagccaccaaaaaaaaaaaaaaaaaaaaaaaaaaaaaaaaaaaaaaaaaaaaaaaaaaaaaaaaaaaaaaaaagaauu

SEQ ID NO: 34991 - RNA, 1714 nt, Artificial Sequence
  mRNA product Design a-1 (hSL-A64-N5) comprising derived and/or modified sequence from LASV(Lassa virus/H.sapiens-wt/NGA/2015/ISTH_0543;Clade II)__AVO03639__GPCmut9 (opt1)
aggagagucccgcagucggcguccagcggcucugcuuguucgugugugugucguugcaggccuuauucaagcuuaccaugggccagaucaucaccuucuuccaggaggugccccacgucaucgaggaggugaugaacaucgugcugaucgcccucagccugcuggccauccucaaggggaucuacaacgucgcgaccugcggccuguucgggcugguguccuuccuccugcugugcggccgcagcugcuccacgaccuacaaggggguguacgagcuccagacccuggagcuggacauggccaaccucaacaugaccaugccgcugagcugcacgaagaacaacucccaccacuacaucauggucggcaacgagaccggccuggagcucacccugaccaacacgagcaucaucaaccacaaguucugcaaccuguccgacgcccacaagaagaaccucuacgaccacgcccugaugagcaucaucuccaccuuccaccugagcauccccaacuucaaccaguacgaggccauguccugcgacuucaacgggggcaagaucagcgugcaguacaaccucucccacaccuacgcgguggacgccgccaaccacugcgggaccaucgccaacggcguccugcagacguucaugcggauggcguggggcgggagcuacaucgcccuggacuccggcugcgggagcugggacugcaucaugaccuccuaccaguaccucgugauccagaacaccaccugggaggaccacugccaguucagccgccccucccccaucggcuaccuggggcugcucagccagcggacgcgcgacaucuacaucagccggcgccugcugggcaccuucaccuggacccucuccgacagcgagggcaacgagacgcccgggggcuacugccugacccgguggaugcugaucgaggccgagcucaagugcuucgggaacaccgccguggccaagugcaacgagaagcacgacgaggaguucugcgacaugcugcgccuguucgacuucaacaagcaggcgauccggcgccucaagaccgaggcccagauguccauccagcugaucaacaaggccgucaacgcccugaucaacgaccagcucaucaugaagaaccaccuccgggacaucaugugcauccccuacugcaacuacagcaaguacugguaccugaaccacacggugaccgggaagaccucccugccccgcugcuggcuggugagcaacggcuccuaccugaacgagacccacuucagcgacgacaucgagcagcaggccgacaacaugaucacggagcuccugcagaaggaguacaucgaccggcagggcaagaccccgcuggggcucgucgaccuguucguguucuccaccagcuucuaccugaucuccaucuuccugcaccucgugaagaucccgacccaccgccacaucacgggcaagcccugccccaagccccaccggcugaaccacauggggaucugcagcugcggccuguacaagcacccggggguccccgugaaguggaagcgcugaggacuagucccuguucccagagcccacuuuuuuuucuuuuuuugaaauaaaauagccugucuuucagaucucaaaggcucuuuucagagccaccaaaaaaaaaaaaaaaaaaaaaaaaaaaaaaaaaaaaaaaaaaaaaaaaaaaaaaaaaaaaaaaaagaauu

SEQ ID NO: 34992 - RNA, 1714 nt, Artificial Sequence
  mRNA product Design a-1 (hSL-A64-N5) comprising derived and/or modified sequence from LASV(Lassa virus/H.sapiens-wt/NGA/2016/ISTH_0009;Clade II)__AVO03571__GPCmut9 (opt1)
aggagagucccgcagucggcguccagcggcucugcuuguucgugugugugucguugcaggccuuauucaagcuuaccaugggccagaucaucaccuucuuccaggaggugccccacgucaucgaggaggugaugaacaucgugcugaucgcccucagccugcuggccauccucaaggggaucuacaacgucgcgaccugcggccugcuggggcucguguccuuccugcugcucugcggccgcagcugcuccacgaccuacaaggggguguacgagcugcagacccuggagcucgacauggccagccugaacaugaccaugccgcuguccugcacgaagaacaacagccaccacuacaucauggucggcaacgagaccggccucgagcugacccugaccaacacguccaucaucaaccacaaguucugcaaccucagcgacgcccacaagaagaaccuguacgaccacgcccugauguccaucaucagcaccuuccaccucuccauccccaacuucaaccaguacgaggccaugagcugcgacuucaacgggggccggaucuccgugcaguacaaccugagccacuccuacgcgguggacgccgccaaccacugcgggaccaucgccaacggcguccugcagaccuucaugcgcauggcguggggcgggagcuacaucgcccucgacuccggcugcgggagcugggacugcaucaugacguccuaccaguaccugaucauccagaacaccaccugggaggaccacugccaguucagccggcccagccccaucggcuaccuggggcuccugucccagcgcacccgggacaucuacaucagccgccggcugcucggcacguucaccuggacccuguccgacagcgagggcaacgagacccccgggggcuacugccugacgcgcuggaugcucaucgaggccgagcugaagugcuucgggaacaccgccguggccaagugcaacgagaagcacgacgaggaguucugcgacaugcugcggcuguucgacuucaacaagcaggcgauccgccggcugaagaccgaggcccagauguccauccagcugaucaacaaggccgugaacgcccucaucaacgaccagcugaucaugaagaaccaccuccgcgacaucaugugcaucccguacugcaacuacagcaaguacugguaccucaaccacaccgucacggggaagaccucccugccccggugcuggcuggugagcaacggcuccuaccucaacgagacccacuucagcgacgacaucgagcagcaggccgacaacaugaucaccgagcugcugcagaaggaguacaucgaccgccagggcaagacgccccucgggcugguggaccuguucgucuucuccaccagcuucuaccugaucuccaucuuccuccaccuggugaagaucccgacccaccggcacaucaccggcaagcccugccccaagccccaccgccugaaccacauggggaucugcagcugcggccucuacaaccacccgggggugcccgucaaguggaagcggugaggacuagucccuguucccagagcccacuuuuuuuucuuuuuuugaaauaaaauagccugucuuucagaucucaaaggcucuuuucagagccaccaaaaaaaaaaaaaaaaaaaaaaaaaaaaaaaaaaaaaaaaaaaaaaaaaaaaaaaaaaaaaaaaagaauu

SEQ ID NO: 34993 - RNA, 1714 nt, Artificial Sequence
  mRNA product Design a-1 (hSL-A64-N5) comprising derived and/or modified sequence from LASV(Lassa virus/H.sapiens-wt/NGA/2016/ISTH_0017;Clade II)__AVO03567__GPCmut9 (opt1)
aggagagucccgcagucggcguccagcggcucugcuuguucgugugugugucguugcaggccuuauucaagcuuaccaugggccagaucaucaccuucuuccaggaggugccccacgucaucgaggaggugaugaacaucgugcugaucgcccucagccugcuggccauccucaaggggaucuacaacgucgcgaccugcggccuguucgggcugguguccuuccuccugcugugcggccgcagcugcuccacgaccuacaaggggguguacgagcuccagacccuggagcuggacauggccagccucaacaugaccaugccgcuguccugcacgaagaacaacagccaccacuacaucauggucggcaacgagaccggccuggagcucacccugaccaacacguccaucaucaaccacaaguucugcaaccugagcgacgcccacaagaagaaccucuacgaccacgcccugauguccaucaucagcaccuuccaccuguccauccccaacuucaaccaguacgaggccaugagcugcgacuucaacgggggcaagaucuccgugcaguacaaccucagccacaccuacgcgaucgacgccgccaaccacugcgggaccaucgccaacggcgugcugcagacguucaugcggauggcguggggcggguccuacaucgcccuggacagcggcugcggguccugggacugcaucaugaccagcuaccaguaccucaucauccagaacaccaccugggaggaccacugccaguucucccgccccagccccaucggcuaccuggggcugcucagccagcggacgcgcgacaucuacaucucccggcgccugcugggcaccuucaccuggacccucagcgacuccgagggcaacgagacgcccgggggcuacugccugacccgguggaugcugaucgaggccgagcucaagugcuucgggaacaccgccgucgccaagugcaacgagaagcacgacgaggaguucugcgacaugcugcgccuguucgacuucaacaagcaggcgauccggcgccucaagaccgaggcccagaugagcauccagcugaucaacaaggccgugaacgcccugaucaacgaccagcucaucaugaagaaccaccuccgggacaucaugugcauccccuacugcaacuacuccaaguacugguaccugaaccacacggugaccgggaagaccagccugccccgcugcuggcuggucuccaacggcagcuaccugaacgagacccacuucuccgacgacaucgagcagcaggccgacaacaugaucacggagcuccugcagaaggaguacauggaccggcagggcaagaccccgcuggggcucguggaccuguucguguucagcaccuccuucuaccugaucagcaucuuccugcaccucguccgcaucccgacccaccggcacgugaucggcaagcccugccccaagccccaccgccugaaccacauggggaucugcuccugcggccuguacaagcacccgggggugcccgucaaguggaagcggugaggacuagucccuguucccagagcccacuuuuuuuucuuuuuuugaaauaaaauagccugucuuucagaucucaaaggcucuuuucagagccaccaaaaaaaaaaaaaaaaaaaaaaaaaaaaaaaaaaaaaaaaaaaaaaaaaaaaaaaaaaaaaaaaagaauu

SEQ ID NO: 34994 - RNA, 1714 nt, Artificial Sequence
  mRNA product Design a-1 (hSL-A64-N5) comprising derived and/or modified sequence from LASV(Lassa virus/H.sapiens-wt/NGA/2018/ISTH_0959;Clade II)__AVV65099__GPCmut9 (opt1)
aggagagucccgcagucggcguccagcggcucugcuuguucgugugugugucguugcaggccuuauucaagcuuaccaugggccagaucaucaccuucuuccaggaggugccccacgucaucgaggaggugaugaacaucgugcugaucgcccucagccugcuggccauccucaaggggaucuacaacgucgugaccugcggccuguucgggcugguguccuuccuccugcugugcggccgcagcugcuccacgaccuacaagggggucuacgagcuccagacccuggagcuggacauggcgagccucaacaugaccaugccgcuguccugcacgaagaacaacagccaccacuacaucauggugggcaacgagaccggccuggagcucacccugaccaacacguccaucaucaaccacaaguucugcaaccugagcgacgcccacaagaagaaccucuacgaccacgcccugauguccaucaucagcaccuuccaccuguccauccccaacuucaaccaguacgaggccaugagcugcgacuucaacgggggcaagaucuccgugcaguacaaccucagccacgccuacgcgaucgacgccgccaaccacugcgggaccaucgccaacggcguccugcagaccuucaugcggauggcguggggcggguccuacaucgcccuggacagcggcugcggguccugggacugcaucaugacgagcuaccaguaccucaucauccagaacaccaccugggaggaccacugccaguucucccgccccagccccaucggcuaccuggggcugcucagccagcggacccgcgacaucuacaucucccggcgccugcugggcacguucaccuggacccucagcgacuccgagggcaacgagacccccgggggcuacugccugacgcgguggaugcugaucgaggccgagcucaagugcuucgggaacaccgccguggccaagugcaacgagaagcacgacgaggaguucugcgacaugcugcgccuguucgacuucaacaagcaggcgauccggcgccucaagaccgaggcccagaugagcauccagcugaucaacaaggccgugaacgcccugaucaacgaccagcucaucaugaagaaccaccuccgggacaucaugugcaucccguacugcaacuacuccaaguacugguaccugaaccacaccgucacggggaagaccagccugccccgcugcuggcugguguccaacggcagcuaccugaacgagacccacuucuccgacgacaucgagcagcaggccgacaacaugaucaccgagcuccugcagaaggaguacaucgaccggcagggcaagacgccccuggggcucguggaccuguucgucuucagcaccuccuucuaccugaucagcaucuuccugcaccucgugaagaucccgacccaccgccacgugaucggcaagcccugccccaagccccaccggcugaaccacauggggaucugcuccugcggccuguacaagcacccggggguccccgugaaguggaagcgcugaggacuagucccuguucccagagcccacuuuuuuuucuuuuuuugaaauaaaauagccugucuuucagaucucaaaggcucuuuucagagccaccaaaaaaaaaaaaaaaaaaaaaaaaaaaaaaaaaaaaaaaaaaaaaaaaaaaaaaaaaaaaaaaaagaauu

SEQ ID NO: 34995 - RNA, 1714 nt, Artificial Sequence
  mRNA product Design a-1 (hSL-A64-N5) comprising derived and/or modified sequence from LASV(LASV003-NIG-2008;Clade II)__AIT17580__GPCmut9 (opt1)
aggagagucccgcagucggcguccagcggcucugcuuguucgugugugugucguugcaggccuuauucaagcuuaccaugggccagaucaucaccuucuuccaggaggugccccacgucaucgaggaggugaugaacaucgugcugaucgcccucagccugcuggccauccucaaggggaucuacaacgucgcgaccugcggccuguucgggcugguguccuuccuccugcugugcggccgcagcugcuccacgaccuacaaggggguguacgagcuccagacccuggagcuggacauggccagccucaacaugaccaugccgcuguccugcacgaagaacaacagccaccacuacaucauggucggcaacgagaccggccuggagcucacccugaccaacacguccaucaucaaccacaaguucugcaaccugagcgacgcccacaagaagaaccucuacgaccacgcccugauguccaucaucagcaccuuccaccuguccauccccaacuucaaccaguacgaggccaugagcugcgacuucaacgggggcaagaucuccgugcaguacaaccucagccacaccuacgcgguggacgccgccaaccacugcgggaccaucgccaacggcguccugcagacguucaugcggauggcguggggcggguccuacaucgcccuggacagcggcugcggguccugggacugcaucaugaccagcuaccaguaccucaucauccagaacaccaccugggaggaccacugccaguucucccgccccagccccaucggcuaccuggggcugcucagccagcggacgcgcgacaucuacaucucccggcgccugcugggcaccuucaccuggacccucagcgacuccgagagcaacgagacgccgggcggguacugccugacccgguggaugcugaucgaggccgagcucaagugcuucggcaacaccgccguggccaagugcaacgagaagcacgacgaggaguucugcgacaugcugcgccuguucgacuucaacaagcaggcgauccggcgccucaaggccgaggcccagauguccauccagcugaucaacaaggccgugaacgcccugaucaacgaccagcucaucaugaagaaccaccuccgggacaucaugugcauccccuacugcaacuacagcaaguacugguaccugaaccacaccgucacgggccgcaccucccugccccggugcuggcuggugagcaacggguccuaccugaacgagacccacuucagcgacgacaucgagcagcaggcggacaacaugaucaccgagcuccugcagaaggaguacauggaccgccagggcaagacgccccugggccucguggaccuguucgucuucuccaccagcuucuaccugaucuccaucuuccugcaccucgugaagaucccgacccaccggcacgugaucgggaagcccugccccaagccccaccgccugaaccacaugggcaucugcagcugcgggcuguacaagcacccgggcguccccgugaaguggaagcggugaggacuagucccuguucccagagcccacuuuuuuuucuuuuuuugaaauaaaauagccugucuuucagaucucaaaggcucuuuucagagccaccaaaaaaaaaaaaaaaaaaaaaaaaaaaaaaaaaaaaaaaaaaaaaaaaaaaaaaaaaaaaaaaaagaauu

SEQ ID NO: 34996 - RNA, 1714 nt, Artificial Sequence
  mRNA product Design a-1 (hSL-A64-N5) comprising derived and/or modified sequence from LASV(LASV035-NIG-2009;Clade II)__AIT17588__GPCmut9 (opt1)
aggagagucccgcagucggcguccagcggcucugcuuguucgugugugugucguugcaggccuuauucaagcuuaccaugggccagaucaucaccuucuuccaggaggugccccacgucaucgaggaggugaugaacaucgugcugaucgcccucagccugcuggccauccucaaggggaucuacaacgucgcgaccugcggccuguucgggcugguguccuuccuccugcugugcggccgcagcugcuccacgaccuacaaggggguguacgagcuccagacccuggagcuggacauggccagccucaacaugaccaugccgcuguccugcacgaagaacaacagccaccacuacaucauggucggcaacgagaccggccuggagcucacccugaccaacacguccaucaucaaccacaaguucugcaaccugagcgacgcccacaagaagaaccucuacgaccacgcccugauguccaucaucagcaccuuccaccuguccauccccaacuucaaccaguacgaggccaugagcugcgacuucaacgggggcaagaucuccgugcaguacaaccucagccacgcguacgccguggacgccgccaaccacugcgggaccaucgcgaacggcguccugcagaccuucaugcggauggccuggggcggguccuacaucgcccuggacagcggcugcggguccugggacugcaucaugacgagcuaccaguaccucaucauccagaacaccaccugggaggaccacugccaguucucccgccccagccccaucggcuaccuggggcugcucagccagcggacccgcgacaucuacaucucccggcgccugcugggcacguucaccuggacccucagcgacuccgagggcaacgagacccccgggggcuacugccugacgcgguggaugcugaucgaggccgagcucaagugcuucgggaacaccgccguggcgaagugcaacgagaagcacgacgaggaguucugcgacaugcugcgccuguucgacuucaacaagcaggccauccggcgccucaaggccgaggcccagaugagcauccagcugaucaacaaggccgugaacgcgcugaucaacgaccagcucaucaugaagaaccaccuccgggacaucaugugcauccccuacugcaacuacuccaaguacugguaccugaaccacaccgucaccgggaagacgagccugccccgcugcuggcugguguccaacggcagcuaccugaacgagacccacuucuccgacgacaucgagcagcaggccgacaacaugaucaccgagcuccugcagaaggaguacaucgaccggcagggcaagaccccgcuggggcucguggaccuguucgucuucagcacguccuucuaccugaucagcaucuuccugcaccucgugaagaucccgacccaccgccacgugaucggcaagcccugccccaagccccaccggcugaaccacauggggaucugcuccugcggccuguacaagcacccggggguccccgugaaguggaagcgcugaggacuagucccuguucccagagcccacuuuuuuuucuuuuuuugaaauaaaauagccugucuuucagaucucaaaggcucuuuucagagccaccaaaaaaaaaaaaaaaaaaaaaaaaaaaaaaaaaaaaaaaaaaaaaaaaaaaaaaaaaaaaaaaaagaauu

SEQ ID NO: 34997 - RNA, 1714 nt, Artificial Sequence
  mRNA product Design a-1 (hSL-A64-N5) comprising derived and/or modified sequence from LASV(LASV1000-NIG-2009;Clade II)__AIT17782__GPCmut9 (opt1)
aggagagucccgcagucggcguccagcggcucugcuuguucgugugugugucguugcaggccuuauucaagcuuaccaugggccagaucaucaccuucuuccaggaggugccccacgucaucgaggaggugaugaacaucgugcugaucgcccucagccugcuggccauccucaaggggaucuacaacgucgcgaccugcggccuguucgggcugguguccuuccuccugcugugcggccgcagcugcuccacgaccuacaaggggguguacgagcuccagacccuggagcuggacauggccagccucaacaugaccaugccgcuguccugcacgaagaacaacagccaccacuacaucauggucggcaacgagaccggccuggagcucacccugaccaacacguccaucaucaaccacaaguucugcaaccugagcgacgcccacaagaagaaccucuacgaccacgcccugauguccaucaucagcaccuuccaccuguccauccccaacuucaaccaguacgaggccaugagcugcgacuucaacgggggcaagaucuccgugcaguacaaccucagccacaccuacgcgguggacgccgccaaccacugcgggaccaucgccaacggcguccugcagacguucaugcggauggcguggggcggguccuacaucgcccuggacagcggcugcggguccugggacugcaucaugaccagcuaccaguaccucaucauccagaacaccaccugggaggaccacugccaguucucccgccccagccccaucggcuaccuggggcugcucagccagcggacgcgcgacaucuacaucucccggcgccugcugggcaccuucaccuggacccucagcgacuccgagggcaacgagacgcccgggggcuacugccugacccgguggaugcugaucgaggccgagcucaagugcuucgggaacaccgccguggccaagugcaacgagaagcacgacgaggaguucugcgacaugcugcgccuguucgacuucaacaagcaggcgaucaagcggcucaagaccgaggcccagaugagcauccagcugaucaacaaggccgugaacgcccugaucaacgaccagcucaucaugaagaaccaccuccgcgacaucaugugcauccccuacugcaacuacuccaaguacugguaccugaaccacacggucaccgggaagaccagccugccccggugcuggcugguguccaacggcagcuaccugaacgagacccacuucuccgacgacaucgagcagcaggccgacaacaugaucacggagcuccugcagaaggaguacaucgaccgccagggcaagaccccgcuggggcucguggaccuguucgucuucagcaccuccuucuaccugaucagcaucuuccugcaccucgugaagaucccgacccaccggcacguggucggcaagcccugccccaagccccaccgccugaaccacauggggaucugcuccugcggccuguacaagcacccgggggugcccgugaaguggaagcggugaggacuagucccuguucccagagcccacuuuuuuuucuuuuuuugaaauaaaauagccugucuuucagaucucaaaggcucuuuucagagccaccaaaaaaaaaaaaaaaaaaaaaaaaaaaaaaaaaaaaaaaaaaaaaaaaaaaaaaaaaaaaaaaaagaauu

SEQ ID NO: 34998 - RNA, 1714 nt, Artificial Sequence
  mRNA product Design a-1 (hSL-A64-N5) comprising derived and/or modified sequence from LASV(LASV221-NIG-2010;Clade II)__AIT17624__GPCmut9 (opt1)
aggagagucccgcagucggcguccagcggcucugcuuguucgugugugugucguugcaggccuuauucaagcuuaccaugggccagaucaucaccuucuuccaggaggugccccacgucaucgaggaggugaugaacaucgugcugaucgcccucagccugcuggccauccucaaggggaucuacaacgucgcgaccugcggccuguucgggcugguguccuuccuccugcugugcggccgcagcugcuccacgaccuacaaggggguguacgagcuccagacccuggagcuggacauggccagccucaacaugaccaugccgcuguccugcacgaagaacaacagccaccacuacaucauggucggcaacgagaccggccuggagcucacccugaccaacacguccaucaucaaccacaaguucugcaaccugagcgacgcccacaagaagaaccucuacgaccacgcccugauguccaucaucagcaccuuccaccuguccauccccaacuucaaccaguacgaggccaugagcugcgacuucaacgggggcaagaucuccgugcaguacaaccucagccacaccuacgcgaucgacgccgccaaccacugcgggaccaucgccaacggcgugcugcagacguucaugcggauggcguggggcggguccuacaucgcccuggacagcggcugcggguccugggacugcaucaugaccagcuaccaguaccucaucauccagaacaccaccugggaggaccacugccaguucucccgccccagccccaucggcuaccuggggcugcucagccagcggacgcgcgacaucuacaucucccggcgccugcugggcaccuucaccuggacccucagcgacuccgagggcaacgagacgcccgggggcuacugccugacccgguggaugcugaucgaggccgagcucaagugcuucgggaacaccgccgucgccaagugcaacgagaagcacgacgaggaguucugcgacaugcugcgccuguucgacuucaacaagcaggcgauccggcgccucaagaccgaggcccagaugagcauccagcugaucaacaaggccgugaacgcccugaucaacgaccagcucaucaugaagaaccaccuccgggacaucaugugcauccccuacugcaacuacuccaaguacugguaccugaaccacacggugaccgggaagaccagccugccccgcugcuggcuggucuccaacggcagcuaccugaacgagacccacuucuccgacgacaucgagcagcaggccgacaacaugaucacggagaugcuccagaaggaguacauggaccggcagggcaagaccccgcuggggcugguggaccucuucguguucagcaccuccuucuaccugaucagcaucuuccugcaccuggucaagaucccgacccaccgccacgugaucggcaagcccugccccaagccccaccggcucaaccacauggggaucugcuccugcggccuguacaagcacccgggggugcccgucaaguggaagcgcugaggacuagucccuguucccagagcccacuuuuuuuucuuuuuuugaaauaaaauagccugucuuucagaucucaaaggcucuuuucagagccaccaaaaaaaaaaaaaaaaaaaaaaaaaaaaaaaaaaaaaaaaaaaaaaaaaaaaaaaaaaaaaaaaagaauu

SEQ ID NO: 34999 - RNA, 1714 nt, Artificial Sequence
  mRNA product Design a-1 (hSL-A64-N5) comprising derived and/or modified sequence from LASV(LASV237-NIG-2010;Clade II)__AIT17638__GPCmut9 (opt1)
aggagagucccgcagucggcguccagcggcucugcuuguucgugugugugucguugcaggccuuauucaagcuuaccaugggccagaucaucaccuucuuccaggaggugccccacgucaucgaggaggugaugaacaucgugcugaucgcccucagccugcuggccauccucaaggggaucuacaacgucgcgaccugcggccuguucgggcugguguccuuccuccugcugugcggccgcagcugcuccacgaccuacaaggggguguacgagcuccagacccuggagcuggacauggccagccucaacaugaccaugccgcuguccugcacgaagaacaacagccaccacuacaucauggucggcaacgagaccggccuggagcucacccugaccaacacguccaucaucaaccacaaguucugcaaccugagcgacgcccacaagaaggaccucuacgaccacgcccugauguccaucaucagcaccuuccaccuguccauccccaacuucaaccaguacgaggccaugagcugcgacuucaacgggggcaagaucuccgugcaguacaaccucagccacaccuacgcgguggacgccgccaaccacugcgggaccaucgccaacggcguccugcagacguucaugcggauggcguggggcggguccuacaucgcccuggacagcggcugcggguccugggacugcaucaugaccagcuaccaguaccucaucauccagaacaccaccugggaggaccacugccaguucucccgccccagccccaucggcuaccuggggcugcucagccagcggacgcgcgacaucuacaucucccggcgccugcugggcaccuucaccuggacccucagcgacuccgagggcaacgagacgcccgggggcuacugccugacccgguggaugcugaucgaggccgagcucaagugcuucgggaacaccgccguggccaagugcaacgagaagcacgacgaggaguucugcgacaugcugcgccuguucgacuucaacaagcaggcgauccggcgccucaagaccgaggcccagaugagcauccagcugaucaacaaggccgugaacgcccugaucaacgaccagcucaucaugaagaaccaccuccgggacaucaugugcauccccuacugcaacuacuccaaguacugguaccugaaccacacggucaccgggaagaccagccugccccgcugcuggcugguguccaacggcagcuaccugaacgagacccacuucuccgacgacaucgagcagcaggccgacaacaugaucacggagcuccugcagaaggaguacauggaccggcagggcaagaccccgcuggggcucguggaccuguucgucuucagcaccuccuucuaccugaucagcaucuuccugcaccucaucaagaucccgacccaccgccacaucacgggcaagcccugccccaagccccaccggcugaaccacauggggaucugcuccugcggccuguacaagcacccgggggugcccgugaaguggaagcgcugaggacuagucccuguucccagagcccacuuuuuuuucuuuuuuugaaauaaaauagccugucuuucagaucucaaaggcucuuuucagagccaccaaaaaaaaaaaaaaaaaaaaaaaaaaaaaaaaaaaaaaaaaaaaaaaaaaaaaaaaaaaaaaaaagaauu

SEQ ID NO: 35000 - RNA, 1714 nt, Artificial Sequence
  mRNA product Design a-1 (hSL-A64-N5) comprising derived and/or modified sequence from LASV(LASV253-NIG-2011;Clade II)__AIT17670__GPCmut9 (opt1)
aggagagucccgcagucggcguccagcggcucugcuuguucgugugugugucguugcaggccuuauucaagcuuaccaugggccagaucaucaccuucuuccaggaggugccccacgucaucgaggaggugaugaacaucgugcugaucgcccucagccugcuggccauccucaaggggaucuacaacgucgcgaccugcggccuguucgggcugguguccuuccuccugcugugcggccgcagcugcuccacgaccuacaaggggguguacgagcuccagacccuggagcuggacauggccagccucaacaugaccaugccgcuguccugcacgaagaacaacagccaccacuacaucauggucggcaacgagaccggccuggagcucacccugaccaacacguccaucaucaaccacaaguucugcaaccugagcgacgcccacaagaagaaccucuacgaccacgcccugauguccaucaucagcaccuuccaccuguccauccccaacuucaaccaguacgaggccaugagcugcgacuucaacgggggcaagaucuccgugcaguacaaccucagccacaccuacgcgguggacgccgccaaccacugcgggaccaucgccaacggcguccugcagacguucaugcggauggcguggggcggguccuacaucgcccuggacagcggcugcggguccugggacugcaucaugaccagcuaccaguaccucaucauccagaacaccaccugggaggaccacugccaguucucccgccccagccccaucggcuaccuggggcugcucagccagcggacgcgcgacaucuacaucucccggcgccugcugggcaccuucaccuggacccucagcgacuccgagggcaacgagacgcccgggggcuacugccugacccgguggaugcugaucgaggccgagcucaagugcuucgggaacaccgccguggccaagugcaacgagaagcacgacgaggaguucugcgacaugcugcgccuguucgacuucaacaagcaggcgauccggcgccucaaggccgaggcccagaugagcauccagcugaucaacaaggccgugaacgcccugaucaacgaccagcucaucaugaagaaccaccuccgggacaucaugugcaucccguacugcaacuacuccaaguacugguaccugaaccacaccgucacggggcgcaccagccugccccggugcuggcugguguccaacggcagcuaccugaacgagacccacuucuccgacgacaucgagcagcaggcggacaacaugaucaccgagcuccugcagaaggaguacaucgaccgccagggcaagacgccccuggggcucguggaccuguucgucuucagcaccuccuucuaccugaucagcaucuuccugcaccucgugaagaucccgacccaccggcacaucaucggcaagcccugccccaagccccaccgccugaaccacauggggaucugcuccugcggccuguacaagcacccgggggugcccgucaaguggaagcggugaggacuagucccuguucccagagcccacuuuuuuuucuuuuuuugaaauaaaauagccugucuuucagaucucaaaggcucuuuucagagccaccaaaaaaaaaaaaaaaaaaaaaaaaaaaaaaaaaaaaaaaaaaaaaaaaaaaaaaaaaaaaaaaaagaauu

SEQ ID NO: 35001 - RNA, 1714 nt, Artificial Sequence
  mRNA product Design a-1 (hSL-A64-N5) comprising derived and/or modified sequence from LASV(LASV254-NIG-2011;Clade II)__AIT17674__GPCmut9 (opt1)
aggagagucccgcagucggcguccagcggcucugcuuguucgugugugugucguugcaggccuuauucaagcuuaccaugggccagaucaucaccuucuuccaggaggugccccacgucaucgaggaggugaugaacaucgugcugaucgcccucagccugcuggccauccucaaggggaucuacaacgucgcgaccugcggccuguucgggcugguguccuuccuccugcugugcggccgcagcugcuccacgaccuacaaggggguguacgagcuccagacccuggagcuggacaugaccaaccucaacaugacgaugccgcugagcugcaccaagaacaacucccaccacuacaucauggucggcaacgagaccggccuggagcucacccugacgaacaccagcaucaucaaccacaaguucugcaaccuguccgacgcccacaagaagaaccucuacaaccacgcccugaugagcaucaucuccaccuuccaccugagcauccccaacuucaaccaguacgaggccauguccugcgacuucaacgggggcaagaucagcgugcaguacaaccucucccacagcuacgccguggacgcggccaaccacugcgggaccaucgccaacggcguccugcagacguucaugcggauggccuggggcggguccuacaucgcgcuggacagcggcugcgggaacugggacugcaucaugaccuccuaccaguaccucaucauccagaacaccaccugggaggaccacugccaguucagccgccccucccccaucggcuaccuggggcugcucagccagcggacgcgcgacaucuacaucagccggcgccugcugggcaccuucaccuggacccucuccgacagcgagggcaacgagacgcccgggggcuacugccugacccgguggaugcugaucgaggccgagcucaagugcuucgggaacaccgccguggccaagugcaacgagaagcacgacgaggaguucugcgacaugcugcgccuguucgacuucaacaagcaggccauccggcgccucaagaccgaggcgcaggccaacauccagcugaucaacaaggccgugaacgcccugaucaacgaccagcucaucaugaagaaccaccuccgggacaucaugugcauccccuacugcaacuacuccaaguacugguaccugaaccacacggucaccgggaagaccagccugccccgcugcuggcugguguccaacggcagcuaccugaacgagacccacuucuccgacgacaucgagcagcaggccgacaacaugaucacggagcuccugcagaaggaguacauggaccggcagggcaagaccccgcuggggcucguggaccuguucgucuucagcaccuccuucuaccugaucagcaucuuccugcaccucgugaagaucccgacccaccgccacgugaucggcaagcccugccccaagccccaccggcugaaccacauggggaucugcuccugcggccuguacaagcacccggggguccccgugaaguggaagcgcugaggacuagucccuguucccagagcccacuuuuuuuucuuuuuuugaaauaaaauagccugucuuucagaucucaaaggcucuuuucagagccaccaaaaaaaaaaaaaaaaaaaaaaaaaaaaaaaaaaaaaaaaaaaaaaaaaaaaaaaaaaaaaaaaagaauu

SEQ ID NO: 35002 - RNA, 1714 nt, Artificial Sequence
  mRNA product Design a-1 (hSL-A64-N5) comprising derived and/or modified sequence from LASV(Nig08-A19;Clade III)__ADU56618__GPCmut9 (opt1)
aggagagucccgcagucggcguccagcggcucugcuuguucgugugugugucguugcaggccuuauucaagcuuaccaugggccagaucgugaccuucuuccaggaggucccccacgugaucgaggaggugaugaacaucguccugaucgcccucagcauccuggccauccugaaggggcucuacaacaucgcgaccugcggccugaucgggcuggugacguuccuccugcuguccggccgcagcugcuccaugaccuacaaggggguguacgagcuccagacccuggagcugaacaugaacacccucaacaugacgaugccgcugagcugcaccaagaacaacucccaccacuacaucauggucggcaacgagaccggccuggagcucacccugacgaacaccagccugcuccaccacaaguucugcaaccuguccgacgcccacaagaagaaccuguacgaccacacccucaugagcaucaucuccaccuuccaccugagcauccccaacuucaaccaguacgaggccauguccugcgacuucaacgggggcaagaucacggugcaguacaaccugagccacuccuacgccaucgacgccgcgaaccacugcgggaccguggccaacggcguccuccagaccuucaugcggauggccuggggcgggagcuacaucgcccuggacuccggcugcgggaagugggacugcaucaugaccagcuaccaguaccugaucauccagaacacgaccugggaggaccacugccaguucucccggcccagccccaucggcuaccucgggcugcugucccagcgcacccgggacaucuacaucagccgccggcuccugggcaccuucacguggacccugagcgacuccgagggcaacgagacccccgggggcuacugccucacccgcuggaugcugaucgaggcggagcugaagugcuucgggaacacggccguggccaagugcaacgagaagcacgacgaggaguucugcgacaugcuccggcuguucgacuucaacaagcaggccauccgccggcugaaggccgaggcgcagaugagcauccagcucaucaacaaggccgugaacgcccugaucaacgaccagcugaucaugaagaaccaccuccgcgacaucaugugcauccccuacugcaacuacuccaaguacugguaccugaaccacaccagcaccgggcggaccucccugccccgcugcuggcucgucagcaacggcuccuaccugaacgagacgcacuucagcgacgacaucgagcagcaggccgacaacaugaucaccgagaugcugcagaaggaguaccucgaccggcagggcaagaccccgcuggggcugguggaccuguucguguucuccaccagcuucuaccucaucuccaucuuccugcaccuggucaagaucccgacgcaccgccacaucgugggcaagcccugccccaagccccaccggcucaaccacauggggaucugcagcugcggccuguacaagcagccgggggugcccguccgcuggaagcggugaggacuagucccuguucccagagcccacuuuuuuuucuuuuuuugaaauaaaauagccugucuuucagaucucaaaggcucuuuucagagccaccaaaaaaaaaaaaaaaaaaaaaaaaaaaaaaaaaaaaaaaaaaaaaaaaaaaaaaaaaaaaaaaaagaauu

SEQ ID NO: 35003 - RNA, 1717 nt, Artificial Sequence
  mRNA product Design a-1 (hSL-A64-N5) comprising derived and/or modified sequence from LASV(G1180-SLE-2010;Clade IV)__AIT17168__GPCmut9 (opt1)
aggagagucccgcagucggcguccagcggcucugcuuguucgugugugugucguugcaggccuuauucaagcuuaccaugggccagaucgugaccuucuuccaggaggucccccacgugaucgaggaggugaugaacaucguccugaucgcccucagcauccuggccgugcugaaggggcucuacaacuucgcgaccugcggccugguggggcugcucaccuuccugcugcucugcggccgcuccugcaccgccagccgguacaagggggucuacgagcugcagacccuggagcucaacauggagacccugaacaugacgaugccgcuguccugcaccaagaacaacagccaccacuacaucauggugggcaacgagaccggccucgagcugacccugacgaacaccuccaucaucaaccacaaguucugcaaccucagcgacgcccacaagaagaaccuguacgaccacgcccugauguccaucaucagcaccuuccaccucuccauccccaacuucaaccaguacgaggccaugagcugcgacuucaacgggggcaagaucuccgugcaguacaaccugagccacuccuacgcgggggacgccgccaaccacugcggcaccgucgccaacggggugcugcagacguucaugcgcauggcguggggcggcagcuacaucgcccucgacuccgggugcggcagcugggacugcaucaugaccuccuaccaguaccugaucauccagaacaccaccugggaggaccacugccaguucagccggcccucccccaucggguaccugggccuccugagccagcgcacgcgggacaucuacaucagccgccggcugcucggcaccuucaccuggacccuguccgacagcgaggggaaggacacgccgggcggguacugccugacccgcuggaugcucaucgaggccgagcugaagugcuucggcaacaccgccguggccaagugcaacgagaagcacgacgaggaguucugcgacaugcugcggcuguucgacuucaacaagcaggcgauccagcgccugaaggccgaggcccagauguccauccagcugaucaacaaggccgucaacgcccucaucaacgaccagcugaucaugaagaaccaccuccgggacaucaugugcauccccuacugcaacuacagcaaguacugguaccucaaccacaccacgaccggcaagaccucccugcccaagugcuggcuggugagcaacggcuccuaccucaacgagacccacuucagcgacgacaucgagcagcaggcggacaacaugaucacggagaugcugcagaaggaguacauggagcgccaggggaagacgccccugggccucguggaccuguucgucuucuccaccagcuucuaccugaucuccaucuuccugcaccucgugaagaucccgacccaccggcacaucgugggcaagagcugccccaagccccaccgccugaaccacauggggaucugcuccugcgggcuguacaagcagcccggcgucccggugaaguggaagcggugaggacuagucccuguucccagagcccacuuuuuuuucuuuuuuugaaauaaaauagccugucuuucagaucucaaaggcucuuuucagagccaccaaaaaaaaaaaaaaaaaaaaaaaaaaaaaaaaaaaaaaaaaaaaaaaaaaaaaaaaaaaaaaaaagaauu

SEQ ID NO: 35004 - RNA, 1717 nt, Artificial Sequence
  mRNA product Design a-1 (hSL-A64-N5) comprising derived and/or modified sequence from LASV(G1442-SLE-2011;Clade IV)__AIT17180__GPCmut9 (opt1)
aggagagucccgcagucggcguccagcggcucugcuuguucgugugugugucguugcaggccuuauucaagcuuaccaugggccagaucgugaccuucuuccaggaggucccccacgugaucgaggaggugaugaacaucguccugaucgcccucagcauccuggccgugcugaaggggcucuacaacguggcgaccugcggccugaucgggcuggucacguuccuccugcugugcggccgcuccugcaccaccacccucuacaaggggguguacgagcugcagacgcuggagcucaacauggagacccugaacaugaccaugccgcugagcugcaccaagaacaacucccaccacuacauccgggugggcaacgagacgggccucgagcugacccugaccaacaccagcaucaucaaccacaaguucugcaaccucuccgacgcccacaagaagaaccuguacgaccacgcccugaugagcaucaucuccacguuccaccucagcauccccaacuucaaccaguacgaggccauguccugcgacuucaacgggggcaagaucagcguccaguacaaccugucccacagcuacgccggggacgcggccaaccacugcggcaccguggccaacggggugcugcagaccuucaugcgcauggccuggggcggcuccuacaucgcgcucgacagcgggugcggcaacugggacugcaucaugaccuccuaccaguaccugaucauccagaacacgaccugggacgaccacugccaguucagccgccccucccccaucggguaccugggccuccugagccagcggacccgcgacgucuacaucucccggcgccugcucggcaccuucacguggacccugagcgacagcgaggggaaggacaccccgggcggguacugccugacccgguggaugcucaucgaggccgagcugaagugcuucggcaacacggccguggccaagugcaacgagaagcacgacgaggaguucugcgacaugcugcgccucuucgacuucaacaagcaggccauccagcggcugaaggcggaggcccagauguccauccagcugaucaacaaggccgugaacgcccucaucaacgaccagcugaucaugaagaaccaccuccgcgacaucaugugcauccccuacugcaacuacagcaaguacugguaccugaacaacaccgccaccggcaagaccucccugcccaagugcuggcugaucagcaacggcuccuaccucaacgagacgcacuucagcgacgacaucgagcaggaggcggacaacaugaucaccgagaugcugcagaaggaguacauggagcggcaggggaagacgccccugggccucgucgaccuguucguguucuccaccagcuucuaccugaucuccaucuuccugcaccucgugaagaucccgacccaccgccacaucgucggcaagagcugccccaagccccaccggcugaaccacauggggaucugcuccugcgggcuguacaagcagcccggcgugccggugcgcuggaagcggugaggacuagucccuguucccagagcccacuuuuuuuucuuuuuuugaaauaaaauagccugucuuucagaucucaaaggcucuuuucagagccaccaaaaaaaaaaaaaaaaaaaaaaaaaaaaaaaaaaaaaaaaaaaaaaaaaaaaaaaaaaaaaaaaagaauu

SEQ ID NO: 35005 - RNA, 1717 nt, Artificial Sequence
  mRNA product Design a-1 (hSL-A64-N5) comprising derived and/or modified sequence from LASV(G3010-SLE-2013;Clade IV)__AIT17344__GPCmut9 (opt1)
aggagagucccgcagucggcguccagcggcucugcuuguucgugugugugucguugcaggccuuauucaagcuuaccaugggccagaucgugaccuucuuccaggaggucccccacgugaucgaggaggugaugaacaucguccugaucgcccucagcauccuggccgugcugaaggggcucuacaacuucgcgaccugcggccugguggggcuggucacguuccuccugcugugcggccgcuccugcaccaccagccucuacaaggggguguacgagcugcagacccuggagcucaacauggagacgcugaacaugaccaugccgcuguccugcaccaagaacaacagccaccacuacaucauggugggcaacgagaccggccucgagcugacgcugaccaacaccuccaucaucaaccacaaguucugcaaccucagcgacgcccacaagaagaaccuguacaaccacgcccugauguccaucaucagcaccuuccaccucuccauccccaacuucaaccaguacgaggccaugagcugcgacuucaacgggggcaagaucuccguccaguacaaccugagccacuccuacgccggggacgcggccagccacugcggcacgguggccaacggggugcugcagaccuucaugcggauggccuggggcggcuccuacaucgcgcucgacagcgggugcggcaagugggacugcaucaugaccuccuaccaguaccugaucauccagaacaccacgugggaggaccacugccaguucagccgccccucccccaucggguaccugggccuccugagccagcggacccgcgacaucuacaucagccggcgccugcucggcaccuucaccuggacgcuguccgacagcgaggggaaggacaccccgggcggguacugccugacccgguggaugcucaucgaggccgagcugaagugcuucggcaacaccgccgucgccaagugcaacgagaagcacgacgaggaguucugcgacaugcugcgccucuucgacuucaacaagcaggccauccagcggcugaagacggaggcgcagauguccauccagcugaucaacaaggccgugaacgcccucaucaacgaccagcugaucaugaagaaccaccuccgcgacaucaugugcauccccuacugcaacuacagcaaguacugguaccugaaccacaccaccaccggcaagacgucccugcccaagugcuggcuggugagcaacggcuccuaccucaacgagacccacuucagcgacgacaucgagcagcaggccgacaacaugaucaccgagaugcugcagaaggaguacauggagcggcaggggaagacgccccugggccucgucgaccuguucguguucuccaccagcuucuaccugaucuccaucuuccugcaccucgugaagaucccgacccaccgccacaucgucggcaagagcugccccaagccccaccggcugaaccacauggggaucugcuccugcgggcuguacaagcagcccggcgugccggugcgcuggaagcggugaggacuagucccuguucccagagcccacuuuuuuuucuuuuuuugaaauaaaauagccugucuuucagaucucaaaggcucuuuucagagccaccaaaaaaaaaaaaaaaaaaaaaaaaaaaaaaaaaaaaaaaaaaaaaaaaaaaaaaaaaaaaaaaaagaauu

SEQ ID NO: 35006 - RNA, 1717 nt, Artificial Sequence
  mRNA product Design a-1 (hSL-A64-N5) comprising derived and/or modified sequence from LASV(G502-SLE-2009;Clade IV)__AIT17126__GPCmut9 (opt1)
aggagagucccgcagucggcguccagcggcucugcuuguucgugugugugucguugcaggccuuauucaagcuuaccaugggccagaucgugaccuucuuccaggaggucccccacgugaucgaggaggugaugaacaucguccugaucgcccucagcauccuggccgugcugaaggggcucuacaacuucgcgaccugcggccugguggggcugcucacguuccugcugcucugcggccgcuccugcaccaccgggcuguacaagggcgucuacgagcugcagacccucgagcugaacauggagacgcugaacaugaccaugccgcucagcugcaccaagaacaacucccaccacuacaucauggugggcaacgagaccgggcuggagcugacgcucaccaacaccagcaucaucaaccacaaguucugcaaccuguccgacgcccacaagaagaaccuguacgaccacgcccucaugagcaucaucuccaccuuccaccugagcauccccaacuucaaccaguacgaggccauguccugcgacuucaacggcgggaagaucagcgugcaguacaaccugucccacagcuacgccggcgacgcggccgaccacugcgggacggucgccaacggcgugcuccagaccuucaugcggauggccuggggcggguccuacaucgcgcuggacagcggcugcgggcggugggacugcaucaugaccuccuaccaguaccugaucauccagaacaccacgugggaggaccacugccaguucagccgccccucccccaucggcuaccucggccugcugagccagcggacccgcgacaucuacaucucccggcgccuccuggggaccuucaccuggacgcugagcgacagcgagggcaaggacacccccgggggcuacugccucacccgguggaugcugaucgaggccgagcugaagugcuucgggaacaccgccguggccaagugcaacgagaagcacgacgaggaguucugcgacaugcuccgccuguucgacuucaacaagcaggccauccagcggcugaaggcggaggcccagauguccauccagcucaucaacaaggccgucaacgcccugaucaacgaccagcuggugaugaagaaccaccuccgcgacaucaugugcauccccuacugcaacuacagccgguacugguaccugaaccacacgaccaccggccgcaccucccugcccaagugcuggcucgugagcaacggguccuaccugaacgagacgcacuucagcgacgacaucgagcagcaggccgacaacaugaucaccgagaugcugcagaaggaguacauggagcggcagggcaagaccccgcucgggcuggucgaccuguucguguucuccaccagcuucuaccugaucuccaucuuccuccaccuggugaagaucccgacgcaccgccacaucgucggcaagagcugccccaagccccaccggcugaaccacauggggaucugcuccugcggccucuacaagcagcccggcgugccggugaaguggaagcgcugaggacuagucccuguucccagagcccacuuuuuuuucuuuuuuugaaauaaaauagccugucuuucagaucucaaaggcucuuuucagagccaccaaaaaaaaaaaaaaaaaaaaaaaaaaaaaaaaaaaaaaaaaaaaaaaaaaaaaaaaaaaaaaaaagaauu

SEQ ID NO: 35007 - RNA, 1717 nt, Artificial Sequence
  mRNA product Design a-1 (hSL-A64-N5) comprising derived and/or modified sequence from LASV(G733-SLE-2010;Clade IV)__AIT17154__GPCmut9 (opt1)
aggagagucccgcagucggcguccagcggcucugcuuguucgugugugugucguugcaggccuuauucaagcuuaccaugggccagaucgugaccuucuuccaggaggucccccacgugaucgaggaggugaugaacaucguccugaucgcccucagcauccuggccgugcugaaggggcucuacaacuucgcgaccugcggcaucguggggcuggucuccuuccugcuccugugcggccgcagcugcacgaccucccuguacaaggggguguacgagcuccagacccuggagcugaacauggagacccucaacaugacgaugccgcugagcugcaccaagaacaacucccaccacuacaucauggugggcaacgagaccggccuggagcucacccugacgaacaccagcaucaucaaccacaaguucugcaaccuguccgacgcccacaagaagaaccucuacgaccacgcccugaugagcaucaucuccaccuuccaccugagcauccccaacuucaaccaguacgaggccauguccugcgacuucaacgggggcaagaucagcguccaguacaaccucucccacagcuacgccggggacgcggccaaccacugcggcaccaucgccaacggggugcugcagacguucaugcggauggccuggggcggcuccuacaucgcgcuggacagcgggugcgaccggugggacugcaucaugaccuccuaccaguaccucaucauccagaacaccaccugggaggaccacugccaguucagccgccccucccccaucggcuaccuggggcugcucagccagcggacgcgcgacaucuacaucagccggcgccugcugggcaccuucaccuggacccucuccgacagcgagggcaaggacacgcccgggggcuacugccugacccgguggaugcugaucgaggccgagcucaagugcuucgggaacaccgccguggccaagugcaacgagaagcacgacgaggaguucugcgacaugcugcgccuguucgacuucaacaagcaggccauccagcggcucaaggcggaggcccagauguccauccagcugaucaacaaggccgucaacgcccugaucaacgaccagcucaucaugaagaaccaccuccgcgacaucaugugcauccccuacugcaacuacagcaaguacugguaccugaaccacaccacgaccgggaagaccucccugcccaagugcuggcuggugagcaacggcuccuaccugaacgagacccacuucagcgacgacaucgagcagcaggccgacaacaugaucacggagaugcuccagaaggaguacauggagcggcagggcaagaccccgcuggggcugguggaccucuucgucuucuccaccagcuucuaccugaucuccaucuuccugcaccuggugaagaucccgacccaccgccacguggucggcaagagcugccccaagccccaccggcucaaccacauggggaucugcuccugcggccuguacgggcagcccggcgugccggugaaguggaagcgcugaggacuagucccuguucccagagcccacuuuuuuuucuuuuuuugaaauaaaauagccugucuuucagaucucaaaggcucuuuucagagccaccaaaaaaaaaaaaaaaaaaaaaaaaaaaaaaaaaaaaaaaaaaaaaaaaaaaaaaaaaaaaaaaaagaauu

SEQ ID NO: 35008 - RNA, 1717 nt, Artificial Sequence
  mRNA product Design a-1 (hSL-A64-N5) comprising derived and/or modified sequence from MOPV/LASV reassortant(IGS-1;Clade IV)__AFY05576__GPCmut9 (opt1)
aggagagucccgcagucggcguccagcggcucugcuuguucgugugugugucguugcaggccuuauucaagcuuaccaugggccagaucgugaccuucuuccaggaggucccccacgugaucgaggaggugaugaacaucguccugaucgcccucagcgugcuggccgugcugaaggggcucuacaacuucgcgaccugcggccuggucgggcuggugacguuccuccugcugugcggccgcuccugcaccaccagccucuacaaggggguguacgagcugcagacccuggagcucaacauggagacgcugaacaugaccaugccgcuguccugcaccaagaacaacagccaccacuacaucauggucggcaacgagaccggccucgagcugacgcugaccaacaccuccaucaucaaccacaaguucugcaaccucagcgacgcccacaagaagaaccuguacgaccacgcccugauguccaucaucagcaccuuccaccucuccauccccaacuucaaccaguacgaggccaugagcugcgacuucaacgggggcaagaucuccgugcaguacaaccugagccacuccuacgccggggacgcggccaaccacugcggcacgguggccaacgggguccugcagaccuucaugcggauggccuggggcggcagcuacaucgcgcucgacuccgggugcggcaacugggacugcaucaugaccagcuaccaguaccugaucauccagaacaccacgugggaggaccacugccaguucucccggcccagccccaucggguaccugggccuccugucccagcgcacccgggacaucuacaucagccgccggcugcucggcaccuucaccuggacgcugagcgacuccgagggggaggacaccccgggcggguacugccugacccgcuggaugcucaucgaggccgagcugaagugcuucggcaacaccgccguggccaagugcaacgagaagcacgacgaggaguucugcgacaugcugcggcuguucgacuucaacaagcaggccauccagcgccugaaggcggaggcccagaugagcauccagcugaucaacaaggccgugaacgcccucaucaacgaccagcugaucaugaagaaccaccuccgggacaucaugugcauccccuacugcaacuacuccaaguacugguaccucaaccacacgaccaccggccgcaccagccugcccaagugcuggcuggucuccaacggcagcuaccucaacgagacgcacuucuccgacgacaucgagcagcaggccgacaacaugaucaccgagaugcugcagaaggaguacauggagcggcaggggaagacgccccugggccucguggaccuguucguguucagcaccuccuucuaccugaucagcaucuuccugcaccucgucaagaucccgacccaccgccacaucguggggaaguccugccccaagccccaccggcugaaccacaugggcaucugcagcugcgggcuguacaagcagcccggcgugccggucaaguggaagcgcugaggacuagucccuguucccagagcccacuuuuuuuucuuuuuuugaaauaaaauagccugucuuucagaucucaaaggcucuuuucagagccaccaaaaaaaaaaaaaaaaaaaaaaaaaaaaaaaaaaaaaaaaaaaaaaaaaaaaaaaaaaaaaaaaagaauu

SEQ ID NO: 35009 - RNA, 1717 nt, Artificial Sequence
  mRNA product Design a-1 (hSL-A64-N5) comprising derived and/or modified sequence from LASV(LM765-SLE-2012;Clade IV)__AIT17814__GPCmut9 (opt1)
aggagagucccgcagucggcguccagcggcucugcuuguucgugugugugucguugcaggccuuauucaagcuuaccaugggccagaucgugaccuucuuccaggaggucccccacgugaucgaggaggugaugaacaucguccugaucgcccucagcauccuggccgugcugaaggggcucuacaacuucgcgaccugcggccugguggggcuggucacguuccuccugcugugcggccgcuccugcaccaccagccucuacaaggggguguacgagcugcagacccuggagcucaacauggagacgcugaacaugaccaugccgcuguccugcaccaagaacaacagccaccacuacaucauggugggcaacgagaccggccucgagcugacgcugaccaacaccuccaucaucgaccacaaguucugcaaccucagcgacgcccaccggaagaaccuguacgaccacgcccugauguccaucaucagcaccuuccaccucuccauccccaacuucaaccaguacgaggccaugagcugcgacuucaacgggggcaagaucuccguccaguacaaccugagccacuccuacgccaaggacgcggccgaccacugcgggacgguggccaacggcgugcugcagaccuucaugcgcauggccuggggcgggagcuacaucgcgcucgacuccggcugcgggcgcugggacugcaucaugaccagcuaccaguaccugaucauccagaacaccacgugggaggaccacugccaguucucccggcccagccccaucggcuaccuggggcuccugucccagcgcacccgggacaucuacaucagccgccggcugcucggcaccuucaccuggacgcugagcgacuccgagggcaaggacacccccgggggcuacugccugacccgcuggaugcucaucgaggccgagcugaagugcuucgggaacaccgccgucgccaagugcaacgagaagcacgacgaggaguucugcgacaugcugcggcuguucgacuucaacaagcaggccauccagcgccugaaggcggaggcccagaugagcauccagcugaucaacaaggccgugaacgcccucaucaacgaccagcugaucaugaagaaccaccuccgggacaucaugugcauccccuacugcaacuacuccaaguacugguaccucaaccacacgaccaccgggaagaccagccugcccaagugcuggcugguguccaacggcagcuaccucaacgagacgcacuucuccgacgacaucgagcagcaggccgacaacaugaucaccgagaugcugcagaaggaguacauggagcgccagggcaagaccccgcuggggcucgucgaccuguucguguucagcaccuccuucuaccugaucagcaucuuccugcaccucgugaagaucccgacgcaccggcacaucgucggcaagcccugccccaagccccaccgccugaaccacauggggaucugcuccugcggccuguacaagcagccgggggugcccgugaaguggaagcggugaggacuagucccuguucccagagcccacuuuuuuuucuuuuuuugaaauaaaauagccugucuuucagaucucaaaggcucuuuucagagccaccaaaaaaaaaaaaaaaaaaaaaaaaaaaaaaaaaaaaaaaaaaaaaaaaaaaaaaaaaaaaaaaaagaauu

SEQ ID NO: 35010 - RNA, 1717 nt, Artificial Sequence
  mRNA product Design a-1 (hSL-A64-N5) comprising derived and/or modified sequence from LASV(LM776-SLE-2012;Clade IV)__AIT17824__GPCmut9 (opt1)
aggagagucccgcagucggcguccagcggcucugcuuguucgugugugugucguugcaggccuuauucaagcuuaccaugggccagaucgugaccuucuuccaggaggucccccacgugaucgaggaggugaugaacaucguccugaucgcccucagcauccuggccgugcugaaggggcucuacaacuucgcgaccugcggccugguggggcuggucacguuccuccugcugugcggccgcuccugcaccaccagcguguacaaggggguguacgagcuccagacccuggagcugaacauggagacgcucaacaugaccaugccgcuguccugcaccaagaacaacagccaccacuacaucauggucggcaacgagaccggccuggagcucacgcugaccaacaccuccaucaucaaccacaaguucugcaaccugagcgacgcccacaagaagaaccucuacgaccacgcccugauguccaucaucagcaccuuccaccuguccauccccaacuucaaccaguacgaggccaugagcugcgacuucaacgggggcaagaucuccgugcaguacaaccucagccacuccuacgccggggacgcggccaaccacugcggcacgguggccaacgggguccugcagaccuucaugcggauggccuggggcggcagcuacaucgcgcuggacuccgggugcggcaagugggacugcaucaugaccagcuaccaguaccucaucauccagaacaccacgugggaggaccacugccaguucucccgccccagccccaucggguaccugggccugcucucccagcggacccgcgacaucuacaucagccggcgccugcugggcaccuucaccuggacgcucagcgacuccgaggggaaggacaccccgggcggguacugccugacccgguggaugcugaucgaggccgagcucaagugcuucggcaacaccgccguggccaagugcaacgagaagcacgacgaggaguucugcgacaugcugcgccuguucgacuucaacaagcaggccauccagcggcucaaggcggaggcccagaugagcauccagcugaucaacaaggccgugaacgcccugaucaacgaccagcucaucaugaagaaccaccuccgcgacaucaugugcauccccuacugcaacuacuccaaguacugguaccugaaccacacgaccaccggcaagaccagccugcccaagugcuggcuggucuccaacggcagcuaccugaacgagacgcacuucuccgacgacaucgagcagcaggccgacaacaugaucaccgagaugcuccagaaggaguacauggagcggcaggggaagacgccccugggccugguggaccucuucguguucagcaccuccuucuaccugaucagcaucuuccugcaccuggucaagaucccgacccaccgccacaucguggggaaguccugccccaagccccaccggcucaaccacaugggcaucugcagcugcgggcuguacaagcagcccggcgugccgguccgcuggaagcggugaggacuagucccuguucccagagcccacuuuuuuuucuuuuuuugaaauaaaauagccugucuuucagaucucaaaggcucuuuucagagccaccaaaaaaaaaaaaaaaaaaaaaaaaaaaaaaaaaaaaaaaaaaaaaaaaaaaaaaaaaaaaaaaaagaauu

SEQ ID NO: 35011 - RNA, 1717 nt, Artificial Sequence
  mRNA product Design a-1 (hSL-A64-N5) comprising derived and/or modified sequence from LASV(Mad39;Clade IV)__ANH09722__GPCmut9 (opt1)
aggagagucccgcagucggcguccagcggcucugcuuguucgugugugugucguugcaggccuuauucaagcuuaccaugggccagaucgugaccuucuuccaggaggucccccacgugaucgaggaggugaugaacaucguccugaucgcccucagcauccuggccgugcugaaggggcucuacaacguggcgaccugcggccugaucgggcuggucacguuccuccugcugugcggccgcuccugcaccaccacccucuacaaggggguguacgagcugcaggcccuggagcucaacauggagacgcugaacaugaccaugccgcugagcugcaccaagaacaacucccaccacuacauccgggugggcaacgagaccggccucgagcugacgcugaccaacaccagccucaucaaccacaaguucugcaaccuguccgacgcccacaagaagaaccuguacgaccacgcccucaugagcaucaucuccaccuuccaccugagcauccccaacuucaaccaguacgaggccauguccugcgacuucaacgacgggaagaucagcguccaguacaaccugucccacacguacgcgggcgacaccgccaaccacugcgggaccguggccaacggcgugcuccagaccuucaugcgcauggccuggggcgggagcuacaucgcgcuggacuccggcugcgggggcugggacugcaucaugacgagcuaccaguaccugaucauccagaacaccaccugggaggaccacugccaguucucccggcccagccccaucggguaccucggccugcugucccagcggacccgcgacaucuacaucagccggcgccuccugggcacguucaccuggacccuguccgacagcgaggggaaggacaccccgggcggguacugccucacgcgguggaugcugaucgaggccgagcugaagugcuucggcaacaccgccgucgccaagugcaacgagaagcacgacgaggaguucugcgacaugcuccgccuguucgacuucaacaagcaggccauccagcggcugaaggcggaggcccagaugagcauccagcucaucaacaaggccgugaacgcccugaucaacgaccagcugaucaugaagaaccaccuccgcgacaucaugugcauccccuacugcaacuacuccaaguacugguaccugaaccacaccgugaccggcaagacgagccugcccaagugcuggcucgucuccaacggcagcuaccugaacgagacccacuucuccgacgacaucgagcagcaggccgacaacaugaucaccgagaugcugcagaaggaguacauggagcggcaggggaagacgccccucggccugguggaccuguucguguucagcaccuccuucuaccugaucagcaucuuccuccaccuggucaagaucccgacccaccgccacgugguggggaagcccugccccaagccccaccggcugaaccacaugggcaucugcuccugcggguucuacaagcagccgggcguccccgugcgcuggaagcggugaggacuagucccuguucccagagcccacuuuuuuuucuuuuuuugaaauaaaauagccugucuuucagaucucaaaggcucuuuucagagccaccaaaaaaaaaaaaaaaaaaaaaaaaaaaaaaaaaaaaaaaaaaaaaaaaaaaaaaaaaaaaaaaaagaauu

SEQ ID NO: 35012 - RNA, 1717 nt, Artificial Sequence
  mRNA product Design a-1 (hSL-A64-N5) comprising derived and/or modified sequence from LASV(Z0947-SLE-2011;Clade IV)__AIT17840__GPCmut9 (opt1)
aggagagucccgcagucggcguccagcggcucugcuuguucgugugugugucguugcaggccuuauucaagcuuaccaugggccagaucgugaccuucuuccaggaggucccccacgugaucgaggaggugaugaacaucguccugaucgcccucagcauccuggccgugcugaaggggcucuacaacuucgcgaccugcggccugguggggcuggucacguuccuccugcugugcggccgcuccugcaccaucagccucuacaaggggguguacgagcugcagacccuggagcucaacauggagacccugaacaugacgaugccgcuguccugcaccaagaacaacagccaccacuacaucauggugggcaacgagaccggccucgagcugacccugacgaacaccuccaucaucaaccacaaguucugcaaccucagcgacgcccacaagaagaaccuguacgaccacgcccugauguccaucaucagcaccuuccaccucuccauccccaacuucaaccaguacgaggccaugagcugcgacuucaacgggggcaagaucuccguccaguacaaccugagccacuccuacgccggggacgcggccaaccacugcggcaccguggccaacggggugcugcagacguucaugcggauggccuggggcggcagcuacaucgcgcucgacuccgggugcgaccggugggacugcaucaugaccagcuaccaguaccugaucauccagaacaccaccugggaggaccacugccaguucucccgccccagccccaucggcuaccuggggcuccugucccagcggacgcgcgacaucuacaucagccggcgccugcucggcaccuucaccuggacccugagcgacuccgagggcaaggacacgcccgggggcuacugccugacccgguggaugcucaucgaggccgagcugaagugcuucgggaacaccgccgucgccaagugcaacgagaagcacgacgaggaguucugcgacaugcugcgccucuucgacuucaacaagcaggccauccagcggcugaaggcggaggcccagaugagcauccagcugaucaacaaggccgugaacgcccucaucaacgaccagcugaucaugaagaaccaccuccgcgacaucaugugcauccccuacugcaacuacuccaaguacugguaccugaaccacaccacgaccgggaagaccagccugcccaagugcuggcugguguccaacggcagcuaccucaacgagacccacuucuccgacgacaucgagcagcaggccgacaacaugaucacggagaugcugcagaaggaguacauggagcggcagggcaagaccccgcuggggcucgucgaccuguucguguucagcaccuccuucuaccugaucagcaucuuccugcaccucgugaagaucccgacccaccgccacaucgucggcaagcccugccccaagccccaccggcugaaccacauggggaucugcuccugcggccuguacaagcagccgggggugcccgugaaguggaagcgcugaggacuagucccuguucccagagcccacuuuuuuuucuuuuuuugaaauaaaauagccugucuuucagaucucaaaggcucuuuucagagccaccaaaaaaaaaaaaaaaaaaaaaaaaaaaaaaaaaaaaaaaaaaaaaaaaaaaaaaaaaaaaaaaaagaauu

SEQ ID NO: 35013 - RNA, 1717 nt, Artificial Sequence
  mRNA product Design a-1 (hSL-A64-N5) comprising derived and/or modified sequence from LASV(Josiah;Clade IV)__NP_694870__GPCmut9 (opt1)
aggagagucccgcagucggcguccagcggcucugcuuguucgugugugugucguugcaggccuuauucaagcuuaccaugggccagaucgugaccuucuuccaggaggucccccacgugaucgaggaggugaugaacaucguccugaucgcccucagcgugcuggccgugcugaaggggcucuacaacuucgcgaccugcggccuggucgggcuggugacguuccuccugcugugcggccgcuccugcaccaccagccucuacaaggggguguacgagcugcagacccuggagcucaacauggagacgcugaacaugaccaugccgcuguccugcaccaagaacaacagccaccacuacaucauggucggcaacgagaccggccucgagcugacgcugaccaacaccuccaucaucaaccacaaguucugcaaccucagcgacgcccacaagaagaaccuguacgaccacgcccugauguccaucaucagcaccuuccaccucuccauccccaacuucaaccaguacgaggccaugagcugcgacuucaacgggggcaagaucuccgugcaguacaaccugagccacuccuacgccggggacgcggccaaccacugcggcacgguggccaacgggguccugcagaccuucaugcggauggccuggggcggcagcuacaucgcgcucgacuccgggugcggcaacugggacugcaucaugaccagcuaccaguaccugaucauccagaacaccacgugggaggaccacugccaguucucccgccccagccccaucggguaccugggccuccugucccagcggacccgcgacaucuacaucagccggcgccugcucggcaccuucaccuggacgcugagcgacuccgaggggaaggacaccccgggcggguacugccugacccgguggaugcucaucgaggccgagcugaagugcuucggcaacaccgccguggccaagugcaacgagaagcacgacgaggaguucugcgacaugcugcgccucuucgacuucaacaagcaggccauccagcggcugaaggcggaggcccagaugagcauccagcugaucaacaaggccgugaacgcccucaucaacgaccagcugaucaugaagaaccaccuccgcgacaucaugugcauccccuacugcaacuacuccaaguacugguaccugaaccacacgaccaccgggcggaccagccugcccaagugcuggcuggucuccaacggcagcuaccucaacgagacgcacuucuccgacgacaucgagcagcaggccgacaacaugaucaccgagaugcugcagaaggaguacauggagcgccagggcaagacgccccuggggcugguggaccucuucguguucagcaccuccuucuaccugaucagcaucuuccugcaccucgucaagaucccgacccaccggcacaucgugggcaaguccugccccaagccccaccgccugaaccacauggggaucugcagcugcggccuguacaagcagcccggggugccggucaaguggaagcggugaggacuagucccuguucccagagcccacuuuuuuuucuuuuuuugaaauaaaauagccugucuuucagaucucaaaggcucuuuucagagccaccaaaaaaaaaaaaaaaaaaaaaaaaaaaaaaaaaaaaaaaaaaaaaaaaaaaaaaaaaaaaaaaaagaauu

SEQ ID NO: 35014 - RNA, 1714 nt, Artificial Sequence
  mRNA product Design a-1 (hSL-A64-N5) comprising derived and/or modified sequence from LASV(LP;Clade I)__AAF86701__GPCmut9 (opt1)
aggagagucccgcagucggcguccagcggcucugcuuguucgugugugugucguugcaggccuuauucaagcuuaccaugggccagaucaucaccuucuuccaggaggugccccacgucaucgaggaggugaugaacaucgugcugaucgcccucagccugcuggccauccucaaggggcuguacaacaucgcgaccugcggcaucaucgggcuggucgccuuccucuuccugugcggcaaguccugcagccugacgcucaagggcggguacgagcugcagacccuggagcucaacauggagacccugaacaugaccaugccgcuguccugcacgaagaacagcucccaccacuacauccgcgugggcaacgagaccgggcucgagcugacccugaccaacacgagcaucaucaaccacaaguucugcaaccucuccgacgcccacaagaagaaccuguacgaccacgcccugaugagcaucaucuccaccuuccaccucagcauccccaacuucaaccaguacgaggccauguccugcgacuucaacggcgggaagaucagcgugcaguacaaccugucccacagcuacgcgggcgacgccgccgagcacugcgggaccgucgccaacggcgugcugcagaccuucaugcggauggcguggggcgggcgcuacaucgcccucgacuccggcugcgggaacugggacugcaucaugacgagcuaccaguaccugaucauccagaacaccaccugggaggaccacugccaguucucccggcccagccccaucggcuaccugggccuccugucccagcgcacccgggacaucuacaucagccgccggcugcucgggacguucaccuggacccugagcgacuccgagggcaacgagacccccgggggcuacugccugacgcgcuggaugcucaucgaggccgagcugaagugcuucgggaacaccgccguggccaagugcaacgagaagcacgacgaggaguucugcgacaugcugcggcuguucgacuucaacaagcaggcgauccgccggcugaaggccgaggcccagaugagcauccagcugaucaacaaggccgucaacgcccucaucaacgaccagcugaucaugaagaaccaccuccgcgacaucaugugcauccccuacugcaacuacuccaaguacugguaccucaaccacaccagcuccggccggaccagccugcccaagugcuggcugaucuccaacggcagcuaccucaacgagacgcaguucuccgacgacaucgagcagcaggcggacaacaugaucaccgagaugcugcagaaggaguacaucgagcgccaggggaagaccccgcugggccugguggacaucuucaucuucagcaccuccuucuaccucaucagcaucuuccugcaccugaucaagaucccgacgcaccggcacaucguggggaagcccugccccaagccccaccgccucaaccacaugggcgucugcuccugcgggcuguacaagcacccgggcgugcccaccaaguggaagcggugaggacuagucccuguucccagagcccacuuuuuuuucuuuuuuugaaauaaaauagccugucuuucagaucucaaaggcucuuuucagagccaccaaaaaaaaaaaaaaaaaaaaaaaaaaaaaaaaaaaaaaaaaaaaaaaaaaaaaaaaaaaaaaaaagaauu

SEQ ID NO: 35015 - RNA, 1714 nt, Artificial Sequence
  mRNA product Design a-1 (hSL-A64-N5) comprising derived and/or modified sequence from LASV(803213;Clade II)__AAF86703__GPCmut9 (opt1)
aggagagucccgcagucggcguccagcggcucugcuuguucgugugugugucguugcaggccuuauucaagcuuaccaugggccagaucaucaccuucuuccaggaggugccccacgucaucgaggaggugaugaacaucgugcugaucgcccucagccugcuggccauccucaaggggaucuacaacgucgcgaccugcggccuguucgggcugaucuccuuccuccugcugugcggccgcagcugcuccgugacguacaaggggguguacgagcuccagacccuggagcugaacauggccaaccucaacaugaccaugccgcugagcugcaccaagaacaacucccaccacuacaucauggucggcaacgagacgggccuggagcucacccugaccaacaccagcaucaucaaccacaaguucugcaaccuguccgacgcccacaagaagaaccucuacgaccacgcccugaugagcaucaucuccacguuccaccugagcauccccaacuucaaccaguacgaggccauguccugcgacuucaacgggggcaagaucagcgugcaguacaaccucucccacagcuucgcgguggacgccgccaaccacugcgggaccaucgccaacggcguccugcagaccuucaugcggauggcguggggcggguccuacaucgcccuggacagcggcugcgggaacugggacugcaucaugaccuccuaccaguaccucaucauccagaacacgaccugggaggaccacugccaguucagccgccccucccccaucggcuaccuggggcugcucagccagcggacccgcgacaucuacaucagccggcgccugcugggcaccuucacguggacccucuccgacagcgagggcaacgaggcccccgggggcuacugccugacccgguggaugcugaucgaggccgagcucaagugcuucgggaacaccgccguggcgaagugcaacgagaagcacgacgaggaguucugcgacaugcugcgccuguucgacuucaacaagcaggccaucaagcggcucaagacggaggcccagauguccauccagcugaucaacaaggccgugaacgcccugaucaacgaccagcucaucaugaagaaccaccuccgcgacaucaugugcauccccuacugcaacuacagccgguacugguaccugaaccacaccgucaccggcaagaccucccugccccgcugcuggcuggugagcaacggguccuaccugaacgagacgcacuucagcgacgacaucgagcagcaggcggacaacaugaucaccgagaugcuccagaaggaguacauggaccggcagggcaagaccccgcugggccugguggaccuguucgucuucuccaccagcuucuaccucaucuccaucuuccugcaccuggugaagaucccgacgcaccgccacaucguggggaagcccugccccaagccccaccggcucaaccacaugggcaucugcagcugcgggcuguacaagcacccgggcguccccgugaaguggaagcgcugaggacuagucccuguucccagagcccacuuuuuuuucuuuuuuugaaauaaaauagccugucuuucagaucucaaaggcucuuuucagagccaccaaaaaaaaaaaaaaaaaaaaaaaaaaaaaaaaaaaaaaaaaaaaaaaaaaaaaaaaaaaaaaaaagaauu

SEQ ID NO: 35016 - RNA, 1714 nt, Artificial Sequence
  mRNA product Design a-1 (hSL-A64-N5) comprising derived and/or modified sequence from LASV(GA391;Clade III)__CAA36645__GPCmut9 (opt1)
aggagagucccgcagucggcguccagcggcucugcuuguucgugugugugucguugcaggccuuauucaagcuuaccaugggccagaucgugaccuucuuccaggaggucccccacgugaucgaggaggugaugaacaucguccugaucgcccucagcauccuggccauccugaaggggcucuacaacguggcgaccugcggccugaucgggcuggugacguuccuccugcuguccggccgcagcugcucccucaucuacaaggggaccuacgagcugcagacccuggagcucaacauggagacccugaacaugacgaugccgcugagcugcaccaagaacaacucccaccacuacauccgggucggcaacgagaccggccucgagcugacccugacgaacaccagcauccucaaccacaaguucugcaaccuguccgacgcccacaagcgcaaccuguacgaccacagccucauguccaucaucagcaccuuccaccuguccauccccaacuucaaccaguacgaggccaugagcugcgacuucaacgggggcaagaucaccgugcaguacaaccugucccacagcuucgccguggacgccgcggggcacugcggcacgcucgccaacgggguccugcagaccuucaugcggauggccuggggcggcuccuacaucgcccuggacagcgggugcggcaacugggacugcaucaugaccuccuaccaguaccucaucauccagaacaccacgugggacgaccacugccaguucagccgccccucccccaucggguaccugggccugcucagccagcggacccgcgacaucuacaucagccggcgccugcugggcaccuucaccuggacgcucuccgacagcgaggggaacgagaccccgggcggguacugccugacccgguggaugcugaucgaggcggagcucaagugcuucggcaacaccgccguggccaagugcaacgagaagcacgacgaggaguucugcgacaugcugcgccuguucgacuucaacaagcaggccauccggcgccucaagacggaggcccagauguccauccagcugaucaacaaggcggugaacgcccugaucaacgaccagcucaucaugaagaaccaccuccgggacaucaugugcauccccuacugcaacuacagccgcuacugguaccugaaccacaccuccaccgggaagaccagccugccccggugcuggcugaucuccaacggcagcuaccugaacgagacgaaguucuccgacgacaucgagcagcaggccgacaacaugaucaccgagaugcugcagaaggaguacaucgaccgccagggcaagacgccccucgggcuggucgaccuguucguguucagcaccuccuucuaccucaucagcaucuuccugcaccuggugaagaucccgacccaccggcacaucgucggcaagcccugccccaagccccaccgccucaaccacauggggaucugcuccugcggccuguacaagcagccgggggugcccgugcgguggaagcgcugaggacuagucccuguucccagagcccacuuuuuuuucuuuuuuugaaauaaaauagccugucuuucagaucucaaaggcucuuuucagagccaccaaaaaaaaaaaaaaaaaaaaaaaaaaaaaaaaaaaaaaaaaaaaaaaaaaaaaaaaaaaaaaaaagaauu

SEQ ID NO: 35017 - RNA, 1717 nt, Artificial Sequence
  mRNA product Design a-1 (hSL-A64-N5) comprising derived and/or modified sequence from LASV(AV;Clade V)__CCA30314__GPCmut9 (opt1)
aggagagucccgcagucggcguccagcggcucugcuuguucgugugugugucguugcaggccuuauucaagcuuaccaugggccagaucgugaccuucuuccaggaggucccccacgugaucgaggaggugaugaacaucguccugaucgcccucagcauccuggccgugcugaaggggcucuacaacaucgcgaccugcggccugaucgggcugaucacguuccuccugcugugcggccgcuccugcagcuccaaccucuacaaggggguguacgagcugcagagccuggaccucaacauggagacccugaacaugaccaugccgcuguccugcaccaagaacaacagccaccacuacauccgggucggcaacgacacgggccucgagcugacccugaccaacaccuccauccucaaccacaaguucugcaaccugagcgacgcccacaagaaggaccuguacgaccacgcccucauguccaucaucagcacguuccaccuguccauccccaacuucaaccaguacgaggccaugagcugcgacuucaacgggggcaagaucuccgugcaguacaaccugagccacuccuacgccaucgacgcggccaaccacugcgggaccguggccaacggcauccuccagaccuucaugcgcauggccuggggcgggagcuacaucgcgcuggacuccggcugcgggaacugggacugcaucaugaccagcuaccaguaccugaucauccagaacacgaccugggagaaccacugccaguucucccggcccagccccaucggcuaccucgggcugcugagccagcgcacccgggacaucuacaucucccgccggcuccugggcaccuucacguggacccugagcgacuccgagggcaacgccacccccgggggcuacugccucacccgcuggaugcugaucgaggccgagcugaagugcuucgggaacacggccgucgccaagugcaacgagaagcacgacgaggaguucugcgacaugcuccggcuguucgacuucaacaagcaggcgaucagccgccugaaguccgaggcccagaugagcauccagcucaucaacaaggccgugaacgcccugaucaacgaccagcugaucaugaagaaccaccuccgggacaucaugugcauccccuacugcaacuacuccaaguacugguaccugaaccacaccaucaccggcaagaccagccugcccaagugcuggcucguguccaacgggagcuaccugaacgagacgcacuucuccgacgacaucgagcagcaggccgacaacaugaucaccgagaugcugcagaaggaguacauggagcgccagggcaagaccccgcugggccucgucgaccuguucguguucagcaccuccuucuaccugaucagcaucuuccuccggcuggugaagaucccgacgcaccgccacaucgucgggaagcccugccccaagccccaccggcugaaccacaugggcaucugcuccugcgggcucuacaagcagccgggcgugcccgugcgcuggaagcggugaggacuagucccuguucccagagcccacuuuuuuuucuuuuuuugaaauaaaauagccugucuuucagaucucaaaggcucuuuucagagccaccaaaaaaaaaaaaaaaaaaaaaaaaaaaaaaaaaaaaaaaaaaaaaaaaaaaaaaaaaaaaaaaaagaauu

SEQ ID NO: 35018 - RNA, 1714 nt, Artificial Sequence
  mRNA product Design a-1 (hSL-A64-N5) comprising derived and/or modified sequence from LASV(Togo/2016/7082;Clade VI)__AMR44577__GPCmut9 (opt1)
aggagagucccgcagucggcguccagcggcucugcuuguucgugugugugucguugcaggccuuauucaagcuuaccaugggccagaucaucaccuucuuccaggaggugccccacgucaucgaggaggugaugaacaucgugcugaucgcccucagccugcuggccauccucaagggggucuacaacguggcgaccugcggcaucaucgggcuggugacguuccuguuccucugcggccgcuccugcagccugaucuacaagggguccuacgagcugcagacccucgagcugaacauggagacccugaacaugaccaugccgcucagcugcacgaagaacuccagccaccacuacauccgggucggcaacgagaccggccuggagcugacccucaccaacacguccaucaucaaccacaaguucugcaaccugagcgacgcccacaagcgcaaccuguacgaccacgcccucauguccauccugagcaccuuccaccuguccauccccaacuucaaccaguacgaggccaugagcugcgacuucaacgggggcaagaucuccgugcaguacaaccucagccacgccuacgcgguggacgccgccgagcacugcgggaccgucgccaacggcgugcugcagaccuucaugcggauggcguggggcggguccuacaucgcccuggacagcggcugcgggaacugggacugcaucaugacguccuaccaguaccucaucauccagaacaccaccugggaggaccacugccaguucagccgccccucccccaucggcuaccuggggcugcucagccagcggacccgcgacaucuacaucagccggcgccugcugggcacguucaccuggacccucuccgacagcgagggcaacgagacccccgggggcuacugccugacgcgguggaugcugaucgaggccgagcucaagugcuucgggaacaccgccguggccaagugcaacgagaagcacgacgaggaguucugcgacaugcugcgccuguucgacuucaacaagcaggcgauccagcggcucaaguccgaggcccagaugagcauccagcugaucaacaaggccgucaacgcccugaucaacgaccagcucaucaugaagaaccaccuccgcgacaugaugugcauccccuacugcaacuacuccaaguacugguaccugaaccacaccagcuccggccggaccagccugcccaagugcuggcugguguccaacgggagcuaccugaacgagacgcacuucuccgacgacaucgagcagcaggccgacaacaugaucaccgagaugcuccagaaggaguacaucgaccgccagggcaagaccccgcugggccugguggaccuguucgucuucagcaccuccuucuaccucaucagcaucuuccugcaccugaucaagaucccgacgcaccggcacaucguggggaagcccugccccaagccccaccgccucaaccacaugggcaucugcuccugcgggcuguacaagcagccgggcgugcccacccgguggaagcgcugaggacuagucccuguucccagagcccacuuuuuuuucuuuuuuugaaauaaaauagccugucuuucagaucucaaaggcucuuuucagagccaccaaaaaaaaaaaaaaaaaaaaaaaaaaaaaaaaaaaaaaaaaaaaaaaaaaaaaaaaaaaaaaaaagaauu

SEQ ID NO: 35019 - RNA, 1714 nt, Artificial Sequence
  mRNA product Design a-1 (hSL-A64-N5) comprising derived and/or modified sequence from LASV(KAK-428;Clade n.d. (VII))__ANH09740__GPCmut9 (opt1)
aggagagucccgcagucggcguccagcggcucugcuuguucgugugugugucguugcaggccuuauucaagcuuaccaugggccagaucgugaccuucuuccaggaggucccccacgugaucgaggaggugaugaacaucguccugaucgcccucagccugcuggccauccucaaggggcuguacaacuucgcgaccugcggcgugaucgggcugaucacguuccuccugcugugcggccgcuccugcagcgccaccuacaaggggcaguacgagcuccagacccuggagcugaacauggagucccucaacaugaccaugccgcugagcugcacgaagaacaacucccaccacuacauccgggccggcaacaacaccggccuggagcucacccugaccaacacgagcaucaucucccacaaguucugcaaccugagcgacgcccacaagaagaaccucuacgaccacacccugauguccaucaucaccaccuuccaccugagcauccccaacuucaaccaguacgaggccauguccugcgacuucaacgggggcaagaucagcauccaguacaaccucucccacagcuacgcgggggacgccgcccagcacugcggcacgguggccaacgggguccugcagaccuucaugcgcauggcguggggcggcuccuaccuggcccucgacagcgggugccggggcugggacugcaucaucuccagcuaccaguaccugaucauccagaacaccaccugggacgaccacugccaguucucccgccccagccccaucggguaccugggcuucgugagccagaagacgcgggacaucuacaucucccgccggcuccugggcaccuucaccuggacccugagcgacuccgaggggcacgacaugccgggcggguacugccucacgcgcuggaugcugaucgaggccgaccugaagugcuucggcaacaccgccguggccaagugcaacgagaagcacgacgaggaguucugcgacauguggcggcuguucgacuucaacaagcaggcgauccagcgccugaaggccgaggcccagaugaacauccagcugaucaacaaggccgucaacgcccucaucaacgaccagcugaugaugaagaaccaccuccgggacaucaugugcauccccuacugcaacuacagcaaguucugguaccucaacaacaccaccacggggcgcaccucccugccccggugcuggcugaucagcaacggcuccuaccucaacgagacccacuucagcgacgacaucgagcagcaggcggacaacaugaucaccgagaugcugcagaaggaguacauggaccgccagggcaagacgccccuggggcucguggaccuguucguguucuccaccagcuucuaccugaucaccaucuuccugcaccucgucaagaucccgacccaccggcacaucgugggcaagcccugccccaagccccaccgccugaaccacauggggaucugcuccugcggccuguacaagcagccgggggugcccguccgguggaagcgcugaggacuagucccuguucccagagcccacuuuuuuuucuuuuuuugaaauaaaauagccugucuuucagaucucaaaggcucuuuucagagccaccaaaaaaaaaaaaaaaaaaaaaaaaaaaaaaaaaaaaaaaaaaaaaaaaaaaaaaaaaaaaaaaaagaauu

SEQ ID NO: 35020 - RNA, 1714 nt, Artificial Sequence; identical to SEQ ID NO: 35014
  mRNA product Design a-1 (hSL-A64-N5) comprising derived and/or modified sequence from LASV(Pinneo-NIG-1969;Clade I)__AIT17836__GPCmut9 (opt1)

SEQ ID NO: 35021 - RNA, 1714 nt, Artificial Sequence
  mRNA product Design a-1 (hSL-A64-N5) comprising derived and/or modified sequence from LASV(ISTH0009-NIG-2011;Clade II)__AIT17404__GPCmut9 (opt1)
aggagagucccgcagucggcguccagcggcucugcuuguucgugugugugucguugcaggccuuauucaagcuuaccaugggccagaucaucaccuucuuccaggaggugccccacgucaucgaggaggugaugaacaucgugcugaucgcccucagccugcuggccauccucaaggggaucuacaacgucgcgaccugcggccuguucgggcugguguccuuccuccugcugugcggccgcagcugcuccacgaccuacaaggggguguacgagcuccagacccuggagcuggacauggccagccucaacaugaccaugccgcuguccugcacgaagaacaacagccaccacuacaucauggucggcaacgagaccggccuggagcucacccugaccaacacguccaucaucaaccacaaguucugcaaccugagcgacgcccacaagaagaaccucuacgaccacgcccugauguccaucaucagcaccuuccaccuguccauccccaacuucaaccaguacgaggccaugagcugcgacuucaacgggggcaagaucuccgugcaguacaaccucagccacgcguacgccguggacgccgccaaccacugcgggaccaucgcgaacggcguccugcagaccuucaugcggauggccuggggcggguccuacaucgcccuggacagcggcugcggguccugggacugcaucaugacgagcuaccaguaccucaucauccagaacaccaccugggaggaccacugccaguucucccgccccagccccaucggcuaccuggggcugcucagccagcggacccgcgacaucuacaucucccggcgccugcugggcacguucaccuggacccucagcgacuccgagggcaacgagacccccgggggcuacugccugacgcgguggaugcugaucgaggccgagcucaagugcuucgggaacaccgccguggcgaagugcaacgagaagcacgacgaggaguucugcgacaugcugcgccuguucgacuucaacaagcaggccauccggcgccucaagaccgaggcccagaugagcauccagcugaucaacaaggccgugaacgcccugaucaacgaccagcucaucaugaagaaccaccuccgggacaucaugugcaucccguacugcaacuacuccaaguacugguaccugaaccacaccgucacgggcaagaccagccugccccgcugcuggcugguguccaacgggagcuaccugaacgagacccacuucuccgacgacaucgagcagcaggcggacaacaugaucaccgagcuccugcagaaggaguacauggaccggcagggcaagacgccccugggccugguggaccucuucgucuucagcaccuccuucuaccugaucagcaucuuccugcaccucaucaagaucccgacccaccgccacaucaccgggaagcccugccccaagccccaccggcugaaccacaugggcaucugcuccugcgggcuguacaagcacccgggcgugcccgugaaguggaagcgcugaggacuagucccuguucccagagcccacuuuuuuuucuuuuuuugaaauaaaauagccugucuuucagaucucaaaggcucuuuucagagccaccaaaaaaaaaaaaaaaaaaaaaaaaaaaaaaaaaaaaaaaaaaaaaaaaaaaaaaaaaaaaaaaaagaauu

SEQ ID NO: 35022 - RNA, 1714 nt, Artificial Sequence
  mRNA product Design a-1 (hSL-A64-N5) comprising derived and/or modified sequence from LASV(ISTH2010-NIG-2012;Clade II)__AIT17482__GPCmut9 (opt1)
aggagagucccgcagucggcguccagcggcucugcuuguucgugugugugucguugcaggccuuauucaagcuuaccaugggccagaucaucaccuucuuccaggaggugccccacgucaucgaggaggugaugaacaucgugcugaucgcccucagccugcuggccauccucaaggggaucuacaacgucgcgaccugcggccuguucgggcugguguccuuccuccugcugugcggccgcagcugcuccacgaccuacaaggggguguacgagcuccagacccuggagcuggacauggccagccucaacaugaccaugccgcuguccugcacgaagaacaacagccaccacuacaucauggucggcaacgagaccggccuggagcucacccugaccaacacguccaucaucaaccacaaguucugcaaccugagcgacgcccacaagaagaaccucuacgaccacgcccugauguccaucaucagcaccuuccaccuguccauccccaacuucaaccaguacgaggccaugagcugcgacuucaacgggggcaagaucuccgugcaguacaaccucagccacgcguacgccguggacgccgccaaccacugcgggaccaucgcgaacggcguccugcagaccuucaugcggauggccuggggcggguccuacaucgcccuggacagcggcugcggguccugggacugcaucaugacgagcuaccaguaccucaucauccagaacaucaccugggaggaccacugccaguucucccgccccagccccaucggcuaccuggggcugcucagccagcggacccgcgacaucuacaucucccggcgccugcugggcaccuucacguggacccucagcgacuccgagggcaacgagacccccgggggcuacugccugacccgguggaugcugaucgaggccgagcucaagugcuucgggaacacggccguggcgaagugcaacgagaagcacgacgaggaguucugcgacaugcugcgccuguucgacuucaacaagcaggccauccggcgccucaagaccgaggcccagaugagcauccagcugaucaacaaggccgugaacgcccugaucaacgaccagcucaucaugaagaaccaccuccgggacaucaugugcauccccuacugcaacuacuccaaguacugguaccugaaccacaccgucaccggcaagacgagccugccccgcugcuggcugguguccaacgggagcuaccugaacgagacccacuucuccgacgacaucgagcagcaggcggacaacaugaucaccgagcuccugcagaaggaguacaucgaccggcagggcaagaccccgcugggccugguggaccucuucgucuucagcacguccuucuaccugaucagcaucuuccugcaccucgugaagaucccgacccaccgccacguggucgggaagcccugccccaagccccaccggcugaaccacaugggcaucugcuccugcgggcuguacaagcacccgggcgugcccgugaaguggaagcgcugaggacuagucccuguucccagagcccacuuuuuuuucuuuuuuugaaauaaaauagccugucuuucagaucucaaaggcucuuuucagagccaccaaaaaaaaaaaaaaaaaaaaaaaaaaaaaaaaaaaaaaaaaaaaaaaaaaaaaaaaaaaaaaaaagaauu

SEQ ID NO: 35023 - RNA, 1714 nt, Artificial Sequence
  mRNA product Design a-1 (hSL-A64-N5) comprising derived and/or modified sequence from LASV(Lassa virus/H.sapiens-wt/NGA/2015/ISTH_0543;Clade II)__AVO03639__GPCmut9 (opt1)
aggagagucccgcagucggcguccagcggcucugcuuguucgugugugugucguugcaggccuuauucaagcuuaccaugggccagaucaucaccuucuuccaggaggugccccacgucaucgaggaggugaugaacaucgugcugaucgcccucagccugcuggccauccucaaggggaucuacaacgucgcgaccugcggccuguucgggcugguguccuuccuccugcugugcggccgcagcugcuccacgaccuacaaggggguguacgagcuccagacccuggagcuggacauggccaaccucaacaugaccaugccgcugagcugcacgaagaacaacucccaccacuacaucauggucggcaacgagaccggccuggagcucacccugaccaacacgagcaucaucaaccacaaguucugcaaccuguccgacgcccacaagaagaaccucuacgaccacgcccugaugagcaucaucuccaccuuccaccugagcauccccaacuucaaccaguacgaggccauguccugcgacuucaacgggggcaagaucagcgugcaguacaaccucucccacaccuacgcgguggacgccgccaaccacugcgggaccaucgccaacggcguccugcagacguucaugcggauggcguggggcgggagcuacaucgcccuggacuccggcugcgggagcugggacugcaucaugaccuccuaccaguaccucgugauccagaacaccaccugggaggaccacugccaguucagccgccccucccccaucggcuaccuggggcugcucagccagcggacgcgcgacaucuacaucagccggcgccugcugggcaccuucaccuggacccucuccgacagcgagggcaacgagacgcccgggggcuacugccugacccgguggaugcugaucgaggccgagcucaagugcuucgggaacaccgccguggccaagugcaacgagaagcacgacgaggaguucugcgacaugcugcgccuguucgacuucaacaagcaggcgauccggcgccucaagaccgaggcccagauguccauccagcugaucaacaaggccgucaacgcccugaucaacgaccagcucaucaugaagaaccaccuccgggacaucaugugcauccccuacugcaacuacagcaaguacugguaccugaaccacacggugaccggcaagaccucccugccccgcugcuggcuggugagcaacggguccuaccugaacgagacccacuucagcgacgacaucgagcagcaggccgacaacaugaucacggagcuccugcagaaggaguacaucgaccggcagggcaagaccccgcugggccuggucgaccucuucguguucuccaccagcuucuaccugaucuccaucuuccugcaccucgugaagaucccgacccaccgccacaucacggggaagcccugccccaagccccaccggcugaaccacaugggcaucugcagcugcgggcuguacaagcacccgggcguccccgugaaguggaagcgcugaggacuagucccuguucccagagcccacuuuuuuuucuuuuuuugaaauaaaauagccugucuuucagaucucaaaggcucuuuucagagccaccaaaaaaaaaaaaaaaaaaaaaaaaaaaaaaaaaaaaaaaaaaaaaaaaaaaaaaaaaaaaaaaaagaauu

SEQ ID NO: 35024 - RNA, 1714 nt, Artificial Sequence
  mRNA product Design a-1 (hSL-A64-N5) comprising derived and/or modified sequence from LASV(Lassa virus/H.sapiens-wt/NGA/2016/ISTH_0009;Clade II)__AVO03571__GPCmut9 (opt1)
aggagagucccgcagucggcguccagcggcucugcuuguucgugugugugucguugcaggccuuauucaagcuuaccaugggccagaucaucaccuucuuccaggaggugccccacgucaucgaggaggugaugaacaucgugcugaucgcccucagccugcuggccauccucaaggggaucuacaacgucgcgaccugcggccugcuggggcucguguccuuccugcugcucugcggccgcagcugcuccacgaccuacaaggggguguacgagcugcagacccuggagcucgacauggccagccugaacaugaccaugccgcuguccugcacgaagaacaacagccaccacuacaucauggucggcaacgagaccggccucgagcugacccugaccaacacguccaucaucaaccacaaguucugcaaccucagcgacgcccacaagaagaaccuguacgaccacgcccugauguccaucaucagcaccuuccaccucuccauccccaacuucaaccaguacgaggccaugagcugcgacuucaacgggggccggaucuccgugcaguacaaccugagccacuccuacgcgguggacgccgccaaccacugcgggaccaucgccaacggcguccugcagaccuucaugcgcauggcguggggcgggagcuacaucgcccucgacuccggcugcgggagcugggacugcaucaugacguccuaccaguaccugaucauccagaacaccaccugggaggaccacugccaguucagccggcccagccccaucggcuaccuggggcuccugucccagcgcacccgggacaucuacaucagccgccggcugcucggcacguucaccuggacccuguccgacagcgagggcaacgagacccccgggggcuacugccugacgcgcuggaugcucaucgaggccgagcugaagugcuucgggaacaccgccguggccaagugcaacgagaagcacgacgaggaguucugcgacaugcugcggcuguucgacuucaacaagcaggcgauccgccggcugaagaccgaggcccagauguccauccagcugaucaacaaggccgugaacgcccucaucaacgaccagcugaucaugaagaaccaccuccgcgacaucaugugcaucccguacugcaacuacagcaaguacugguaccucaaccacaccgucacgggcaagaccucccugccccggugcuggcuggugagcaacggguccuaccucaacgagacccacuucagcgacgacaucgagcagcaggccgacaacaugaucaccgagcugcugcagaaggaguacaucgaccgccagggcaagacgccccugggccucguggaccuguucgucuucuccaccagcuucuaccugaucuccaucuuccuccaccuggugaagaucccgacccaccggcacaucaccgggaagcccugccccaagccccaccgccugaaccacaugggcaucugcagcugcgggcucuacaaccacccgggcgugcccgucaaguggaagcggugaggacuagucccuguucccagagcccacuuuuuuuucuuuuuuugaaauaaaauagccugucuuucagaucucaaaggcucuuuucagagccaccaaaaaaaaaaaaaaaaaaaaaaaaaaaaaaaaaaaaaaaaaaaaaaaaaaaaaaaaaaaaaaaaagaauu

SEQ ID NO: 35025 - RNA, 1714 nt, Artificial Sequence
  mRNA product Design a-1 (hSL-A64-N5) comprising derived and/or modified sequence from LASV(Lassa virus/H.sapiens-wt/NGA/2016/ISTH_0017;Clade II)__AVO03567__GPCmut9 (opt1)
aggagagucccgcagucggcguccagcggcucugcuuguucgugugugugucguugcaggccuuauucaagcuuaccaugggccagaucaucaccuucuuccaggaggugccccacgucaucgaggaggugaugaacaucgugcugaucgcccucagccugcuggccauccucaaggggaucuacaacgucgcgaccugcggccuguucgggcugguguccuuccuccugcugugcggccgcagcugcuccacgaccuacaaggggguguacgagcuccagacccuggagcuggacauggccagccucaacaugaccaugccgcuguccugcacgaagaacaacagccaccacuacaucauggucggcaacgagaccggccuggagcucacccugaccaacacguccaucaucaaccacaaguucugcaaccugagcgacgcccacaagaagaaccucuacgaccacgcccugauguccaucaucagcaccuuccaccuguccauccccaacuucaaccaguacgaggccaugagcugcgacuucaacgggggcaagaucuccgugcaguacaaccucagccacaccuacgcgaucgacgccgccaaccacugcgggaccaucgccaacggcgugcugcagacguucaugcggauggcguggggcggguccuacaucgcccuggacagcggcugcggguccugggacugcaucaugaccagcuaccaguaccucaucauccagaacaccaccugggaggaccacugccaguucucccgccccagccccaucggcuaccuggggcugcucagccagcggacgcgcgacaucuacaucucccggcgccugcugggcaccuucaccuggacccucagcgacuccgagggcaacgagacgcccgggggcuacugccugacccgguggaugcugaucgaggccgagcucaagugcuucgggaacaccgccgucgccaagugcaacgagaagcacgacgaggaguucugcgacaugcugcgccuguucgacuucaacaagcaggcgauccggcgccucaagaccgaggcccagaugagcauccagcugaucaacaaggccgugaacgcccugaucaacgaccagcucaucaugaagaaccaccuccgggacaucaugugcauccccuacugcaacuacuccaaguacugguaccugaaccacacggugaccggcaagaccagccugccccgcugcuggcuggucuccaacgggagcuaccugaacgagacccacuucuccgacgacaucgagcagcaggccgacaacaugaucacggagcuccugcagaaggaguacauggaccggcagggcaagaccccgcugggccugguggaccucuucguguucagcaccuccuucuaccugaucagcaucuuccugcaccucguccgcaucccgacccaccggcacgugaucgggaagcccugccccaagccccaccgccugaaccacaugggcaucugcuccugcgggcuguacaagcacccgggcgugcccgucaaguggaagcggugaggacuagucccuguucccagagcccacuuuuuuuucuuuuuuugaaauaaaauagccugucuuucagaucucaaaggcucuuuucagagccaccaaaaaaaaaaaaaaaaaaaaaaaaaaaaaaaaaaaaaaaaaaaaaaaaaaaaaaaaaaaaaaaaagaauu

SEQ ID NO: 35026 - RNA, 1714 nt, Artificial Sequence
  mRNA product Design a-1 (hSL-A64-N5) comprising derived and/or modified sequence from LASV(Lassa virus/H.sapiens-wt/NGA/2018/ISTH_0959;Clade II)__AVV65099__GPCmut9 (opt1)
aggagagucccgcagucggcguccagcggcucugcuuguucgugugugugucguugcaggccuuauucaagcuuaccaugggccagaucaucaccuucuuccaggaggugccccacgucaucgaggaggugaugaacaucgugcugaucgcccucagccugcuggccauccucaaggggaucuacaacgucgugaccugcggccuguucgggcugguguccuuccuccugcugugcggccgcagcugcuccacgaccuacaagggggucuacgagcuccagacccuggagcuggacauggcgagccucaacaugaccaugccgcuguccugcacgaagaacaacagccaccacuacaucauggugggcaacgagaccggccuggagcucacccugaccaacacguccaucaucaaccacaaguucugcaaccugagcgacgcccacaagaagaaccucuacgaccacgcccugauguccaucaucagcaccuuccaccuguccauccccaacuucaaccaguacgaggccaugagcugcgacuucaacgggggcaagaucuccgugcaguacaaccucagccacgccuacgcgaucgacgccgccaaccacugcgggaccaucgccaacggcguccugcagaccuucaugcggauggcguggggcggguccuacaucgcccuggacagcggcugcggguccugggacugcaucaugacgagcuaccaguaccucaucauccagaacaccaccugggaggaccacugccaguucucccgccccagccccaucggcuaccuggggcugcucagccagcggacccgcgacaucuacaucucccggcgccugcugggcacguucaccuggacccucagcgacuccgagggcaacgagacccccgggggcuacugccugacgcgguggaugcugaucgaggccgagcucaagugcuucgggaacaccgccguggccaagugcaacgagaagcacgacgaggaguucugcgacaugcugcgccuguucgacuucaacaagcaggcgauccggcgccucaagaccgaggcccagaugagcauccagcugaucaacaaggccgugaacgcccugaucaacgaccagcucaucaugaagaaccaccuccgggacaucaugugcaucccguacugcaacuacuccaaguacugguaccugaaccacaccgucacgggcaagaccagccugccccgcugcuggcugguguccaacgggagcuaccugaacgagacccacuucuccgacgacaucgagcagcaggccgacaacaugaucaccgagcuccugcagaaggaguacaucgaccggcagggcaagacgccccugggccugguggaccucuucgucuucagcaccuccuucuaccugaucagcaucuuccugcaccucgugaagaucccgacccaccgccacgugaucgggaagcccugccccaagccccaccggcugaaccacaugggcaucugcuccugcgggcuguacaagcacccgggcguccccgugaaguggaagcgcugaggacuagucccuguucccagagcccacuuuuuuuucuuuuuuugaaauaaaauagccugucuuucagaucucaaaggcucuuuucagagccaccaaaaaaaaaaaaaaaaaaaaaaaaaaaaaaaaaaaaaaaaaaaaaaaaaaaaaaaaaaaaaaaaagaauu

SEQ ID NO: 35027 - RNA, 1714 nt, Artificial Sequence
  mRNA product Design a-1 (hSL-A64-N5) comprising derived and/or modified sequence from LASV(LASV003-NIG-2008;Clade II)__AIT17580__GPCmut9 (opt1)
aggagagucccgcagucggcguccagcggcucugcuuguucgugugugugucguugcaggccuuauucaagcuuaccaugggccagaucaucaccuucuuccaggaggugccccacgucaucgaggaggugaugaacaucgugcugaucgcccucagccugcuggccauccucaaggggaucuacaacgucgcgaccugcggccuguucgggcugguguccuuccuccugcugugcggccgcagcugcuccacgaccuacaaggggguguacgagcuccagacccuggagcuggacauggccagccucaacaugaccaugccgcuguccugcacgaagaacaacagccaccacuacaucauggucggcaacgagaccggccuggagcucacccugaccaacacguccaucaucaaccacaaguucugcaaccugagcgacgcccacaagaagaaccucuacgaccacgcccugauguccaucaucagcaccuuccaccuguccauccccaacuucaaccaguacgaggccaugagcugcgacuucaacgggggcaagaucuccgugcaguacaaccucagccacaccuacgcgguggacgccgccaaccacugcgggaccaucgccaacggcguccugcagacguucaugcggauggcguggggcggguccuacaucgcccuggacagcggcugcggguccugggacugcaucaugaccagcuaccaguaccucaucauccagaacaccaccugggaggaccacugccaguucucccgccccagccccaucggcuaccuggggcugcucagccagcggacgcgcgacaucuacaucucccggcgccugcugggcaccuucaccuggacccucagcgacuccgagagcaacgagacgccgggcggguacugccugacccgguggaugcugaucgaggccgagcucaagugcuucggcaacaccgccguggccaagugcaacgagaagcacgacgaggaguucugcgacaugcugcgccuguucgacuucaacaagcaggcgauccggcgccucaaggccgaggcccagauguccauccagcugaucaacaaggccgugaacgcccugaucaacgaccagcucaucaugaagaaccaccuccgggacaucaugugcauccccuacugcaacuacagcaaguacugguaccugaaccacaccgucacggggcgcaccucccugccccggugcuggcuggugagcaacggcuccuaccugaacgagacccacuucagcgacgacaucgagcagcaggcggacaacaugaucaccgagcuccugcagaaggaguacauggaccgccaggggaagacgccccugggccugguggaccucuucgucuucuccaccagcuucuaccugaucuccaucuuccugcaccucgugaagaucccgacccaccggcacgugaucggcaagcccugccccaagccccaccgccugaaccacauggggaucugcagcugcggccuguacaagcacccggggguccccgugaaguggaagcggugaggacuagucccuguucccagagcccacuuuuuuuucuuuuuuugaaauaaaauagccugucuuucagaucucaaaggcucuuuucagagccaccaaaaaaaaaaaaaaaaaaaaaaaaaaaaaaaaaaaaaaaaaaaaaaaaaaaaaaaaaaaaaaaaagaauu

SEQ ID NO: 35028 - RNA, 1714 nt, Artificial Sequence
  mRNA product Design a-1 (hSL-A64-N5) comprising derived and/or modified sequence from LASV(LASV035-NIG-2009;Clade II)__AIT17588__GPCmut9 (opt1)
aggagagucccgcagucggcguccagcggcucugcuuguucgugugugugucguugcaggccuuauucaagcuuaccaugggccagaucaucaccuucuuccaggaggugccccacgucaucgaggaggugaugaacaucgugcugaucgcccucagccugcuggccauccucaaggggaucuacaacgucgcgaccugcggccuguucgggcugguguccuuccuccugcugugcggccgcagcugcuccacgaccuacaaggggguguacgagcuccagacccuggagcuggacauggccagccucaacaugaccaugccgcuguccugcacgaagaacaacagccaccacuacaucauggucggcaacgagaccggccuggagcucacccugaccaacacguccaucaucaaccacaaguucugcaaccugagcgacgcccacaagaagaaccucuacgaccacgcccugauguccaucaucagcaccuuccaccuguccauccccaacuucaaccaguacgaggccaugagcugcgacuucaacgggggcaagaucuccgugcaguacaaccucagccacgcguacgccguggacgccgccaaccacugcgggaccaucgcgaacggcguccugcagaccuucaugcggauggccuggggcggguccuacaucgcccuggacagcggcugcggguccugggacugcaucaugacgagcuaccaguaccucaucauccagaacaccaccugggaggaccacugccaguucucccgccccagccccaucggcuaccuggggcugcucagccagcggacccgcgacaucuacaucucccggcgccugcugggcacguucaccuggacccucagcgacuccgagggcaacgagacccccgggggcuacugccugacgcgguggaugcugaucgaggccgagcucaagugcuucgggaacaccgccguggcgaagugcaacgagaagcacgacgaggaguucugcgacaugcugcgccuguucgacuucaacaagcaggccauccggcgccucaaggccgaggcccagaugagcauccagcugaucaacaaggccgugaacgcgcugaucaacgaccagcucaucaugaagaaccaccuccgggacaucaugugcauccccuacugcaacuacuccaaguacugguaccugaaccacaccgucaccggcaagacgagccugccccgcugcuggcugguguccaacgggagcuaccugaacgagacccacuucuccgacgacaucgagcagcaggccgacaacaugaucaccgagcuccugcagaaggaguacaucgaccggcagggcaagaccccgcugggccugguggaccucuucgucuucagcacguccuucuaccugaucagcaucuuccugcaccucgugaagaucccgacccaccgccacgugaucgggaagcccugccccaagccccaccggcugaaccacaugggcaucugcuccugcgggcuguacaagcacccgggcguccccgugaaguggaagcgcugaggacuagucccuguucccagagcccacuuuuuuuucuuuuuuugaaauaaaauagccugucuuucagaucucaaaggcucuuuucagagccaccaaaaaaaaaaaaaaaaaaaaaaaaaaaaaaaaaaaaaaaaaaaaaaaaaaaaaaaaaaaaaaaaagaauu

SEQ ID NO: 35029 - RNA, 1714 nt, Artificial Sequence
  mRNA product Design a-1 (hSL-A64-N5) comprising derived and/or modified sequence from LASV(LASV1000-NIG-2009;Clade II)__AIT17782__GPCmut9 (opt1)
aggagagucccgcagucggcguccagcggcucugcuuguucgugugugugucguugcaggccuuauucaagcuuaccaugggccagaucaucaccuucuuccaggaggugccccacgucaucgaggaggugaugaacaucgugcugaucgcccucagccugcuggccauccucaaggggaucuacaacgucgcgaccugcggccuguucgggcugguguccuuccuccugcugugcggccgcagcugcuccacgaccuacaaggggguguacgagcuccagacccuggagcuggacauggccagccucaacaugaccaugccgcuguccugcacgaagaacaacagccaccacuacaucauggucggcaacgagaccggccuggagcucacccugaccaacacguccaucaucaaccacaaguucugcaaccugagcgacgcccacaagaagaaccucuacgaccacgcccugauguccaucaucagcaccuuccaccuguccauccccaacuucaaccaguacgaggccaugagcugcgacuucaacgggggcaagaucuccgugcaguacaaccucagccacaccuacgcgguggacgccgccaaccacugcgggaccaucgccaacggcguccugcagacguucaugcggauggcguggggcggguccuacaucgcccuggacagcggcugcggguccugggacugcaucaugaccagcuaccaguaccucaucauccagaacaccaccugggaggaccacugccaguucucccgccccagccccaucggcuaccuggggcugcucagccagcggacgcgcgacaucuacaucucccggcgccugcugggcaccuucaccuggacccucagcgacuccgagggcaacgagacgcccgggggcuacugccugacccgguggaugcugaucgaggccgagcucaagugcuucgggaacaccgccguggccaagugcaacgagaagcacgacgaggaguucugcgacaugcugcgccuguucgacuucaacaagcaggcgaucaagcggcucaagaccgaggcccagaugagcauccagcugaucaacaaggccgugaacgcccugaucaacgaccagcucaucaugaagaaccaccuccgcgacaucaugugcauccccuacugcaacuacuccaaguacugguaccugaaccacacggucaccggcaagaccagccugccccggugcuggcugguguccaacgggagcuaccugaacgagacccacuucuccgacgacaucgagcagcaggccgacaacaugaucacggagcuccugcagaaggaguacaucgaccgccagggcaagaccccgcugggccugguggaccucuucgucuucagcaccuccuucuaccugaucagcaucuuccugcaccucgugaagaucccgacccaccggcacguggucgggaagcccugccccaagccccaccgccugaaccacaugggcaucugcuccugcgggcuguacaagcacccgggcgugcccgugaaguggaagcggugaggacuagucccuguucccagagcccacuuuuuuuucuuuuuuugaaauaaaauagccugucuuucagaucucaaaggcucuuuucagagccaccaaaaaaaaaaaaaaaaaaaaaaaaaaaaaaaaaaaaaaaaaaaaaaaaaaaaaaaaaaaaaaaaagaauu

SEQ ID NO: 35030 - RNA, 1714 nt, Artificial Sequence
  mRNA product Design a-1 (hSL-A64-N5) comprising derived and/or modified sequence from LASV(LASV221-NIG-2010;Clade II)__AIT17624__GPCmut9 (opt1)
aggagagucccgcagucggcguccagcggcucugcuuguucgugugugugucguugcaggccuuauucaagcuuaccaugggccagaucaucaccuucuuccaggaggugccccacgucaucgaggaggugaugaacaucgugcugaucgcccucagccugcuggccauccucaaggggaucuacaacgucgcgaccugcggccuguucgggcugguguccuuccuccugcugugcggccgcagcugcuccacgaccuacaaggggguguacgagcuccagacccuggagcuggacauggccagccucaacaugaccaugccgcuguccugcacgaagaacaacagccaccacuacaucauggucggcaacgagaccggccuggagcucacccugaccaacacguccaucaucaaccacaaguucugcaaccugagcgacgcccacaagaagaaccucuacgaccacgcccugauguccaucaucagcaccuuccaccuguccauccccaacuucaaccaguacgaggccaugagcugcgacuucaacgggggcaagaucuccgugcaguacaaccucagccacaccuacgcgaucgacgccgccaaccacugcgggaccaucgccaacggcgugcugcagacguucaugcggauggcguggggcggguccuacaucgcccuggacagcggcugcggguccugggacugcaucaugaccagcuaccaguaccucaucauccagaacaccaccugggaggaccacugccaguucucccgccccagccccaucggcuaccuggggcugcucagccagcggacgcgcgacaucuacaucucccggcgccugcugggcaccuucaccuggacccucagcgacuccgagggcaacgagacgcccgggggcuacugccugacccgguggaugcugaucgaggccgagcucaagugcuucgggaacaccgccgucgccaagugcaacgagaagcacgacgaggaguucugcgacaugcugcgccuguucgacuucaacaagcaggcgauccggcgccucaagaccgaggcccagaugagcauccagcugaucaacaaggccgugaacgcccugaucaacgaccagcucaucaugaagaaccaccuccgggacaucaugugcauccccuacugcaacuacuccaaguacugguaccugaaccacacggugaccggcaagaccagccugccccgcugcuggcuggucuccaacgggagcuaccugaacgagacccacuucuccgacgacaucgagcagcaggccgacaacaugaucacggagaugcuccagaaggaguacauggaccggcagggcaagaccccgcugggccugguggaccuguucguguucagcaccuccuucuaccucaucagcaucuuccugcaccuggucaagaucccgacccaccgccacgugaucgggaagcccugccccaagccccaccggcucaaccacaugggcaucugcuccugcgggcuguacaagcacccgggcgugcccgucaaguggaagcgcugaggacuagucccuguucccagagcccacuuuuuuuucuuuuuuugaaauaaaauagccugucuuucagaucucaaaggcucuuuucagagccaccaaaaaaaaaaaaaaaaaaaaaaaaaaaaaaaaaaaaaaaaaaaaaaaaaaaaaaaaaaaaaaaaagaauu

SEQ ID NO: 35031 - RNA, 1714 nt, Artificial Sequence
  mRNA product Design a-1 (hSL-A64-N5) comprising derived and/or modified sequence from LASV(LASV237-NIG-2010;Clade II)__AIT17638__GPCmut9 (opt1)
aggagagucccgcagucggcguccagcggcucugcuuguucgugugugugucguugcaggccuuauucaagcuuaccaugggccagaucaucaccuucuuccaggaggugccccacgucaucgaggaggugaugaacaucgugcugaucgcccucagccugcuggccauccucaaggggaucuacaacgucgcgaccugcggccuguucgggcugguguccuuccuccugcugugcggccgcagcugcuccacgaccuacaaggggguguacgagcuccagacccuggagcuggacauggccagccucaacaugaccaugccgcuguccugcacgaagaacaacagccaccacuacaucauggucggcaacgagaccggccuggagcucacccugaccaacacguccaucaucaaccacaaguucugcaaccugagcgacgcccacaagaaggaccucuacgaccacgcccugauguccaucaucagcaccuuccaccuguccauccccaacuucaaccaguacgaggccaugagcugcgacuucaacgggggcaagaucuccgugcaguacaaccucagccacaccuacgcgguggacgccgccaaccacugcgggaccaucgccaacggcguccugcagacguucaugcggauggcguggggcggguccuacaucgcccuggacagcggcugcggguccugggacugcaucaugaccagcuaccaguaccucaucauccagaacaccaccugggaggaccacugccaguucucccgccccagccccaucggcuaccuggggcugcucagccagcggacgcgcgacaucuacaucucccggcgccugcugggcaccuucaccuggacccucagcgacuccgagggcaacgagacgcccgggggcuacugccugacccgguggaugcugaucgaggccgagcucaagugcuucgggaacaccgccguggccaagugcaacgagaagcacgacgaggaguucugcgacaugcugcgccuguucgacuucaacaagcaggcgauccggcgccucaagaccgaggcccagaugagcauccagcugaucaacaaggccgugaacgcccugaucaacgaccagcucaucaugaagaaccaccuccgggacaucaugugcauccccuacugcaacuacuccaaguacugguaccugaaccacacggucaccggcaagaccagccugccccgcugcuggcugguguccaacgggagcuaccugaacgagacccacuucuccgacgacaucgagcagcaggccgacaacaugaucacggagcuccugcagaaggaguacauggaccggcagggcaagaccccgcugggccugguggaccucuucgucuucagcaccuccuucuaccugaucagcaucuuccugcaccucaucaagaucccgacccaccgccacaucacggggaagcccugccccaagccccaccggcugaaccacaugggcaucugcuccugcgggcuguacaagcacccgggcgugcccgugaaguggaagcgcugaggacuagucccuguucccagagcccacuuuuuuuucuuuuuuugaaauaaaauagccugucuuucagaucucaaaggcucuuuucagagccaccaaaaaaaaaaaaaaaaaaaaaaaaaaaaaaaaaaaaaaaaaaaaaaaaaaaaaaaaaaaaaaaaagaauu

SEQ ID NO: 35032 - RNA, 1714 nt, Artificial Sequence
  mRNA product Design a-1 (hSL-A64-N5) comprising derived and/or modified sequence from LASV(LASV253-NIG-2011;Clade II)__AIT17670__GPCmut9 (opt1)
aggagagucccgcagucggcguccagcggcucugcuuguucgugugugugucguugcaggccuuauucaagcuuaccaugggccagaucaucaccuucuuccaggaggugccccacgucaucgaggaggugaugaacaucgugcugaucgcccucagccugcuggccauccucaaggggaucuacaacgucgcgaccugcggccuguucgggcugguguccuuccuccugcugugcggccgcagcugcuccacgaccuacaaggggguguacgagcuccagacccuggagcuggacauggccagccucaacaugaccaugccgcuguccugcacgaagaacaacagccaccacuacaucauggucggcaacgagaccggccuggagcucacccugaccaacacguccaucaucaaccacaaguucugcaaccugagcgacgcccacaagaagaaccucuacgaccacgcccugauguccaucaucagcaccuuccaccuguccauccccaacuucaaccaguacgaggccaugagcugcgacuucaacgggggcaagaucuccgugcaguacaaccucagccacaccuacgcgguggacgccgccaaccacugcgggaccaucgccaacggcguccugcagacguucaugcggauggcguggggcggguccuacaucgcccuggacagcggcugcggguccugggacugcaucaugaccagcuaccaguaccucaucauccagaacaccaccugggaggaccacugccaguucucccgccccagccccaucggcuaccuggggcugcucagccagcggacgcgcgacaucuacaucucccggcgccugcugggcaccuucaccuggacccucagcgacuccgagggcaacgagacgcccgggggcuacugccugacccgguggaugcugaucgaggccgagcucaagugcuucgggaacaccgccguggccaagugcaacgagaagcacgacgaggaguucugcgacaugcugcgccuguucgacuucaacaagcaggcgauccggcgccucaaggccgaggcccagaugagcauccagcugaucaacaaggccgugaacgcccugaucaacgaccagcucaucaugaagaaccaccuccgggacaucaugugcaucccguacugcaacuacuccaaguacugguaccugaaccacaccgucacgggccgcaccagccugccccggugcuggcugguguccaacgggagcuaccugaacgagacccacuucuccgacgacaucgagcagcaggcggacaacaugaucaccgagcuccugcagaaggaguacaucgaccgccagggcaagacgccccugggccugguggaccucuucgucuucagcaccuccuucuaccugaucagcaucuuccugcaccucgugaagaucccgacccaccggcacaucaucgggaagcccugccccaagccccaccgccugaaccacaugggcaucugcuccugcgggcuguacaagcacccgggcgugcccgucaaguggaagcggugaggacuagucccuguucccagagcccacuuuuuuuucuuuuuuugaaauaaaauagccugucuuucagaucucaaaggcucuuuucagagccaccaaaaaaaaaaaaaaaaaaaaaaaaaaaaaaaaaaaaaaaaaaaaaaaaaaaaaaaaaaaaaaaaagaauu

SEQ ID NO: 35033 - RNA, 1714 nt, Artificial Sequence
  mRNA product Design a-1 (hSL-A64-N5) comprising derived and/or modified sequence from LASV(LASV254-NIG-2011;Clade II)__AIT17674__GPCmut9 (opt1)
aggagagucccgcagucggcguccagcggcucugcuuguucgugugugugucguugcaggccuuauucaagcuuaccaugggccagaucaucaccuucuuccaggaggugccccacgucaucgaggaggugaugaacaucgugcugaucgcccucagccugcuggccauccucaaggggaucuacaacgucgcgaccugcggccuguucgggcugguguccuuccuccugcugugcggccgcagcugcuccacgaccuacaaggggguguacgagcuccagacccuggagcuggacaugaccaaccucaacaugacgaugccgcugagcugcaccaagaacaacucccaccacuacaucauggucggcaacgagaccggccuggagcucacccugacgaacaccagcaucaucaaccacaaguucugcaaccuguccgacgcccacaagaagaaccucuacaaccacgcccugaugagcaucaucuccaccuuccaccugagcauccccaacuucaaccaguacgaggccauguccugcgacuucaacgggggcaagaucagcgugcaguacaaccucucccacagcuacgccguggacgcggccaaccacugcgggaccaucgccaacggcguccugcagacguucaugcggauggccuggggcggguccuacaucgcgcuggacagcggcugcgggaacugggacugcaucaugaccuccuaccaguaccucaucauccagaacaccaccugggaggaccacugccaguucagccgccccucccccaucggcuaccuggggcugcucagccagcggacgcgcgacaucuacaucagccggcgccugcugggcaccuucaccuggacccucuccgacagcgagggcaacgagacgcccgggggcuacugccugacccgguggaugcugaucgaggccgagcucaagugcuucgggaacaccgccguggccaagugcaacgagaagcacgacgaggaguucugcgacaugcugcgccuguucgacuucaacaagcaggccauccggcgccucaagaccgaggcgcaggccaacauccagcugaucaacaaggccgugaacgcccugaucaacgaccagcucaucaugaagaaccaccuccgggacaucaugugcauccccuacugcaacuacuccaaguacugguaccugaaccacacggucaccggcaagaccagccugccccgcugcuggcugguguccaacgggagcuaccugaacgagacccacuucuccgacgacaucgagcagcaggccgacaacaugaucacggagcuccugcagaaggaguacauggaccggcagggcaagaccccgcugggccugguggaccucuucgucuucagcaccuccuucuaccugaucagcaucuuccugcaccucgugaagaucccgacccaccgccacgugaucgggaagcccugccccaagccccaccggcugaaccacaugggcaucugcuccugcgggcuguacaagcacccgggcguccccgugaaguggaagcgcugaggacuagucccuguucccagagcccacuuuuuuuucuuuuuuugaaauaaaauagccugucuuucagaucucaaaggcucuuuucagagccaccaaaaaaaaaaaaaaaaaaaaaaaaaaaaaaaaaaaaaaaaaaaaaaaaaaaaaaaaaaaaaaaaagaauu

SEQ ID NO: 35034 - RNA, 1714 nt, Artificial Sequence
  mRNA product Design a-1 (hSL-A64-N5) comprising derived and/or modified sequence from LASV(Nig08-A19;Clade III)__ADU56618__GPCmut9 (opt1)
aggagagucccgcagucggcguccagcggcucugcuuguucgugugugugucguugcaggccuuauucaagcuuaccaugggccagaucgugaccuucuuccaggaggucccccacgugaucgaggaggugaugaacaucguccugaucgcccucagcauccuggccauccugaaggggcucuacaacaucgcgaccugcggccugaucgggcuggugacguuccuccugcuguccggccgcagcugcuccaugaccuacaaggggguguacgagcuccagacccuggagcugaacaugaacacccucaacaugacgaugccgcugagcugcaccaagaacaacucccaccacuacaucauggucggcaacgagaccggccuggagcucacccugacgaacaccagccugcuccaccacaaguucugcaaccuguccgacgcccacaagaagaaccuguacgaccacacccucaugagcaucaucuccaccuuccaccugagcauccccaacuucaaccaguacgaggccauguccugcgacuucaacgggggcaagaucacggugcaguacaaccugagccacuccuacgccaucgacgccgcgaaccacugcgggaccguggccaacggcguccuccagaccuucaugcggauggccuggggcgggagcuacaucgcccuggacuccggcugcgggaagugggacugcaucaugaccagcuaccaguaccugaucauccagaacacgaccugggaggaccacugccaguucucccgccccagccccaucggcuaccucgggcugcugucccagcggacccgcgacaucuacaucagccggcgccuccugggcaccuucacguggacccugagcgacuccgagggcaacgagacccccgggggcuacugccucacccgguggaugcugaucgaggcggagcugaagugcuucgggaacacggccguggccaagugcaacgagaagcacgacgaggaguucugcgacaugcuccgccuguucgacuucaacaagcaggccauccggcgccugaaggccgaggcgcagaugagcauccagcucaucaacaaggccgugaacgcccugaucaacgaccagcugaucaugaagaaccaccuccgggacaucaugugcauccccuacugcaacuacuccaaguacugguaccugaaccacaccagcaccggccgcaccucccugccccggugcuggcucgucagcaacggguccuaccugaacgagacgcacuucagcgacgacaucgagcagcaggccgacaacaugaucaccgagaugcugcagaaggaguaccuggaccgccagggcaagaccccgcucggccugguggaccuguucguguucuccaccagcuucuaccucaucuccaucuuccugcaccuggucaagaucccgacgcaccggcacaucguggggaagcccugccccaagccccaccgccucaaccacaugggcaucugcagcugcgggcuguacaagcagccgggcgugcccguccgguggaagcgcugaggacuagucccuguucccagagcccacuuuuuuuucuuuuuuugaaauaaaauagccugucuuucagaucucaaaggcucuuuucagagccaccaaaaaaaaaaaaaaaaaaaaaaaaaaaaaaaaaaaaaaaaaaaaaaaaaaaaaaaaaaaaaaaaagaauu

SEQ ID NO: 35035 - RNA, 1717 nt, Artificial Sequence
  mRNA product Design a-1 (hSL-A64-N5) comprising derived and/or modified sequence from LASV(G1180-SLE-2010;Clade IV)__AIT17168__GPCmut9 (opt1)
aggagagucccgcagucggcguccagcggcucugcuuguucgugugugugucguugcaggccuuauucaagcuuaccaugggccagaucgugaccuucuuccaggaggucccccacgugaucgaggaggugaugaacaucguccugaucgcccucagcauccuggccgugcugaaggggcucuacaacuucgcgaccugcggccugguggggcugcucaccuuccugcugcucugcggccgcuccugcaccgccagccgguacaagggggucuacgagcugcagacccuggagcucaacauggagacccugaacaugacgaugccgcuguccugcaccaagaacaacagccaccacuacaucauggugggcaacgagaccggccucgagcugacccugacgaacaccuccaucaucaaccacaaguucugcaaccucagcgacgcccacaagaagaaccuguacgaccacgcccugauguccaucaucagcaccuuccaccucuccauccccaacuucaaccaguacgaggccaugagcugcgacuucaacgggggcaagaucuccgugcaguacaaccugagccacuccuacgcgggggacgccgccaaccacugcggcaccgucgccaacggggugcugcagacguucaugcgcauggcguggggcggcagcuacaucgcccucgacuccgggugcggcagcugggacugcaucaugaccuccuaccaguaccugaucauccagaacaccaccugggaggaccacugccaguucagccggcccucccccaucggguaccugggccuccugagccagcgcacgcgggacaucuacaucagccgccggcugcucggcaccuucaccuggacccuguccgacagcgaggggaaggacacgccgggcggguacugccugacccgcuggaugcucaucgaggccgagcugaagugcuucggcaacaccgccguggccaagugcaacgagaagcacgacgaggaguucugcgacaugcugcggcuguucgacuucaacaagcaggcgauccagcgccugaaggccgaggcccagauguccauccagcugaucaacaaggccgucaacgcccucaucaacgaccagcugaucaugaagaaccaccuccgggacaucaugugcauccccuacugcaacuacagcaaguacugguaccucaaccacaccacgaccgggaagaccucccugcccaagugcuggcuggugagcaacggcuccuaccucaacgagacccacuucagcgacgacaucgagcagcaggcggacaacaugaucacggagaugcugcagaaggaguacauggagcgccagggcaagacgccccuggggcugguggaccucuucgucuucuccaccagcuucuaccugaucuccaucuuccugcaccucgugaagaucccgacccaccggcacaucgugggcaagagcugccccaagccccaccgccugaaccacauggggaucugcuccugcggccuguacaagcagcccggggucccggugaaguggaagcggugaggacuagucccuguucccagagcccacuuuuuuuucuuuuuuugaaauaaaauagccugucuuucagaucucaaaggcucuuuucagagccaccaaaaaaaaaaaaaaaaaaaaaaaaaaaaaaaaaaaaaaaaaaaaaaaaaaaaaaaaaaaaaaaaagaauu

SEQ ID NO: 35036 - RNA, 1717 nt, Artificial Sequence
  mRNA product Design a-1 (hSL-A64-N5) comprising derived and/or modified sequence from LASV(G1442-SLE-2011;Clade IV)__AIT17180__GPCmut9 (opt1)
aggagagucccgcagucggcguccagcggcucugcuuguucgugugugugucguugcaggccuuauucaagcuuaccaugggccagaucgugaccuucuuccaggaggucccccacgugaucgaggaggugaugaacaucguccugaucgcccucagcauccuggccgugcugaaggggcucuacaacguggcgaccugcggccugaucgggcuggucacguuccuccugcugugcggccgcuccugcaccaccacccucuacaaggggguguacgagcugcagacgcuggagcucaacauggagacccugaacaugaccaugccgcugagcugcaccaagaacaacucccaccacuacauccgggugggcaacgagacgggccucgagcugacccugaccaacaccagcaucaucaaccacaaguucugcaaccucuccgacgcccacaagaagaaccuguacgaccacgcccugaugagcaucaucuccacguuccaccucagcauccccaacuucaaccaguacgaggccauguccugcgacuucaacgggggcaagaucagcguccaguacaaccugucccacagcuacgccggggacgcggccaaccacugcggcaccguggccaacggggugcugcagaccuucaugcgcauggccuggggcggcuccuacaucgcgcucgacagcgggugcggcaacugggacugcaucaugaccuccuaccaguaccugaucauccagaacacgaccugggacgaccacugccaguucagccggcccucccccaucggguaccugggccuccugagccagcgcacccgggacgucuacaucucccgccggcugcucggcaccuucacguggacccugagcgacagcgaggggaaggacaccccgggcggguacugccugacccgcuggaugcucaucgaggccgagcugaagugcuucggcaacacggccguggccaagugcaacgagaagcacgacgaggaguucugcgacaugcugcggcuguucgacuucaacaagcaggccauccagcgccugaaggcggaggcccagauguccauccagcugaucaacaaggccgugaacgcccucaucaacgaccagcugaucaugaagaaccaccuccgggacaucaugugcauccccuacugcaacuacagcaaguacugguaccucaacaacaccgccaccgggaagaccucccugcccaagugcuggcugaucagcaacggcuccuaccucaacgagacgcacuucagcgacgacaucgagcaggaggcggacaacaugaucaccgagaugcugcagaaggaguacauggagcgccagggcaagacgccccuggggcuggucgaccucuucguguucuccaccagcuucuaccugaucuccaucuuccugcaccucgugaagaucccgacccaccggcacaucgucggcaagagcugccccaagccccaccgccugaaccacauggggaucugcuccugcggccuguacaagcagcccggggugccggugcgguggaagcgcugaggacuagucccuguucccagagcccacuuuuuuuucuuuuuuugaaauaaaauagccugucuuucagaucucaaaggcucuuuucagagccaccaaaaaaaaaaaaaaaaaaaaaaaaaaaaaaaaaaaaaaaaaaaaaaaaaaaaaaaaaaaaaaaaagaauu

SEQ ID NO: 35037 - RNA, 1717 nt, Artificial Sequence
  mRNA product Design a-1 (hSL-A64-N5) comprising derived and/or modified sequence from LASV(G3010-SLE-2013;Clade IV)__AIT17344__GPCmut9 (opt1)
aggagagucccgcagucggcguccagcggcucugcuuguucgugugugugucguugcaggccuuauucaagcuuaccaugggccagaucgugaccuucuuccaggaggucccccacgugaucgaggaggugaugaacaucguccugaucgcccucagcauccuggccgugcugaaggggcucuacaacuucgcgaccugcggccugguggggcuggucacguuccuccugcugugcggccgcuccugcaccaccagccucuacaaggggguguacgagcugcagacccuggagcucaacauggagacgcugaacaugaccaugccgcuguccugcaccaagaacaacagccaccacuacaucauggugggcaacgagaccggccucgagcugacgcugaccaacaccuccaucaucaaccacaaguucugcaaccucagcgacgcccacaagaagaaccuguacaaccacgcccugauguccaucaucagcaccuuccaccucuccauccccaacuucaaccaguacgaggccaugagcugcgacuucaacgggggcaagaucuccguccaguacaaccugagccacuccuacgccggggacgcggccagccacugcggcacgguggccaacggggugcugcagaccuucaugcggauggccuggggcggcuccuacaucgcgcucgacagcgggugcggcaagugggacugcaucaugaccuccuaccaguaccugaucauccagaacaccacgugggaggaccacugccaguucagccgccccucccccaucggguaccugggccuccugagccagcggacccgcgacaucuacaucagccggcgccugcucggcaccuucaccuggacgcuguccgacagcgaggggaaggacaccccgggcggguacugccugacccgguggaugcucaucgaggccgagcugaagugcuucggcaacaccgccgucgccaagugcaacgagaagcacgacgaggaguucugcgacaugcugcgccucuucgacuucaacaagcaggccauccagcggcugaagacggaggcgcagauguccauccagcugaucaacaaggccgugaacgcccucaucaacgaccagcugaucaugaagaaccaccuccgcgacaucaugugcauccccuacugcaacuacagcaaguacugguaccugaaccacaccaccaccgggaagacgucccugcccaagugcuggcuggugagcaacggcuccuaccucaacgagacccacuucagcgacgacaucgagcagcaggccgacaacaugaucaccgagaugcugcagaaggaguacauggagcggcagggcaagacgccccuggggcuggucgaccucuucguguucuccaccagcuucuaccugaucuccaucuuccugcaccucgugaagaucccgacccaccgccacaucgucggcaagagcugccccaagccccaccggcugaaccacauggggaucugcuccugcggccuguacaagcagcccggggugccggugcgcuggaagcggugaggacuagucccuguucccagagcccacuuuuuuuucuuuuuuugaaauaaaauagccugucuuucagaucucaaaggcucuuuucagagccaccaaaaaaaaaaaaaaaaaaaaaaaaaaaaaaaaaaaaaaaaaaaaaaaaaaaaaaaaaaaaaaaaagaauu

SEQ ID NO: 35038 - RNA, 1717 nt, Artificial Sequence
  mRNA product Design a-1 (hSL-A64-N5) comprising derived and/or modified sequence from LASV(G502-SLE-2009;Clade IV)__AIT17126__GPCmut9 (opt1)
aggagagucccgcagucggcguccagcggcucugcuuguucgugugugugucguugcaggccuuauucaagcuuaccaugggccagaucgugaccuucuuccaggaggucccccacgugaucgaggaggugaugaacaucguccugaucgcccucagcauccuggccgugcugaaggggcucuacaacuucgcgaccugcggccugguggggcugcucacguuccugcugcucugcggccgcuccugcaccaccgggcuguacaagggcgucuacgagcugcagacccucgagcugaacauggagacgcugaacaugaccaugccgcucagcugcaccaagaacaacucccaccacuacaucauggugggcaacgagaccgggcuggagcugacgcucaccaacaccagcaucaucaaccacaaguucugcaaccuguccgacgcccacaagaagaaccuguacgaccacgcccucaugagcaucaucuccaccuuccaccugagcauccccaacuucaaccaguacgaggccauguccugcgacuucaacggcgggaagaucagcgugcaguacaaccugucccacagcuacgccggcgacgcggccgaccacugcgggacggucgccaacggcgugcuccagaccuucaugcggauggccuggggcggguccuacaucgcgcuggacagcggcugcgggcgcugggacugcaucaugaccuccuaccaguaccugaucauccagaacaccacgugggaggaccacugccaguucagccggcccucccccaucggcuaccucggccugcugagccagcgcacccgggacaucuacaucucccgccggcuccuggggaccuucaccuggacgcugagcgacagcgagggcaaggacacccccgggggcuacugccucacccgcuggaugcugaucgaggccgagcugaagugcuucgggaacaccgccguggccaagugcaacgagaagcacgacgaggaguucugcgacaugcuccggcuguucgacuucaacaagcaggccauccagcgccugaaggcggaggcccagauguccauccagcucaucaacaaggccgucaacgcccugaucaacgaccagcuggugaugaagaaccaccuccgggacaucaugugcauccccuacugcaacuacagccgcuacugguaccugaaccacacgaccaccggccggaccucccugcccaagugcuggcucgugagcaacggcuccuaccugaacgagacgcacuucagcgacgacaucgagcagcaggccgacaacaugaucaccgagaugcugcagaaggaguacauggagcgccaggggaagaccccgcugggccucgucgaccuguucguguucuccaccagcuucuaccugaucuccaucuuccuccaccuggugaagaucccgacgcaccggcacaucgucggcaagagcugccccaagccccaccgccugaaccacauggggaucugcuccugcgggcucuacaagcagcccggcgugccggugaaguggaagcggugaggacuagucccuguucccagagcccacuuuuuuuucuuuuuuugaaauaaaauagccugucuuucagaucucaaaggcucuuuucagagccaccaaaaaaaaaaaaaaaaaaaaaaaaaaaaaaaaaaaaaaaaaaaaaaaaaaaaaaaaaaaaaaaaagaauu

SEQ ID NO: 35039 - RNA, 1717 nt, Artificial Sequence
  mRNA product Design a-1 (hSL-A64-N5) comprising derived and/or modified sequence from LASV(G733-SLE-2010;Clade IV)__AIT17154__GPCmut9 (opt1)
aggagagucccgcagucggcguccagcggcucugcuuguucgugugugugucguugcaggccuuauucaagcuuaccaugggccagaucgugaccuucuuccaggaggucccccacgugaucgaggaggugaugaacaucguccugaucgcccucagcauccuggccgugcugaaggggcucuacaacuucgcgaccugcggcaucguggggcuggucuccuuccugcuccugugcggccgcagcugcacgaccucccuguacaaggggguguacgagcuccagacccuggagcugaacauggagacccucaacaugacgaugccgcugagcugcaccaagaacaacucccaccacuacaucauggugggcaacgagaccggccuggagcucacccugacgaacaccagcaucaucaaccacaaguucugcaaccuguccgacgcccacaagaagaaccucuacgaccacgcccugaugagcaucaucuccaccuuccaccugagcauccccaacuucaaccaguacgaggccauguccugcgacuucaacgggggcaagaucagcguccaguacaaccucucccacagcuacgccggggacgcggccaaccacugcggcaccaucgccaacggggugcugcagacguucaugcggauggccuggggcggcuccuacaucgcgcuggacagcgggugcgaccgcugggacugcaucaugaccuccuaccaguaccucaucauccagaacaccaccugggaggaccacugccaguucagccggcccucccccaucggcuaccuggggcugcucagccagcgcacgcgggacaucuacaucagccgccggcugcugggcaccuucaccuggacccucuccgacagcgagggcaaggacacgcccgggggcuacugccugacccgcuggaugcugaucgaggccgagcucaagugcuucgggaacaccgccguggccaagugcaacgagaagcacgacgaggaguucugcgacaugcugcggcuguucgacuucaacaagcaggccauccagcgccucaaggcggaggcccagauguccauccagcugaucaacaaggccgucaacgcccugaucaacgaccagcucaucaugaagaaccaccuccgggacaucaugugcauccccuacugcaacuacagcaaguacugguaccugaaccacaccacgaccggcaagaccucccugcccaagugcuggcuggugagcaacggguccuaccugaacgagacccacuucagcgacgacaucgagcagcaggccgacaacaugaucacggagaugcuccagaaggaguacauggagcgccagggcaagaccccgcugggccugguggaccuguucgucuucuccaccagcuucuaccucaucuccaucuuccugcaccuggugaagaucccgacccaccggcacguggucggcaagagcugccccaagccccaccgccucaaccacauggggaucugcuccugcgggcuguacggccagcccggggugccggugaaguggaagcggugaggacuagucccuguucccagagcccacuuuuuuuucuuuuuuugaaauaaaauagccugucuuucagaucucaaaggcucuuuucagagccaccaaaaaaaaaaaaaaaaaaaaaaaaaaaaaaaaaaaaaaaaaaaaaaaaaaaaaaaaaaaaaaaaagaauu

SEQ ID NO: 35040 - RNA, 1717 nt, Artificial Sequence
  mRNA product Design a-1 (hSL-A64-N5) comprising derived and/or modified sequence from MOPV/LASV reassortant(IGS-1;Clade IV)__AFY05576__GPCmut9 (opt1)
aggagagucccgcagucggcguccagcggcucugcuuguucgugugugugucguugcaggccuuauucaagcuuaccaugggccagaucgugaccuucuuccaggaggucccccacgugaucgaggaggugaugaacaucguccugaucgcccucagcgugcuggccgugcugaaggggcucuacaacuucgcgaccugcggccuggucgggcuggugacguuccuccugcugugcggccgcuccugcaccaccagccucuacaaggggguguacgagcugcagacccuggagcucaacauggagacgcugaacaugaccaugccgcuguccugcaccaagaacaacagccaccacuacaucauggucggcaacgagaccggccucgagcugacgcugaccaacaccuccaucaucaaccacaaguucugcaaccucagcgacgcccacaagaagaaccuguacgaccacgcccugauguccaucaucagcaccuuccaccucuccauccccaacuucaaccaguacgaggccaugagcugcgacuucaacgggggcaagaucuccgugcaguacaaccugagccacuccuacgccggggacgcggccaaccacugcggcacgguggccaacgggguccugcagaccuucaugcggauggccuggggcggcagcuacaucgcgcucgacuccgggugcggcaacugggacugcaucaugaccagcuaccaguaccugaucauccagaacaccacgugggaggaccacugccaguucucccgccccagccccaucggguaccugggccuccugucccagcggacccgcgacaucuacaucagccggcgccugcucggcaccuucaccuggacgcugagcgacuccgagggggaggacaccccgggcggguacugccugacccgguggaugcucaucgaggccgagcugaagugcuucggcaacaccgccguggccaagugcaacgagaagcacgacgaggaguucugcgacaugcugcgccucuucgacuucaacaagcaggccauccagcggcugaaggcggaggcccagaugagcauccagcugaucaacaaggccgugaacgcccucaucaacgaccagcugaucaugaagaaccaccuccgcgacaucaugugcauccccuacugcaacuacuccaaguacugguaccugaaccacacgaccaccgggcggaccagccugcccaagugcuggcuggucuccaacggcagcuaccucaacgagacgcacuucuccgacgacaucgagcagcaggccgacaacaugaucaccgagaugcugcagaaggaguacauggagcgccagggcaagacgccccuggggcugguggaccucuucguguucagcaccuccuucuaccugaucagcaucuuccugcaccucgucaagaucccgacccaccggcacaucgugggcaaguccugccccaagccccaccgccugaaccacauggggaucugcagcugcggccuguacaagcagcccggggugccggucaaguggaagcggugaggacuagucccuguucccagagcccacuuuuuuuucuuuuuuugaaauaaaauagccugucuuucagaucucaaaggcucuuuucagagccaccaaaaaaaaaaaaaaaaaaaaaaaaaaaaaaaaaaaaaaaaaaaaaaaaaaaaaaaaaaaaaaaaagaauu

SEQ ID NO: 35041 - RNA, 1717 nt, Artificial Sequence
  mRNA product Design a-1 (hSL-A64-N5) comprising derived and/or modified sequence from LASV(LM765-SLE-2012;Clade IV)__AIT17814__GPCmut9 (opt1)
aggagagucccgcagucggcguccagcggcucugcuuguucgugugugugucguugcaggccuuauucaagcuuaccaugggccagaucgugaccuucuuccaggaggucccccacgugaucgaggaggugaugaacaucguccugaucgcccucagcauccuggccgugcugaaggggcucuacaacuucgcgaccugcggccugguggggcuggucacguuccuccugcugugcggccgcuccugcaccaccagccucuacaaggggguguacgagcugcagacccuggagcucaacauggagacgcugaacaugaccaugccgcuguccugcaccaagaacaacagccaccacuacaucauggugggcaacgagaccggccucgagcugacgcugaccaacaccuccaucaucgaccacaaguucugcaaccucagcgacgcccaccggaagaaccuguacgaccacgcccugauguccaucaucagcaccuuccaccucuccauccccaacuucaaccaguacgaggccaugagcugcgacuucaacgggggcaagaucuccguccaguacaaccugagccacuccuacgccaaggacgcggccgaccacugcgggacgguggccaacggcgugcugcagaccuucaugcgcauggccuggggcgggagcuacaucgcgcucgacuccggcugcgggcggugggacugcaucaugaccagcuaccaguaccugaucauccagaacaccacgugggaggaccacugccaguucucccgccccagccccaucggcuaccuggggcuccugucccagcggacccgcgacaucuacaucagccggcgccugcucggcaccuucaccuggacgcugagcgacuccgagggcaaggacacccccgggggcuacugccugacccgguggaugcucaucgaggccgagcugaagugcuucgggaacaccgccgucgccaagugcaacgagaagcacgacgaggaguucugcgacaugcugcgccucuucgacuucaacaagcaggccauccagcggcugaaggcggaggcccagaugagcauccagcugaucaacaaggccgugaacgcccucaucaacgaccagcugaucaugaagaaccaccuccgcgacaucaugugcauccccuacugcaacuacuccaaguacugguaccugaaccacacgaccaccggcaagaccagccugcccaagugcuggcugguguccaacgggagcuaccucaacgagacgcacuucuccgacgacaucgagcagcaggccgacaacaugaucaccgagaugcugcagaaggaguacauggagcggcagggcaagaccccgcugggccuggucgaccucuucguguucagcaccuccuucuaccugaucagcaucuuccugcaccucgugaagaucccgacgcaccgccacaucgucgggaagcccugccccaagccccaccggcugaaccacaugggcaucugcuccugcgggcuguacaagcagccgggcgugcccgugaaguggaagcgcugaggacuagucccuguucccagagcccacuuuuuuuucuuuuuuugaaauaaaauagccugucuuucagaucucaaaggcucuuuucagagccaccaaaaaaaaaaaaaaaaaaaaaaaaaaaaaaaaaaaaaaaaaaaaaaaaaaaaaaaaaaaaaaaaagaauu

SEQ ID NO: 35042 - RNA, 1717 nt, Artificial Sequence
  mRNA product Design a-1 (hSL-A64-N5) comprising derived and/or modified sequence from LASV(LM776-SLE-2012;Clade IV)__AIT17824__GPCmut9 (opt1)
aggagagucccgcagucggcguccagcggcucugcuuguucgugugugugucguugcaggccuuauucaagcuuaccaugggccagaucgugaccuucuuccaggaggucccccacgugaucgaggaggugaugaacaucguccugaucgcccucagcauccuggccgugcugaaggggcucuacaacuucgcgaccugcggccugguggggcuggucacguuccuccugcugugcggccgcuccugcaccaccagcguguacaaggggguguacgagcuccagacccuggagcugaacauggagacgcucaacaugaccaugccgcuguccugcaccaagaacaacagccaccacuacaucauggucggcaacgagaccggccuggagcucacgcugaccaacaccuccaucaucaaccacaaguucugcaaccugagcgacgcccacaagaagaaccucuacgaccacgcccugauguccaucaucagcaccuuccaccuguccauccccaacuucaaccaguacgaggccaugagcugcgacuucaacgggggcaagaucuccgugcaguacaaccucagccacuccuacgccggggacgcggccaaccacugcggcacgguggccaacgggguccugcagaccuucaugcggauggccuggggcggcagcuacaucgcgcuggacuccgggugcggcaagugggacugcaucaugaccagcuaccaguaccucaucauccagaacaccacgugggaggaccacugccaguucucccgccccagccccaucggguaccugggccugcucucccagcggacccgcgacaucuacaucagccggcgccugcugggcaccuucaccuggacgcucagcgacuccgaggggaaggacaccccgggcggguacugccugacccgguggaugcugaucgaggccgagcucaagugcuucggcaacaccgccguggccaagugcaacgagaagcacgacgaggaguucugcgacaugcugcgccuguucgacuucaacaagcaggccauccagcggcucaaggcggaggcccagaugagcauccagcugaucaacaaggccgugaacgcccugaucaacgaccagcucaucaugaagaaccaccuccgcgacaucaugugcauccccuacugcaacuacuccaaguacugguaccugaaccacacgaccaccgggaagaccagccugcccaagugcuggcuggucuccaacggcagcuaccugaacgagacgcacuucuccgacgacaucgagcagcaggccgacaacaugaucaccgagaugcuccagaaggaguacauggagcggcagggcaagacgccccuggggcugguggaccuguucguguucagcaccuccuucuaccucaucagcaucuuccugcaccuggucaagaucccgacccaccgccacaucgugggcaaguccugccccaagccccaccggcucaaccacauggggaucugcagcugcggccuguacaagcagcccggggugccgguccgcuggaagcggugaggacuagucccuguucccagagcccacuuuuuuuucuuuuuuugaaauaaaauagccugucuuucagaucucaaaggcucuuuucagagccaccaaaaaaaaaaaaaaaaaaaaaaaaaaaaaaaaaaaaaaaaaaaaaaaaaaaaaaaaaaaaaaaaagaauu

SEQ ID NO: 35043 - RNA, 1717 nt, Artificial Sequence
  mRNA product Design a-1 (hSL-A64-N5) comprising derived and/or modified sequence from LASV(Mad39;Clade IV)__ANH09722__GPCmut9 (opt1)
aggagagucccgcagucggcguccagcggcucugcuuguucgugugugugucguugcaggccuuauucaagcuuaccaugggccagaucgugaccuucuuccaggaggucccccacgugaucgaggaggugaugaacaucguccugaucgcccucagcauccuggccgugcugaaggggcucuacaacguggcgaccugcggccugaucgggcuggucacguuccuccugcugugcggccgcuccugcaccaccacccucuacaaggggguguacgagcugcaggcccuggagcucaacauggagacgcugaacaugaccaugccgcugagcugcaccaagaacaacucccaccacuacauccgggugggcaacgagaccggccucgagcugacgcugaccaacaccagccucaucaaccacaaguucugcaaccuguccgacgcccacaagaagaaccuguacgaccacgcccucaugagcaucaucuccaccuuccaccugagcauccccaacuucaaccaguacgaggccauguccugcgacuucaacgacgggaagaucagcguccaguacaaccugucccacacguacgcgggcgacaccgccaaccacugcgggaccguggccaacggcgugcuccagaccuucaugcgcauggccuggggcgggagcuacaucgcgcuggacuccggcugcgggggcugggacugcaucaugacgagcuaccaguaccugaucauccagaacaccaccugggaggaccacugccaguucucccggcccagccccaucggguaccucggccugcugucccagcgcacccgggacaucuacaucagccgccggcuccugggcacguucaccuggacccuguccgacagcgaggggaaggacaccccgggcggguacugccucacgcgcuggaugcugaucgaggccgagcugaagugcuucggcaacaccgccgucgccaagugcaacgagaagcacgacgaggaguucugcgacaugcuccggcuguucgacuucaacaagcaggccauccagcgccugaaggcggaggcccagaugagcauccagcucaucaacaaggccgugaacgcccugaucaacgaccagcugaucaugaagaaccaccuccgggacaucaugugcauccccuacugcaacuacuccaaguacugguaccugaaccacaccgugaccgggaagacgagccugcccaagugcuggcucgucuccaacggcagcuaccugaacgagacccacuucuccgacgacaucgagcagcaggccgacaacaugaucaccgagaugcugcagaaggaguacauggagcgccagggcaagacgccccuggggcucguggaccuguucguguucagcaccuccuucuaccugaucagcaucuuccuccaccuggucaagaucccgacccaccggcacguggugggcaagcccugccccaagccccaccgccugaaccacauggggaucugcuccugcggcuucuacaagcagccggggguccccgugcgguggaagcgcugaggacuagucccuguucccagagcccacuuuuuuuucuuuuuuugaaauaaaauagccugucuuucagaucucaaaggcucuuuucagagccaccaaaaaaaaaaaaaaaaaaaaaaaaaaaaaaaaaaaaaaaaaaaaaaaaaaaaaaaaaaaaaaaaagaauu

SEQ ID NO: 35044 - RNA, 1717 nt, Artificial Sequence
  mRNA product Design a-1 (hSL-A64-N5) comprising derived and/or modified sequence from LASV(Z0947-SLE-2011;Clade IV)__AIT17840__GPCmut9 (opt1)
aggagagucccgcagucggcguccagcggcucugcuuguucgugugugugucguugcaggccuuauucaagcuuaccaugggccagaucgugaccuucuuccaggaggucccccacgugaucgaggaggugaugaacaucguccugaucgcccucagcauccuggccgugcugaaggggcucuacaacuucgcgaccugcggccugguggggcuggucacguuccuccugcugugcggccgcuccugcaccaucagccucuacaaggggguguacgagcugcagacccuggagcucaacauggagacccugaacaugacgaugccgcuguccugcaccaagaacaacagccaccacuacaucauggugggcaacgagaccggccucgagcugacccugacgaacaccuccaucaucaaccacaaguucugcaaccucagcgacgcccacaagaagaaccuguacgaccacgcccugauguccaucaucagcaccuuccaccucuccauccccaacuucaaccaguacgaggccaugagcugcgacuucaacgggggcaagaucuccguccaguacaaccugagccacuccuacgccggggacgcggccaaccacugcggcaccguggccaacggggugcugcagacguucaugcggauggccuggggcggcagcuacaucgcgcucgacuccgggugcgaccgcugggacugcaucaugaccagcuaccaguaccugaucauccagaacaccaccugggaggaccacugccaguucucccggcccagccccaucggcuaccuggggcuccugucccagcgcacgcgggacaucuacaucagccgccggcugcucggcaccuucaccuggacccugagcgacuccgagggcaaggacacgcccgggggcuacugccugacccgcuggaugcucaucgaggccgagcugaagugcuucgggaacaccgccgucgccaagugcaacgagaagcacgacgaggaguucugcgacaugcugcggcuguucgacuucaacaagcaggccauccagcgccugaaggcggaggcccagaugagcauccagcugaucaacaaggccgugaacgcccucaucaacgaccagcugaucaugaagaaccaccuccgggacaucaugugcauccccuacugcaacuacuccaaguacugguaccucaaccacaccacgaccggcaagaccagccugcccaagugcuggcugguguccaacgggagcuaccucaacgagacccacuucuccgacgacaucgagcagcaggccgacaacaugaucacggagaugcugcagaaggaguacauggagcgccagggcaagaccccgcugggccuggucgaccucuucguguucagcaccuccuucuaccugaucagcaucuuccugcaccucgugaagaucccgacccaccggcacaucgucgggaagcccugccccaagccccaccgccugaaccacaugggcaucugcuccugcgggcuguacaagcagccgggcgugcccgugaaguggaagcggugaggacuagucccuguucccagagcccacuuuuuuuucuuuuuuugaaauaaaauagccugucuuucagaucucaaaggcucuuuucagagccaccaaaaaaaaaaaaaaaaaaaaaaaaaaaaaaaaaaaaaaaaaaaaaaaaaaaaaaaaaaaaaaaaagaauu

SEQ ID NO: 35045 - RNA, 1717 nt, Artificial Sequence
  mRNA product Design a-1 (hSL-A64-N5) comprising derived and/or modified sequence from LASV(Josiah;Clade IV)__NP_694870__GPCmut9 (opt4)
aggagagucccgcagucggcguccagcggcucugcuuguucgugugugugucguugcaggccuuauucaagcuuaccaugggccagaucgugaccuucuuccaggaggugccccacgugaucgaggaggugaugaacaucgugcugaucgcccugagcgugcuggccgugcugaagggccuguacaacuucgccaccugcggccuggugggccuggugaccuuccugcugcugugcggcagaagcugcaccaccagccuguacaagggcguguacgagcugcagacccuggagcugaacauggagacccugaacaugaccaugccccugagcugcaccaagaacaacagccaccacuacaucauggugggcaacgagaccggccuggagcugacccugaccaacaccagcaucaucaaccacaaguucugcaaccugagcgacgcccacaagaagaaccuguacgaccacgcccugaugagcaucaucagcaccuuccaccugagcauccccaacuucaaccaguacgaggccaugagcugcgacuucaacggcggcaagaucagcgugcaguacaaccugagccacagcuacgccggcgacgccgccaaccacugcggcaccguggccaacggcgugcugcagaccuucaugagaauggccuggggcggcagcuacaucgcccuggacagcggcugcggcaacugggacugcaucaugaccagcuaccaguaccugaucauccagaacaccaccugggaggaccacugccaguucagcagacccagccccaucggcuaccugggccugcugagccagagaaccagagacaucuacaucagcagaagacugcugggcaccuucaccuggacccugagcgacagcgagggcaaggacacccccggcggcuacugccugaccagauggaugcugaucgaggccgagcugaagugcuucggcaacaccgccguggccaagugcaacgagaagcacgacgaggaguucugcgacaugcugagacuguucgacuucaacaagcaggccauccagagacugaaggccgaggcccagaugagcauccagcugaucaacaaggccgugaacgcccugaucaacgaccagcugaucaugaagaaccaccugagagacaucaugugcauccccuacugcaacuacagcaaguacugguaccugaaccacaccaccaccggcagaaccagccugcccaagugcuggcuggugagcaacggcagcuaccugaacgagacccacuucagcgacgacaucgagcagcaggccgacaacaugaucaccgagaugcugcagaaggaguacauggagagacagggcaagaccccccugggccugguggaccuguucguguucagcaccagcuucuaccugaucagcaucuuccugcaccuggugaagauccccacccacagacacaucgugggcaagagcugccccaagccccacagacugaaccacaugggcaucugcagcugcggccuguacaagcagcccggcgugcccgugaaguggaagagaugaggacuagucccuguucccagagcccacuuuuuuuucuuuuuuugaaauaaaauagccugucuuucagaucucaaaggcucuuuucagagccaccaaaaaaaaaaaaaaaaaaaaaaaaaaaaaaaaaaaaaaaaaaaaaaaaaaaaaaaaaaaaaaaaagaauu

SEQ ID NO: 35046 - RNA, 1714 nt, Artificial Sequence
  mRNA product Design a-1 (hSL-A64-N5) comprising derived and/or modified sequence from LASV(LP;Clade I)__AAF86701__GPCmut9 (opt4)
aggagagucccgcagucggcguccagcggcucugcuuguucgugugugugucguugcaggccuuauucaagcuuaccaugggccagaucaucaccuucuuccaggaggugccccacgugaucgaggaggugaugaacaucgugcugaucgcccugagccugcuggccauccugaagggccuguacaacaucgccaccugcggcaucaucggccugguggccuuccuguuccugugcggcaagagcugcagccugacccugaagggcggcuacgagcugcagacccuggagcugaacauggagacccugaacaugaccaugccccugagcugcaccaagaacagcagccaccacuacaucagagugggcaacgagaccggccuggagcugacccugaccaacaccagcaucaucaaccacaaguucugcaaccugagcgacgcccacaagaagaaccuguacgaccacgcccugaugagcaucaucagcaccuuccaccugagcauccccaacuucaaccaguacgaggccaugagcugcgacuucaacggcggcaagaucagcgugcaguacaaccugagccacagcuacgccggcgacgccgccgagcacugcggcaccguggccaacggcgugcugcagaccuucaugagaauggccuggggcggcagauacaucgcccuggacagcggcugcggcaacugggacugcaucaugaccagcuaccaguaccugaucauccagaacaccaccugggaggaccacugccaguucagcagacccagccccaucggcuaccugggccugcugagccagagaaccagagacaucuacaucagcagaagacugcugggcaccuucaccuggacccugagcgacagcgagggcaacgagacccccggcggcuacugccugaccagauggaugcugaucgaggccgagcugaagugcuucggcaacaccgccguggccaagugcaacgagaagcacgacgaggaguucugcgacaugcugagacuguucgacuucaacaagcaggccaucagaagacugaaggccgaggcccagaugagcauccagcugaucaacaaggccgugaacgcccugaucaacgaccagcugaucaugaagaaccaccugagagacaucaugugcauccccuacugcaacuacagcaaguacugguaccugaaccacaccagcagcggcagaaccagccugcccaagugcuggcugaucagcaacggcagcuaccugaacgagacccaguucagcgacgacaucgagcagcaggccgacaacaugaucaccgagaugcugcagaaggaguacaucgagagacagggcaagaccccccugggccugguggacaucuucaucuucagcaccagcuucuaccugaucagcaucuuccugcaccugaucaagauccccacccacagacacaucgugggcaagcccugccccaagccccacagacugaaccacaugggcgugugcagcugcggccuguacaagcaccccggcgugcccaccaaguggaagagaugaggacuagucccuguucccagagcccacuuuuuuuucuuuuuuugaaauaaaauagccugucuuucagaucucaaaggcucuuuucagagccaccaaaaaaaaaaaaaaaaaaaaaaaaaaaaaaaaaaaaaaaaaaaaaaaaaaaaaaaaaaaaaaaaagaauu

SEQ ID NO: 35047 - RNA, 1714 nt, Artificial Sequence
  mRNA product Design a-1 (hSL-A64-N5) comprising derived and/or modified sequence from LASV(803213;Clade II)__AAF86703__GPCmut9 (opt4)
aggagagucccgcagucggcguccagcggcucugcuuguucgugugugugucguugcaggccuuauucaagcuuaccaugggccagaucaucaccuucuuccaggaggugccccacgugaucgaggaggugaugaacaucgugcugaucgcccugagccugcuggccauccugaagggcaucuacaacguggccaccugcggccuguucggccugaucagcuuccugcugcugugcggcagaagcugcagcgugaccuacaagggcguguacgagcugcagacccuggagcugaacauggccaaccugaacaugaccaugccccugagcugcaccaagaacaacagccaccacuacaucauggugggcaacgagaccggccuggagcugacccugaccaacaccagcaucaucaaccacaaguucugcaaccugagcgacgcccacaagaagaaccuguacgaccacgcccugaugagcaucaucagcaccuuccaccugagcauccccaacuucaaccaguacgaggccaugagcugcgacuucaacggcggcaagaucagcgugcaguacaaccugagccacagcuucgccguggacgccgccaaccacugcggcaccaucgccaacggcgugcugcagaccuucaugagaauggccuggggcggcagcuacaucgcccuggacagcggcugcggcaacugggacugcaucaugaccagcuaccaguaccugaucauccagaacaccaccugggaggaccacugccaguucagcagacccagccccaucggcuaccugggccugcugagccagagaaccagagacaucuacaucagcagaagacugcugggcaccuucaccuggacccugagcgacagcgagggcaacgaggcccccggcggcuacugccugaccagauggaugcugaucgaggccgagcugaagugcuucggcaacaccgccguggccaagugcaacgagaagcacgacgaggaguucugcgacaugcugagacuguucgacuucaacaagcaggccaucaagagacugaagaccgaggcccagaugagcauccagcugaucaacaaggccgugaacgcccugaucaacgaccagcugaucaugaagaaccaccugagagacaucaugugcauccccuacugcaacuacagcagauacugguaccugaaccacaccgugaccggcaagaccagccugcccagaugcuggcuggugagcaacggcagcuaccugaacgagacccacuucagcgacgacaucgagcagcaggccgacaacaugaucaccgagaugcugcagaaggaguacauggacagacagggcaagaccccccugggccugguggaccuguucguguucagcaccagcuucuaccugaucagcaucuuccugcaccuggugaagauccccacccacagacacaucgugggcaagcccugccccaagccccacagacugaaccacaugggcaucugcagcugcggccuguacaagcaccccggcgugcccgugaaguggaagagaugaggacuagucccuguucccagagcccacuuuuuuuucuuuuuuugaaauaaaauagccugucuuucagaucucaaaggcucuuuucagagccaccaaaaaaaaaaaaaaaaaaaaaaaaaaaaaaaaaaaaaaaaaaaaaaaaaaaaaaaaaaaaaaaaagaauu

SEQ ID NO: 35048 - RNA, 1714 nt, Artificial Sequence
  mRNA product Design a-1 (hSL-A64-N5) comprising derived and/or modified sequence from LASV(GA391;Clade III)__CAA36645__GPCmut9 (opt4)
aggagagucccgcagucggcguccagcggcucugcuuguucgugugugugucguugcaggccuuauucaagcuuaccaugggccagaucgugaccuucuuccaggaggugccccacgugaucgaggaggugaugaacaucgugcugaucgcccugagcauccuggccauccugaagggccuguacaacguggccaccugcggccugaucggccuggugaccuuccugcugcugagcggcagaagcugcagccugaucuacaagggcaccuacgagcugcagacccuggagcugaacauggagacccugaacaugaccaugccccugagcugcaccaagaacaacagccaccacuacaucagagugggcaacgagaccggccuggagcugacccugaccaacaccagcauccugaaccacaaguucugcaaccugagcgacgcccacaagagaaaccuguacgaccacagccugaugagcaucaucagcaccuuccaccugagcauccccaacuucaaccaguacgaggccaugagcugcgacuucaacggcggcaagaucaccgugcaguacaaccugagccacagcuucgccguggacgccgccggccacugcggcacccuggccaacggcgugcugcagaccuucaugagaauggccuggggcggcagcuacaucgcccuggacagcggcugcggcaacugggacugcaucaugaccagcuaccaguaccugaucauccagaacaccaccugggacgaccacugccaguucagcagacccagccccaucggcuaccugggccugcugagccagagaaccagagacaucuacaucagcagaagacugcugggcaccuucaccuggacccugagcgacagcgagggcaacgagacccccggcggcuacugccugaccagauggaugcugaucgaggccgagcugaagugcuucggcaacaccgccguggccaagugcaacgagaagcacgacgaggaguucugcgacaugcugagacuguucgacuucaacaagcaggccaucagaagacugaagaccgaggcccagaugagcauccagcugaucaacaaggccgugaacgcccugaucaacgaccagcugaucaugaagaaccaccugagagacaucaugugcauccccuacugcaacuacagcagauacugguaccugaaccacaccagcaccggcaagaccagccugcccagaugcuggcugaucagcaacggcagcuaccugaacgagaccaaguucagcgacgacaucgagcagcaggccgacaacaugaucaccgagaugcugcagaaggaguacaucgacagacagggcaagaccccccugggccugguggaccuguucguguucagcaccagcuucuaccugaucagcaucuuccugcaccuggugaagauccccacccacagacacaucgugggcaagcccugccccaagccccacagacugaaccacaugggcaucugcagcugcggccuguacaagcagcccggcgugcccgugagauggaagagaugaggacuagucccuguucccagagcccacuuuuuuuucuuuuuuugaaauaaaauagccugucuuucagaucucaaaggcucuuuucagagccaccaaaaaaaaaaaaaaaaaaaaaaaaaaaaaaaaaaaaaaaaaaaaaaaaaaaaaaaaaaaaaaaaagaauu

SEQ ID NO: 35049 - RNA, 1717 nt, Artificial Sequence
  mRNA product Design a-1 (hSL-A64-N5) comprising derived and/or modified sequence from LASV(AV;Clade V)__CCA30314__GPCmut9 (opt4)
aggagagucccgcagucggcguccagcggcucugcuuguucgugugugugucguugcaggccuuauucaagcuuaccaugggccagaucgugaccuucuuccaggaggugccccacgugaucgaggaggugaugaacaucgugcugaucgcccugagcauccuggccgugcugaagggccuguacaacaucgccaccugcggccugaucggccugaucaccuuccugcugcugugcggcagaagcugcagcagcaaccuguacaagggcguguacgagcugcagagccuggaccugaacauggagacccugaacaugaccaugccccugagcugcaccaagaacaacagccaccacuacaucagagugggcaacgacaccggccuggagcugacccugaccaacaccagcauccugaaccacaaguucugcaaccugagcgacgcccacaagaaggaccuguacgaccacgcccugaugagcaucaucagcaccuuccaccugagcauccccaacuucaaccaguacgaggccaugagcugcgacuucaacggcggcaagaucagcgugcaguacaaccugagccacagcuacgccaucgacgccgccaaccacugcggcaccguggccaacggcauccugcagaccuucaugagaauggccuggggcggcagcuacaucgcccuggacagcggcugcggcaacugggacugcaucaugaccagcuaccaguaccugaucauccagaacaccaccugggagaaccacugccaguucagcagacccagccccaucggcuaccugggccugcugagccagagaaccagagacaucuacaucagcagaagacugcugggcaccuucaccuggacccugagcgacagcgagggcaacgccacccccggcggcuacugccugaccagauggaugcugaucgaggccgagcugaagugcuucggcaacaccgccguggccaagugcaacgagaagcacgacgaggaguucugcgacaugcugagacuguucgacuucaacaagcaggccaucagcagacugaagagcgaggcccagaugagcauccagcugaucaacaaggccgugaacgcccugaucaacgaccagcugaucaugaagaaccaccugagagacaucaugugcauccccuacugcaacuacagcaaguacugguaccugaaccacaccaucaccggcaagaccagccugcccaagugcuggcuggugagcaacggcagcuaccugaacgagacccacuucagcgacgacaucgagcagcaggccgacaacaugaucaccgagaugcugcagaaggaguacauggagagacagggcaagaccccccugggccugguggaccuguucguguucagcaccagcuucuaccugaucagcaucuuccugagacuggugaagauccccacccacagacacaucgugggcaagcccugccccaagccccacagacugaaccacaugggcaucugcagcugcggccuguacaagcagcccggcgugcccgugagauggaagagaugaggacuagucccuguucccagagcccacuuuuuuuucuuuuuuugaaauaaaauagccugucuuucagaucucaaaggcucuuuucagagccaccaaaaaaaaaaaaaaaaaaaaaaaaaaaaaaaaaaaaaaaaaaaaaaaaaaaaaaaaaaaaaaaaagaauu

SEQ ID NO: 35050 - RNA, 1714 nt, Artificial Sequence
  mRNA product Design a-1 (hSL-A64-N5) comprising derived and/or modified sequence from LASV(Togo/2016/7082;Clade VI)__AMR44577__GPCmut9 (opt4)
aggagagucccgcagucggcguccagcggcucugcuuguucgugugugugucguugcaggccuuauucaagcuuaccaugggccagaucaucaccuucuuccaggaggugccccacgugaucgaggaggugaugaacaucgugcugaucgcccugagccugcuggccauccugaagggcguguacaacguggccaccugcggcaucaucggccuggugaccuuccuguuccugugcggcagaagcugcagccugaucuacaagggcagcuacgagcugcagacccuggagcugaacauggagacccugaacaugaccaugccccugagcugcaccaagaacagcagccaccacuacaucagagugggcaacgagaccggccuggagcugacccugaccaacaccagcaucaucaaccacaaguucugcaaccugagcgacgcccacaagagaaaccuguacgaccacgcccugaugagcauccugagcaccuuccaccugagcauccccaacuucaaccaguacgaggccaugagcugcgacuucaacggcggcaagaucagcgugcaguacaaccugagccacgccuacgccguggacgccgccgagcacugcggcaccguggccaacggcgugcugcagaccuucaugagaauggccuggggcggcagcuacaucgcccuggacagcggcugcggcaacugggacugcaucaugaccagcuaccaguaccugaucauccagaacaccaccugggaggaccacugccaguucagcagacccagccccaucggcuaccugggccugcugagccagagaaccagagacaucuacaucagcagaagacugcugggcaccuucaccuggacccugagcgacagcgagggcaacgagacccccggcggcuacugccugaccagauggaugcugaucgaggccgagcugaagugcuucggcaacaccgccguggccaagugcaacgagaagcacgacgaggaguucugcgacaugcugagacuguucgacuucaacaagcaggccauccagagacugaagagcgaggcccagaugagcauccagcugaucaacaaggccgugaacgcccugaucaacgaccagcugaucaugaagaaccaccugagagacaugaugugcauccccuacugcaacuacagcaaguacugguaccugaaccacaccagcagcggcagaaccagccugcccaagugcuggcuggugagcaacggcagcuaccugaacgagacccacuucagcgacgacaucgagcagcaggccgacaacaugaucaccgagaugcugcagaaggaguacaucgacagacagggcaagaccccccugggccugguggaccuguucguguucagcaccagcuucuaccugaucagcaucuuccugcaccugaucaagauccccacccacagacacaucgugggcaagcccugccccaagccccacagacugaaccacaugggcaucugcagcugcggccuguacaagcagcccggcgugcccaccagauggaagagaugaggacuagucccuguucccagagcccacuuuuuuuucuuuuuuugaaauaaaauagccugucuuucagaucucaaaggcucuuuucagagccaccaaaaaaaaaaaaaaaaaaaaaaaaaaaaaaaaaaaaaaaaaaaaaaaaaaaaaaaaaaaaaaaaagaauu

SEQ ID NO: 35051 - RNA, 1714 nt, Artificial Sequence
  mRNA product Design a-1 (hSL-A64-N5) comprising derived and/or modified sequence from LASV(KAK-428;Clade n.d. (VII))__ANH09740__GPCmut9 (opt4)
aggagagucccgcagucggcguccagcggcucugcuuguucgugugugugucguugcaggccuuauucaagcuuaccaugggccagaucgugaccuucuuccaggaggugccccacgugaucgaggaggugaugaacaucgugcugaucgcccugagccugcuggccauccugaagggccuguacaacuucgccaccugcggcgugaucggccugaucaccuuccugcugcugugcggcagaagcugcagcgccaccuacaagggccaguacgagcugcagacccuggagcugaacauggagagccugaacaugaccaugccccugagcugcaccaagaacaacagccaccacuacaucagagccggcaacaacaccggccuggagcugacccugaccaacaccagcaucaucagccacaaguucugcaaccugagcgacgcccacaagaagaaccuguacgaccacacccugaugagcaucaucaccaccuuccaccugagcauccccaacuucaaccaguacgaggccaugagcugcgacuucaacggcggcaagaucagcauccaguacaaccugagccacagcuacgccggcgacgccgcccagcacugcggcaccguggccaacggcgugcugcagaccuucaugagaauggccuggggcggcagcuaccuggcccuggacagcggcugcagaggcugggacugcaucaucagcagcuaccaguaccugaucauccagaacaccaccugggacgaccacugccaguucagcagacccagccccaucggcuaccugggcuucgugagccagaagaccagagacaucuacaucagcagaagacugcugggcaccuucaccuggacccugagcgacagcgagggccacgacaugcccggcggcuacugccugaccagauggaugcugaucgaggccgaccugaagugcuucggcaacaccgccguggccaagugcaacgagaagcacgacgaggaguucugcgacauguggagacuguucgacuucaacaagcaggccauccagagacugaaggccgaggcccagaugaacauccagcugaucaacaaggccgugaacgcccugaucaacgaccagcugaugaugaagaaccaccugagagacaucaugugcauccccuacugcaacuacagcaaguucugguaccugaacaacaccaccaccggcagaaccagccugcccagaugcuggcugaucagcaacggcagcuaccugaacgagacccacuucagcgacgacaucgagcagcaggccgacaacaugaucaccgagaugcugcagaaggaguacauggacagacagggcaagaccccccugggccugguggaccuguucguguucagcaccagcuucuaccugaucaccaucuuccugcaccuggugaagauccccacccacagacacaucgugggcaagcccugccccaagccccacagacugaaccacaugggcaucugcagcugcggccuguacaagcagcccggcgugcccgugagauggaagagaugaggacuagucccuguucccagagcccacuuuuuuuucuuuuuuugaaauaaaauagccugucuuucagaucucaaaggcucuuuucagagccaccaaaaaaaaaaaaaaaaaaaaaaaaaaaaaaaaaaaaaaaaaaaaaaaaaaaaaaaaaaaaaaaaagaauu

SEQ ID NO: 35052 - RNA, 1714 nt, Artificial Sequence; identical to SEQ ID NO: 35046
  mRNA product Design a-1 (hSL-A64-N5) comprising derived and/or modified sequence from LASV(Pinneo-NIG-1969;Clade I)__AIT17836__GPCmut9 (opt4)

SEQ ID NO: 35053 - RNA, 1714 nt, Artificial Sequence
  mRNA product Design a-1 (hSL-A64-N5) comprising derived and/or modified sequence from LASV(ISTH0009-NIG-2011;Clade II)__AIT17404__GPCmut9 (opt4)
aggagagucccgcagucggcguccagcggcucugcuuguucgugugugugucguugcaggccuuauucaagcuuaccaugggccagaucaucaccuucuuccaggaggugccccacgugaucgaggaggugaugaacaucgugcugaucgcccugagccugcuggccauccugaagggcaucuacaacguggccaccugcggccuguucggccuggugagcuuccugcugcugugcggcagaagcugcagcaccaccuacaagggcguguacgagcugcagacccuggagcuggacauggccagccugaacaugaccaugccccugagcugcaccaagaacaacagccaccacuacaucauggugggcaacgagaccggccuggagcugacccugaccaacaccagcaucaucaaccacaaguucugcaaccugagcgacgcccacaagaagaaccuguacgaccacgcccugaugagcaucaucagcaccuuccaccugagcauccccaacuucaaccaguacgaggccaugagcugcgacuucaacggcggcaagaucagcgugcaguacaaccugagccacgccuacgccguggacgccgccaaccacugcggcaccaucgccaacggcgugcugcagaccuucaugagaauggccuggggcggcagcuacaucgcccuggacagcggcugcggcagcugggacugcaucaugaccagcuaccaguaccugaucauccagaacaccaccugggaggaccacugccaguucagcagacccagccccaucggcuaccugggccugcugagccagagaaccagagacaucuacaucagcagaagacugcugggcaccuucaccuggacccugagcgacagcgagggcaacgagacccccggcggcuacugccugaccagauggaugcugaucgaggccgagcugaagugcuucggcaacaccgccguggccaagugcaacgagaagcacgacgaggaguucugcgacaugcugagacuguucgacuucaacaagcaggccaucagaagacugaagaccgaggcccagaugagcauccagcugaucaacaaggccgugaacgcccugaucaacgaccagcugaucaugaagaaccaccugagagacaucaugugcauccccuacugcaacuacagcaaguacugguaccugaaccacaccgugaccggcaagaccagccugcccagaugcuggcuggugagcaacggcagcuaccugaacgagacccacuucagcgacgacaucgagcagcaggccgacaacaugaucaccgagcugcugcagaaggaguacauggacagacagggcaagaccccccugggccugguggaccuguucguguucagcaccagcuucuaccugaucagcaucuuccugcaccugaucaagauccccacccacagacacaucaccggcaagcccugccccaagccccacagacugaaccacaugggcaucugcagcugcggccuguacaagcaccccggcgugcccgugaaguggaagagaugaggacuagucccuguucccagagcccacuuuuuuuucuuuuuuugaaauaaaauagccugucuuucagaucucaaaggcucuuuucagagccaccaaaaaaaaaaaaaaaaaaaaaaaaaaaaaaaaaaaaaaaaaaaaaaaaaaaaaaaaaaaaaaaaagaauu

SEQ ID NO: 35054 - RNA, 1714 nt, Artificial Sequence
  mRNA product Design a-1 (hSL-A64-N5) comprising derived and/or modified sequence from LASV(ISTH2010-NIG-2012;Clade II)__AIT17482__GPCmut9 (opt4)
aggagagucccgcagucggcguccagcggcucugcuuguucgugugugugucguugcaggccuuauucaagcuuaccaugggccagaucaucaccuucuuccaggaggugccccacgugaucgaggaggugaugaacaucgugcugaucgcccugagccugcuggccauccugaagggcaucuacaacguggccaccugcggccuguucggccuggugagcuuccugcugcugugcggcagaagcugcagcaccaccuacaagggcguguacgagcugcagacccuggagcuggacauggccagccugaacaugaccaugccccugagcugcaccaagaacaacagccaccacuacaucauggugggcaacgagaccggccuggagcugacccugaccaacaccagcaucaucaaccacaaguucugcaaccugagcgacgcccacaagaagaaccuguacgaccacgcccugaugagcaucaucagcaccuuccaccugagcauccccaacuucaaccaguacgaggccaugagcugcgacuucaacggcggcaagaucagcgugcaguacaaccugagccacgccuacgccguggacgccgccaaccacugcggcaccaucgccaacggcgugcugcagaccuucaugagaauggccuggggcggcagcuacaucgcccuggacagcggcugcggcagcugggacugcaucaugaccagcuaccaguaccugaucauccagaacaucaccugggaggaccacugccaguucagcagacccagccccaucggcuaccugggccugcugagccagagaaccagagacaucuacaucagcagaagacugcugggcaccuucaccuggacccugagcgacagcgagggcaacgagacccccggcggcuacugccugaccagauggaugcugaucgaggccgagcugaagugcuucggcaacaccgccguggccaagugcaacgagaagcacgacgaggaguucugcgacaugcugagacuguucgacuucaacaagcaggccaucagaagacugaagaccgaggcccagaugagcauccagcugaucaacaaggccgugaacgcccugaucaacgaccagcugaucaugaagaaccaccugagagacaucaugugcauccccuacugcaacuacagcaaguacugguaccugaaccacaccgugaccggcaagaccagccugcccagaugcuggcuggugagcaacggcagcuaccugaacgagacccacuucagcgacgacaucgagcagcaggccgacaacaugaucaccgagcugcugcagaaggaguacaucgacagacagggcaagaccccccugggccugguggaccuguucguguucagcaccagcuucuaccugaucagcaucuuccugcaccuggugaagauccccacccacagacacguggugggcaagcccugccccaagccccacagacugaaccacaugggcaucugcagcugcggccuguacaagcaccccggcgugcccgugaaguggaagagaugaggacuagucccuguucccagagcccacuuuuuuuucuuuuuuugaaauaaaauagccugucuuucagaucucaaaggcucuuuucagagccaccaaaaaaaaaaaaaaaaaaaaaaaaaaaaaaaaaaaaaaaaaaaaaaaaaaaaaaaaaaaaaaaaagaauu

SEQ ID NO: 35055 - RNA, 1714 nt, Artificial Sequence
  mRNA product Design a-1 (hSL-A64-N5) comprising derived and/or modified sequence from LASV(Lassa virus/H.sapiens-wt/NGA/2015/ISTH_0543;Clade II)__AVO03639__GPCmut9 (opt4)
aggagagucccgcagucggcguccagcggcucugcuuguucgugugugugucguugcaggccuuauucaagcuuaccaugggccagaucaucaccuucuuccaggaggugccccacgugaucgaggaggugaugaacaucgugcugaucgcccugagccugcuggccauccugaagggcaucuacaacguggccaccugcggccuguucggccuggugagcuuccugcugcugugcggcagaagcugcagcaccaccuacaagggcguguacgagcugcagacccuggagcuggacauggccaaccugaacaugaccaugccccugagcugcaccaagaacaacagccaccacuacaucauggugggcaacgagaccggccuggagcugacccugaccaacaccagcaucaucaaccacaaguucugcaaccugagcgacgcccacaagaagaaccuguacgaccacgcccugaugagcaucaucagcaccuuccaccugagcauccccaacuucaaccaguacgaggccaugagcugcgacuucaacggcggcaagaucagcgugcaguacaaccugagccacaccuacgccguggacgccgccaaccacugcggcaccaucgccaacggcgugcugcagaccuucaugagaauggccuggggcggcagcuacaucgcccuggacagcggcugcggcagcugggacugcaucaugaccagcuaccaguaccuggugauccagaacaccaccugggaggaccacugccaguucagcagacccagccccaucggcuaccugggccugcugagccagagaaccagagacaucuacaucagcagaagacugcugggcaccuucaccuggacccugagcgacagcgagggcaacgagacccccggcggcuacugccugaccagauggaugcugaucgaggccgagcugaagugcuucggcaacaccgccguggccaagugcaacgagaagcacgacgaggaguucugcgacaugcugagacuguucgacuucaacaagcaggccaucagaagacugaagaccgaggcccagaugagcauccagcugaucaacaaggccgugaacgcccugaucaacgaccagcugaucaugaagaaccaccugagagacaucaugugcauccccuacugcaacuacagcaaguacugguaccugaaccacaccgugaccggcaagaccagccugcccagaugcuggcuggugagcaacggcagcuaccugaacgagacccacuucagcgacgacaucgagcagcaggccgacaacaugaucaccgagcugcugcagaaggaguacaucgacagacagggcaagaccccccugggccugguggaccuguucguguucagcaccagcuucuaccugaucagcaucuuccugcaccuggugaagauccccacccacagacacaucaccggcaagcccugccccaagccccacagacugaaccacaugggcaucugcagcugcggccuguacaagcaccccggcgugcccgugaaguggaagagaugaggacuagucccuguucccagagcccacuuuuuuuucuuuuuuugaaauaaaauagccugucuuucagaucucaaaggcucuuuucagagccaccaaaaaaaaaaaaaaaaaaaaaaaaaaaaaaaaaaaaaaaaaaaaaaaaaaaaaaaaaaaaaaaaagaauu

SEQ ID NO: 35056 - RNA, 1714 nt, Artificial Sequence
  mRNA product Design a-1 (hSL-A64-N5) comprising derived and/or modified sequence from LASV(Lassa virus/H.sapiens-wt/NGA/2016/ISTH_0009;Clade II)__AVO03571__GPCmut9 (opt4)
aggagagucccgcagucggcguccagcggcucugcuuguucgugugugugucguugcaggccuuauucaagcuuaccaugggccagaucaucaccuucuuccaggaggugccccacgugaucgaggaggugaugaacaucgugcugaucgcccugagccugcuggccauccugaagggcaucuacaacguggccaccugcggccugcugggccuggugagcuuccugcugcugugcggcagaagcugcagcaccaccuacaagggcguguacgagcugcagacccuggagcuggacauggccagccugaacaugaccaugccccugagcugcaccaagaacaacagccaccacuacaucauggugggcaacgagaccggccuggagcugacccugaccaacaccagcaucaucaaccacaaguucugcaaccugagcgacgcccacaagaagaaccuguacgaccacgcccugaugagcaucaucagcaccuuccaccugagcauccccaacuucaaccaguacgaggccaugagcugcgacuucaacggcggcagaaucagcgugcaguacaaccugagccacagcuacgccguggacgccgccaaccacugcggcaccaucgccaacggcgugcugcagaccuucaugagaauggccuggggcggcagcuacaucgcccuggacagcggcugcggcagcugggacugcaucaugaccagcuaccaguaccugaucauccagaacaccaccugggaggaccacugccaguucagcagacccagccccaucggcuaccugggccugcugagccagagaaccagagacaucuacaucagcagaagacugcugggcaccuucaccuggacccugagcgacagcgagggcaacgagacccccggcggcuacugccugaccagauggaugcugaucgaggccgagcugaagugcuucggcaacaccgccguggccaagugcaacgagaagcacgacgaggaguucugcgacaugcugagacuguucgacuucaacaagcaggccaucagaagacugaagaccgaggcccagaugagcauccagcugaucaacaaggccgugaacgcccugaucaacgaccagcugaucaugaagaaccaccugagagacaucaugugcauccccuacugcaacuacagcaaguacugguaccugaaccacaccgugaccggcaagaccagccugcccagaugcuggcuggugagcaacggcagcuaccugaacgagacccacuucagcgacgacaucgagcagcaggccgacaacaugaucaccgagcugcugcagaaggaguacaucgacagacagggcaagaccccccugggccugguggaccuguucguguucagcaccagcuucuaccugaucagcaucuuccugcaccuggugaagauccccacccacagacacaucaccggcaagcccugccccaagccccacagacugaaccacaugggcaucugcagcugcggccuguacaaccaccccggcgugcccgugaaguggaagagaugaggacuagucccuguucccagagcccacuuuuuuuucuuuuuuugaaauaaaauagccugucuuucagaucucaaaggcucuuuucagagccaccaaaaaaaaaaaaaaaaaaaaaaaaaaaaaaaaaaaaaaaaaaaaaaaaaaaaaaaaaaaaaaaaagaauu

SEQ ID NO: 35057 - RNA, 1714 nt, Artificial Sequence
  mRNA product Design a-1 (hSL-A64-N5) comprising derived and/or modified sequence from LASV(Lassa virus/H.sapiens-wt/NGA/2016/ISTH_0017;Clade II)__AVO03567__GPCmut9 (opt4)
aggagagucccgcagucggcguccagcggcucugcuuguucgugugugugucguugcaggccuuauucaagcuuaccaugggccagaucaucaccuucuuccaggaggugccccacgugaucgaggaggugaugaacaucgugcugaucgcccugagccugcuggccauccugaagggcaucuacaacguggccaccugcggccuguucggccuggugagcuuccugcugcugugcggcagaagcugcagcaccaccuacaagggcguguacgagcugcagacccuggagcuggacauggccagccugaacaugaccaugccccugagcugcaccaagaacaacagccaccacuacaucauggugggcaacgagaccggccuggagcugacccugaccaacaccagcaucaucaaccacaaguucugcaaccugagcgacgcccacaagaagaaccuguacgaccacgcccugaugagcaucaucagcaccuuccaccugagcauccccaacuucaaccaguacgaggccaugagcugcgacuucaacggcggcaagaucagcgugcaguacaaccugagccacaccuacgccaucgacgccgccaaccacugcggcaccaucgccaacggcgugcugcagaccuucaugagaauggccuggggcggcagcuacaucgcccuggacagcggcugcggcagcugggacugcaucaugaccagcuaccaguaccugaucauccagaacaccaccugggaggaccacugccaguucagcagacccagccccaucggcuaccugggccugcugagccagagaaccagagacaucuacaucagcagaagacugcugggcaccuucaccuggacccugagcgacagcgagggcaacgagacccccggcggcuacugccugaccagauggaugcugaucgaggccgagcugaagugcuucggcaacaccgccguggccaagugcaacgagaagcacgacgaggaguucugcgacaugcugagacuguucgacuucaacaagcaggccaucagaagacugaagaccgaggcccagaugagcauccagcugaucaacaaggccgugaacgcccugaucaacgaccagcugaucaugaagaaccaccugagagacaucaugugcauccccuacugcaacuacagcaaguacugguaccugaaccacaccgugaccggcaagaccagccugcccagaugcuggcuggugagcaacggcagcuaccugaacgagacccacuucagcgacgacaucgagcagcaggccgacaacaugaucaccgagcugcugcagaaggaguacauggacagacagggcaagaccccccugggccugguggaccuguucguguucagcaccagcuucuaccugaucagcaucuuccugcaccuggugagaauccccacccacagacacgugaucggcaagcccugccccaagccccacagacugaaccacaugggcaucugcagcugcggccuguacaagcaccccggcgugcccgugaaguggaagagaugaggacuagucccuguucccagagcccacuuuuuuuucuuuuuuugaaauaaaauagccugucuuucagaucucaaaggcucuuuucagagccaccaaaaaaaaaaaaaaaaaaaaaaaaaaaaaaaaaaaaaaaaaaaaaaaaaaaaaaaaaaaaaaaaagaauu

SEQ ID NO: 35058 - RNA, 1714 nt, Artificial Sequence
  mRNA product Design a-1 (hSL-A64-N5) comprising derived and/or modified sequence from LASV(Lassa virus/H.sapiens-wt/NGA/2018/ISTH_0959;Clade II)__AVV65099__GPCmut9 (opt4)
aggagagucccgcagucggcguccagcggcucugcuuguucgugugugugucguugcaggccuuauucaagcuuaccaugggccagaucaucaccuucuuccaggaggugccccacgugaucgaggaggugaugaacaucgugcugaucgcccugagccugcuggccauccugaagggcaucuacaacguggugaccugcggccuguucggccuggugagcuuccugcugcugugcggcagaagcugcagcaccaccuacaagggcguguacgagcugcagacccuggagcuggacauggccagccugaacaugaccaugccccugagcugcaccaagaacaacagccaccacuacaucauggugggcaacgagaccggccuggagcugacccugaccaacaccagcaucaucaaccacaaguucugcaaccugagcgacgcccacaagaagaaccuguacgaccacgcccugaugagcaucaucagcaccuuccaccugagcauccccaacuucaaccaguacgaggccaugagcugcgacuucaacggcggcaagaucagcgugcaguacaaccugagccacgccuacgccaucgacgccgccaaccacugcggcaccaucgccaacggcgugcugcagaccuucaugagaauggccuggggcggcagcuacaucgcccuggacagcggcugcggcagcugggacugcaucaugaccagcuaccaguaccugaucauccagaacaccaccugggaggaccacugccaguucagcagacccagccccaucggcuaccugggccugcugagccagagaaccagagacaucuacaucagcagaagacugcugggcaccuucaccuggacccugagcgacagcgagggcaacgagacccccggcggcuacugccugaccagauggaugcugaucgaggccgagcugaagugcuucggcaacaccgccguggccaagugcaacgagaagcacgacgaggaguucugcgacaugcugagacuguucgacuucaacaagcaggccaucagaagacugaagaccgaggcccagaugagcauccagcugaucaacaaggccgugaacgcccugaucaacgaccagcugaucaugaagaaccaccugagagacaucaugugcauccccuacugcaacuacagcaaguacugguaccugaaccacaccgugaccggcaagaccagccugcccagaugcuggcuggugagcaacggcagcuaccugaacgagacccacuucagcgacgacaucgagcagcaggccgacaacaugaucaccgagcugcugcagaaggaguacaucgacagacagggcaagaccccccugggccugguggaccuguucguguucagcaccagcuucuaccugaucagcaucuuccugcaccuggugaagauccccacccacagacacgugaucggcaagcccugccccaagccccacagacugaaccacaugggcaucugcagcugcggccuguacaagcaccccggcgugcccgugaaguggaagagaugaggacuagucccuguucccagagcccacuuuuuuuucuuuuuuugaaauaaaauagccugucuuucagaucucaaaggcucuuuucagagccaccaaaaaaaaaaaaaaaaaaaaaaaaaaaaaaaaaaaaaaaaaaaaaaaaaaaaaaaaaaaaaaaaagaauu

SEQ ID NO: 35059 - RNA, 1714 nt, Artificial Sequence
  mRNA product Design a-1 (hSL-A64-N5) comprising derived and/or modified sequence from LASV(LASV003-NIG-2008;Clade II)__AIT17580__GPCmut9 (opt4)
aggagagucccgcagucggcguccagcggcucugcuuguucgugugugugucguugcaggccuuauucaagcuuaccaugggccagaucaucaccuucuuccaggaggugccccacgugaucgaggaggugaugaacaucgugcugaucgcccugagccugcuggccauccugaagggcaucuacaacguggccaccugcggccuguucggccuggugagcuuccugcugcugugcggcagaagcugcagcaccaccuacaagggcguguacgagcugcagacccuggagcuggacauggccagccugaacaugaccaugccccugagcugcaccaagaacaacagccaccacuacaucauggugggcaacgagaccggccuggagcugacccugaccaacaccagcaucaucaaccacaaguucugcaaccugagcgacgcccacaagaagaaccuguacgaccacgcccugaugagcaucaucagcaccuuccaccugagcauccccaacuucaaccaguacgaggccaugagcugcgacuucaacggcggcaagaucagcgugcaguacaaccugagccacaccuacgccguggacgccgccaaccacugcggcaccaucgccaacggcgugcugcagaccuucaugagaauggccuggggcggcagcuacaucgcccuggacagcggcugcggcagcugggacugcaucaugaccagcuaccaguaccugaucauccagaacaccaccugggaggaccacugccaguucagcagacccagccccaucggcuaccugggccugcugagccagagaaccagagacaucuacaucagcagaagacugcugggcaccuucaccuggacccugagcgacagcgagagcaacgagacccccggcggcuacugccugaccagauggaugcugaucgaggccgagcugaagugcuucggcaacaccgccguggccaagugcaacgagaagcacgacgaggaguucugcgacaugcugagacuguucgacuucaacaagcaggccaucagaagacugaaggccgaggcccagaugagcauccagcugaucaacaaggccgugaacgcccugaucaacgaccagcugaucaugaagaaccaccugagagacaucaugugcauccccuacugcaacuacagcaaguacugguaccugaaccacaccgugaccggcagaaccagccugcccagaugcuggcuggugagcaacggcagcuaccugaacgagacccacuucagcgacgacaucgagcagcaggccgacaacaugaucaccgagcugcugcagaaggaguacauggacagacagggcaagaccccccugggccugguggaccuguucguguucagcaccagcuucuaccugaucagcaucuuccugcaccuggugaagauccccacccacagacacgugaucggcaagcccugccccaagccccacagacugaaccacaugggcaucugcagcugcggccuguacaagcaccccggcgugcccgugaaguggaagagaugaggacuagucccuguucccagagcccacuuuuuuuucuuuuuuugaaauaaaauagccugucuuucagaucucaaaggcucuuuucagagccaccaaaaaaaaaaaaaaaaaaaaaaaaaaaaaaaaaaaaaaaaaaaaaaaaaaaaaaaaaaaaaaaaagaauu

SEQ ID NO: 35060 - RNA, 1714 nt, Artificial Sequence
  mRNA product Design a-1 (hSL-A64-N5) comprising derived and/or modified sequence from LASV(LASV035-NIG-2009;Clade II)__AIT17588__GPCmut9 (opt4)
aggagagucccgcagucggcguccagcggcucugcuuguucgugugugugucguugcaggccuuauucaagcuuaccaugggccagaucaucaccuucuuccaggaggugccccacgugaucgaggaggugaugaacaucgugcugaucgcccugagccugcuggccauccugaagggcaucuacaacguggccaccugcggccuguucggccuggugagcuuccugcugcugugcggcagaagcugcagcaccaccuacaagggcguguacgagcugcagacccuggagcuggacauggccagccugaacaugaccaugccccugagcugcaccaagaacaacagccaccacuacaucauggugggcaacgagaccggccuggagcugacccugaccaacaccagcaucaucaaccacaaguucugcaaccugagcgacgcccacaagaagaaccuguacgaccacgcccugaugagcaucaucagcaccuuccaccugagcauccccaacuucaaccaguacgaggccaugagcugcgacuucaacggcggcaagaucagcgugcaguacaaccugagccacgccuacgccguggacgccgccaaccacugcggcaccaucgccaacggcgugcugcagaccuucaugagaauggccuggggcggcagcuacaucgcccuggacagcggcugcggcagcugggacugcaucaugaccagcuaccaguaccugaucauccagaacaccaccugggaggaccacugccaguucagcagacccagccccaucggcuaccugggccugcugagccagagaaccagagacaucuacaucagcagaagacugcugggcaccuucaccuggacccugagcgacagcgagggcaacgagacccccggcggcuacugccugaccagauggaugcugaucgaggccgagcugaagugcuucggcaacaccgccguggccaagugcaacgagaagcacgacgaggaguucugcgacaugcugagacuguucgacuucaacaagcaggccaucagaagacugaaggccgaggcccagaugagcauccagcugaucaacaaggccgugaacgcccugaucaacgaccagcugaucaugaagaaccaccugagagacaucaugugcauccccuacugcaacuacagcaaguacugguaccugaaccacaccgugaccggcaagaccagccugcccagaugcuggcuggugagcaacggcagcuaccugaacgagacccacuucagcgacgacaucgagcagcaggccgacaacaugaucaccgagcugcugcagaaggaguacaucgacagacagggcaagaccccccugggccugguggaccuguucguguucagcaccagcuucuaccugaucagcaucuuccugcaccuggugaagauccccacccacagacacgugaucggcaagcccugccccaagccccacagacugaaccacaugggcaucugcagcugcggccuguacaagcaccccggcgugcccgugaaguggaagagaugaggacuagucccuguucccagagcccacuuuuuuuucuuuuuuugaaauaaaauagccugucuuucagaucucaaaggcucuuuucagagccaccaaaaaaaaaaaaaaaaaaaaaaaaaaaaaaaaaaaaaaaaaaaaaaaaaaaaaaaaaaaaaaaaagaauu

SEQ ID NO: 35061 - RNA, 1714 nt, Artificial Sequence
  mRNA product Design a-1 (hSL-A64-N5) comprising derived and/or modified sequence from LASV(LASV1000-NIG-2009;Clade II)__AIT17782__GPCmut9 (opt4)
aggagagucccgcagucggcguccagcggcucugcuuguucgugugugugucguugcaggccuuauucaagcuuaccaugggccagaucaucaccuucuuccaggaggugccccacgugaucgaggaggugaugaacaucgugcugaucgcccugagccugcuggccauccugaagggcaucuacaacguggccaccugcggccuguucggccuggugagcuuccugcugcugugcggcagaagcugcagcaccaccuacaagggcguguacgagcugcagacccuggagcuggacauggccagccugaacaugaccaugccccugagcugcaccaagaacaacagccaccacuacaucauggugggcaacgagaccggccuggagcugacccugaccaacaccagcaucaucaaccacaaguucugcaaccugagcgacgcccacaagaagaaccuguacgaccacgcccugaugagcaucaucagcaccuuccaccugagcauccccaacuucaaccaguacgaggccaugagcugcgacuucaacggcggcaagaucagcgugcaguacaaccugagccacaccuacgccguggacgccgccaaccacugcggcaccaucgccaacggcgugcugcagaccuucaugagaauggccuggggcggcagcuacaucgcccuggacagcggcugcggcagcugggacugcaucaugaccagcuaccaguaccugaucauccagaacaccaccugggaggaccacugccaguucagcagacccagccccaucggcuaccugggccugcugagccagagaaccagagacaucuacaucagcagaagacugcugggcaccuucaccuggacccugagcgacagcgagggcaacgagacccccggcggcuacugccugaccagauggaugcugaucgaggccgagcugaagugcuucggcaacaccgccguggccaagugcaacgagaagcacgacgaggaguucugcgacaugcugagacuguucgacuucaacaagcaggccaucaagagacugaagaccgaggcccagaugagcauccagcugaucaacaaggccgugaacgcccugaucaacgaccagcugaucaugaagaaccaccugagagacaucaugugcauccccuacugcaacuacagcaaguacugguaccugaaccacaccgugaccggcaagaccagccugcccagaugcuggcuggugagcaacggcagcuaccugaacgagacccacuucagcgacgacaucgagcagcaggccgacaacaugaucaccgagcugcugcagaaggaguacaucgacagacagggcaagaccccccugggccugguggaccuguucguguucagcaccagcuucuaccugaucagcaucuuccugcaccuggugaagauccccacccacagacacguggugggcaagcccugccccaagccccacagacugaaccacaugggcaucugcagcugcggccuguacaagcaccccggcgugcccgugaaguggaagagaugaggacuagucccuguucccagagcccacuuuuuuuucuuuuuuugaaauaaaauagccugucuuucagaucucaaaggcucuuuucagagccaccaaaaaaaaaaaaaaaaaaaaaaaaaaaaaaaaaaaaaaaaaaaaaaaaaaaaaaaaaaaaaaaaagaauu

SEQ ID NO: 35062 - RNA, 1714 nt, Artificial Sequence
  mRNA product Design a-1 (hSL-A64-N5) comprising derived and/or modified sequence from LASV(LASV221-NIG-2010;Clade II)__AIT17624__GPCmut9 (opt4)
aggagagucccgcagucggcguccagcggcucugcuuguucgugugugugucguugcaggccuuauucaagcuuaccaugggccagaucaucaccuucuuccaggaggugccccacgugaucgaggaggugaugaacaucgugcugaucgcccugagccugcuggccauccugaagggcaucuacaacguggccaccugcggccuguucggccuggugagcuuccugcugcugugcggcagaagcugcagcaccaccuacaagggcguguacgagcugcagacccuggagcuggacauggccagccugaacaugaccaugccccugagcugcaccaagaacaacagccaccacuacaucauggugggcaacgagaccggccuggagcugacccugaccaacaccagcaucaucaaccacaaguucugcaaccugagcgacgcccacaagaagaaccuguacgaccacgcccugaugagcaucaucagcaccuuccaccugagcauccccaacuucaaccaguacgaggccaugagcugcgacuucaacggcggcaagaucagcgugcaguacaaccugagccacaccuacgccaucgacgccgccaaccacugcggcaccaucgccaacggcgugcugcagaccuucaugagaauggccuggggcggcagcuacaucgcccuggacagcggcugcggcagcugggacugcaucaugaccagcuaccaguaccugaucauccagaacaccaccugggaggaccacugccaguucagcagacccagccccaucggcuaccugggccugcugagccagagaaccagagacaucuacaucagcagaagacugcugggcaccuucaccuggacccugagcgacagcgagggcaacgagacccccggcggcuacugccugaccagauggaugcugaucgaggccgagcugaagugcuucggcaacaccgccguggccaagugcaacgagaagcacgacgaggaguucugcgacaugcugagacuguucgacuucaacaagcaggccaucagaagacugaagaccgaggcccagaugagcauccagcugaucaacaaggccgugaacgcccugaucaacgaccagcugaucaugaagaaccaccugagagacaucaugugcauccccuacugcaacuacagcaaguacugguaccugaaccacaccgugaccggcaagaccagccugcccagaugcuggcuggugagcaacggcagcuaccugaacgagacccacuucagcgacgacaucgagcagcaggccgacaacaugaucaccgagaugcugcagaaggaguacauggacagacagggcaagaccccccugggccugguggaccuguucguguucagcaccagcuucuaccugaucagcaucuuccugcaccuggugaagauccccacccacagacacgugaucggcaagcccugccccaagccccacagacugaaccacaugggcaucugcagcugcggccuguacaagcaccccggcgugcccgugaaguggaagagaugaggacuagucccuguucccagagcccacuuuuuuuucuuuuuuugaaauaaaauagccugucuuucagaucucaaaggcucuuuucagagccaccaaaaaaaaaaaaaaaaaaaaaaaaaaaaaaaaaaaaaaaaaaaaaaaaaaaaaaaaaaaaaaaaagaauu

SEQ ID NO: 35063 - RNA, 1714 nt, Artificial Sequence
  mRNA product Design a-1 (hSL-A64-N5) comprising derived and/or modified sequence from LASV(LASV237-NIG-2010;Clade II)__AIT17638__GPCmut9 (opt4)
aggagagucccgcagucggcguccagcggcucugcuuguucgugugugugucguugcaggccuuauucaagcuuaccaugggccagaucaucaccuucuuccaggaggugccccacgugaucgaggaggugaugaacaucgugcugaucgcccugagccugcuggccauccugaagggcaucuacaacguggccaccugcggccuguucggccuggugagcuuccugcugcugugcggcagaagcugcagcaccaccuacaagggcguguacgagcugcagacccuggagcuggacauggccagccugaacaugaccaugccccugagcugcaccaagaacaacagccaccacuacaucauggugggcaacgagaccggccuggagcugacccugaccaacaccagcaucaucaaccacaaguucugcaaccugagcgacgcccacaagaaggaccuguacgaccacgcccugaugagcaucaucagcaccuuccaccugagcauccccaacuucaaccaguacgaggccaugagcugcgacuucaacggcggcaagaucagcgugcaguacaaccugagccacaccuacgccguggacgccgccaaccacugcggcaccaucgccaacggcgugcugcagaccuucaugagaauggccuggggcggcagcuacaucgcccuggacagcggcugcggcagcugggacugcaucaugaccagcuaccaguaccugaucauccagaacaccaccugggaggaccacugccaguucagcagacccagccccaucggcuaccugggccugcugagccagagaaccagagacaucuacaucagcagaagacugcugggcaccuucaccuggacccugagcgacagcgagggcaacgagacccccggcggcuacugccugaccagauggaugcugaucgaggccgagcugaagugcuucggcaacaccgccguggccaagugcaacgagaagcacgacgaggaguucugcgacaugcugagacuguucgacuucaacaagcaggccaucagaagacugaagaccgaggcccagaugagcauccagcugaucaacaaggccgugaacgcccugaucaacgaccagcugaucaugaagaaccaccugagagacaucaugugcauccccuacugcaacuacagcaaguacugguaccugaaccacaccgugaccggcaagaccagccugcccagaugcuggcuggugagcaacggcagcuaccugaacgagacccacuucagcgacgacaucgagcagcaggccgacaacaugaucaccgagcugcugcagaaggaguacauggacagacagggcaagaccccccugggccugguggaccuguucguguucagcaccagcuucuaccugaucagcaucuuccugcaccugaucaagauccccacccacagacacaucaccggcaagcccugccccaagccccacagacugaaccacaugggcaucugcagcugcggccuguacaagcaccccggcgugcccgugaaguggaagagaugaggacuagucccuguucccagagcccacuuuuuuuucuuuuuuugaaauaaaauagccugucuuucagaucucaaaggcucuuuucagagccaccaaaaaaaaaaaaaaaaaaaaaaaaaaaaaaaaaaaaaaaaaaaaaaaaaaaaaaaaaaaaaaaaagaauu

SEQ ID NO: 35064 - RNA, 1714 nt, Artificial Sequence
  mRNA product Design a-1 (hSL-A64-N5) comprising derived and/or modified sequence from LASV(LASV253-NIG-2011;Clade II)__AIT17670__GPCmut9 (opt4)
aggagagucccgcagucggcguccagcggcucugcuuguucgugugugugucguugcaggccuuauucaagcuuaccaugggccagaucaucaccuucuuccaggaggugccccacgugaucgaggaggugaugaacaucgugcugaucgcccugagccugcuggccauccugaagggcaucuacaacguggccaccugcggccuguucggccuggugagcuuccugcugcugugcggcagaagcugcagcaccaccuacaagggcguguacgagcugcagacccuggagcuggacauggccagccugaacaugaccaugccccugagcugcaccaagaacaacagccaccacuacaucauggugggcaacgagaccggccuggagcugacccugaccaacaccagcaucaucaaccacaaguucugcaaccugagcgacgcccacaagaagaaccuguacgaccacgcccugaugagcaucaucagcaccuuccaccugagcauccccaacuucaaccaguacgaggccaugagcugcgacuucaacggcggcaagaucagcgugcaguacaaccugagccacaccuacgccguggacgccgccaaccacugcggcaccaucgccaacggcgugcugcagaccuucaugagaauggccuggggcggcagcuacaucgcccuggacagcggcugcggcagcugggacugcaucaugaccagcuaccaguaccugaucauccagaacaccaccugggaggaccacugccaguucagcagacccagccccaucggcuaccugggccugcugagccagagaaccagagacaucuacaucagcagaagacugcugggcaccuucaccuggacccugagcgacagcgagggcaacgagacccccggcggcuacugccugaccagauggaugcugaucgaggccgagcugaagugcuucggcaacaccgccguggccaagugcaacgagaagcacgacgaggaguucugcgacaugcugagacuguucgacuucaacaagcaggccaucagaagacugaaggccgaggcccagaugagcauccagcugaucaacaaggccgugaacgcccugaucaacgaccagcugaucaugaagaaccaccugagagacaucaugugcauccccuacugcaacuacagcaaguacugguaccugaaccacaccgugaccggcagaaccagccugcccagaugcuggcuggugagcaacggcagcuaccugaacgagacccacuucagcgacgacaucgagcagcaggccgacaacaugaucaccgagcugcugcagaaggaguacaucgacagacagggcaagaccccccugggccugguggaccuguucguguucagcaccagcuucuaccugaucagcaucuuccugcaccuggugaagauccccacccacagacacaucaucggcaagcccugccccaagccccacagacugaaccacaugggcaucugcagcugcggccuguacaagcaccccggcgugcccgugaaguggaagagaugaggacuagucccuguucccagagcccacuuuuuuuucuuuuuuugaaauaaaauagccugucuuucagaucucaaaggcucuuuucagagccaccaaaaaaaaaaaaaaaaaaaaaaaaaaaaaaaaaaaaaaaaaaaaaaaaaaaaaaaaaaaaaaaaagaauu

SEQ ID NO: 35065 - RNA, 1714 nt, Artificial Sequence
  mRNA product Design a-1 (hSL-A64-N5) comprising derived and/or modified sequence from LASV(LASV254-NIG-2011;Clade II)__AIT17674__GPCmut9 (opt4)
aggagagucccgcagucggcguccagcggcucugcuuguucgugugugugucguugcaggccuuauucaagcuuaccaugggccagaucaucaccuucuuccaggaggugccccacgugaucgaggaggugaugaacaucgugcugaucgcccugagccugcuggccauccugaagggcaucuacaacguggccaccugcggccuguucggccuggugagcuuccugcugcugugcggcagaagcugcagcaccaccuacaagggcguguacgagcugcagacccuggagcuggacaugaccaaccugaacaugaccaugccccugagcugcaccaagaacaacagccaccacuacaucauggugggcaacgagaccggccuggagcugacccugaccaacaccagcaucaucaaccacaaguucugcaaccugagcgacgcccacaagaagaaccuguacaaccacgcccugaugagcaucaucagcaccuuccaccugagcauccccaacuucaaccaguacgaggccaugagcugcgacuucaacggcggcaagaucagcgugcaguacaaccugagccacagcuacgccguggacgccgccaaccacugcggcaccaucgccaacggcgugcugcagaccuucaugagaauggccuggggcggcagcuacaucgcccuggacagcggcugcggcaacugggacugcaucaugaccagcuaccaguaccugaucauccagaacaccaccugggaggaccacugccaguucagcagacccagccccaucggcuaccugggccugcugagccagagaaccagagacaucuacaucagcagaagacugcugggcaccuucaccuggacccugagcgacagcgagggcaacgagacccccggcggcuacugccugaccagauggaugcugaucgaggccgagcugaagugcuucggcaacaccgccguggccaagugcaacgagaagcacgacgaggaguucugcgacaugcugagacuguucgacuucaacaagcaggccaucagaagacugaagaccgaggcccaggccaacauccagcugaucaacaaggccgugaacgcccugaucaacgaccagcugaucaugaagaaccaccugagagacaucaugugcauccccuacugcaacuacagcaaguacugguaccugaaccacaccgugaccggcaagaccagccugcccagaugcuggcuggugagcaacggcagcuaccugaacgagacccacuucagcgacgacaucgagcagcaggccgacaacaugaucaccgagcugcugcagaaggaguacauggacagacagggcaagaccccccugggccugguggaccuguucguguucagcaccagcuucuaccugaucagcaucuuccugcaccuggugaagauccccacccacagacacgugaucggcaagcccugccccaagccccacagacugaaccacaugggcaucugcagcugcggccuguacaagcaccccggcgugcccgugaaguggaagagaugaggacuagucccuguucccagagcccacuuuuuuuucuuuuuuugaaauaaaauagccugucuuucagaucucaaaggcucuuuucagagccaccaaaaaaaaaaaaaaaaaaaaaaaaaaaaaaaaaaaaaaaaaaaaaaaaaaaaaaaaaaaaaaaaagaauu

SEQ ID NO: 35066 - RNA, 1714 nt, Artificial Sequence
  mRNA product Design a-1 (hSL-A64-N5) comprising derived and/or modified sequence from LASV(Nig08-A19;Clade III)__ADU56618__GPCmut9 (opt4)
aggagagucccgcagucggcguccagcggcucugcuuguucgugugugugucguugcaggccuuauucaagcuuaccaugggccagaucgugaccuucuuccaggaggugccccacgugaucgaggaggugaugaacaucgugcugaucgcccugagcauccuggccauccugaagggccuguacaacaucgccaccugcggccugaucggccuggugaccuuccugcugcugagcggcagaagcugcagcaugaccuacaagggcguguacgagcugcagacccuggagcugaacaugaacacccugaacaugaccaugccccugagcugcaccaagaacaacagccaccacuacaucauggugggcaacgagaccggccuggagcugacccugaccaacaccagccugcugcaccacaaguucugcaaccugagcgacgcccacaagaagaaccuguacgaccacacccugaugagcaucaucagcaccuuccaccugagcauccccaacuucaaccaguacgaggccaugagcugcgacuucaacggcggcaagaucaccgugcaguacaaccugagccacagcuacgccaucgacgccgccaaccacugcggcaccguggccaacggcgugcugcagaccuucaugagaauggccuggggcggcagcuacaucgcccuggacagcggcugcggcaagugggacugcaucaugaccagcuaccaguaccugaucauccagaacaccaccugggaggaccacugccaguucagcagacccagccccaucggcuaccugggccugcugagccagagaaccagagacaucuacaucagcagaagacugcugggcaccuucaccuggacccugagcgacagcgagggcaacgagacccccggcggcuacugccugaccagauggaugcugaucgaggccgagcugaagugcuucggcaacaccgccguggccaagugcaacgagaagcacgacgaggaguucugcgacaugcugagacuguucgacuucaacaagcaggccaucagaagacugaaggccgaggcccagaugagcauccagcugaucaacaaggccgugaacgcccugaucaacgaccagcugaucaugaagaaccaccugagagacaucaugugcauccccuacugcaacuacagcaaguacugguaccugaaccacaccagcaccggcagaaccagccugcccagaugcuggcuggugagcaacggcagcuaccugaacgagacccacuucagcgacgacaucgagcagcaggccgacaacaugaucaccgagaugcugcagaaggaguaccuggacagacagggcaagaccccccugggccugguggaccuguucguguucagcaccagcuucuaccugaucagcaucuuccugcaccuggugaagauccccacccacagacacaucgugggcaagcccugccccaagccccacagacugaaccacaugggcaucugcagcugcggccuguacaagcagcccggcgugcccgugagauggaagagaugaggacuagucccuguucccagagcccacuuuuuuuucuuuuuuugaaauaaaauagccugucuuucagaucucaaaggcucuuuucagagccaccaaaaaaaaaaaaaaaaaaaaaaaaaaaaaaaaaaaaaaaaaaaaaaaaaaaaaaaaaaaaaaaaagaauu

SEQ ID NO: 35067 - RNA, 1717 nt, Artificial Sequence
  mRNA product Design a-1 (hSL-A64-N5) comprising derived and/or modified sequence from LASV(G1180-SLE-2010;Clade IV)__AIT17168__GPCmut9 (opt4)
aggagagucccgcagucggcguccagcggcucugcuuguucgugugugugucguugcaggccuuauucaagcuuaccaugggccagaucgugaccuucuuccaggaggugccccacgugaucgaggaggugaugaacaucgugcugaucgcccugagcauccuggccgugcugaagggccuguacaacuucgccaccugcggccuggugggccugcugaccuuccugcugcugugcggcagaagcugcaccgccagcagauacaagggcguguacgagcugcagacccuggagcugaacauggagacccugaacaugaccaugccccugagcugcaccaagaacaacagccaccacuacaucauggugggcaacgagaccggccuggagcugacccugaccaacaccagcaucaucaaccacaaguucugcaaccugagcgacgcccacaagaagaaccuguacgaccacgcccugaugagcaucaucagcaccuuccaccugagcauccccaacuucaaccaguacgaggccaugagcugcgacuucaacggcggcaagaucagcgugcaguacaaccugagccacagcuacgccggcgacgccgccaaccacugcggcaccguggccaacggcgugcugcagaccuucaugagaauggccuggggcggcagcuacaucgcccuggacagcggcugcggcagcugggacugcaucaugaccagcuaccaguaccugaucauccagaacaccaccugggaggaccacugccaguucagcagacccagccccaucggcuaccugggccugcugagccagagaaccagagacaucuacaucagcagaagacugcugggcaccuucaccuggacccugagcgacagcgagggcaaggacacccccggcggcuacugccugaccagauggaugcugaucgaggccgagcugaagugcuucggcaacaccgccguggccaagugcaacgagaagcacgacgaggaguucugcgacaugcugagacuguucgacuucaacaagcaggccauccagagacugaaggccgaggcccagaugagcauccagcugaucaacaaggccgugaacgcccugaucaacgaccagcugaucaugaagaaccaccugagagacaucaugugcauccccuacugcaacuacagcaaguacugguaccugaaccacaccaccaccggcaagaccagccugcccaagugcuggcuggugagcaacggcagcuaccugaacgagacccacuucagcgacgacaucgagcagcaggccgacaacaugaucaccgagaugcugcagaaggaguacauggagagacagggcaagaccccccugggccugguggaccuguucguguucagcaccagcuucuaccugaucagcaucuuccugcaccuggugaagauccccacccacagacacaucgugggcaagagcugccccaagccccacagacugaaccacaugggcaucugcagcugcggccuguacaagcagcccggcgugcccgugaaguggaagagaugaggacuagucccuguucccagagcccacuuuuuuuucuuuuuuugaaauaaaauagccugucuuucagaucucaaaggcucuuuucagagccaccaaaaaaaaaaaaaaaaaaaaaaaaaaaaaaaaaaaaaaaaaaaaaaaaaaaaaaaaaaaaaaaaagaauu

SEQ ID NO: 35068 - RNA, 1717 nt, Artificial Sequence
  mRNA product Design a-1 (hSL-A64-N5) comprising derived and/or modified sequence from LASV(G1442-SLE-2011;Clade IV)__AIT17180__GPCmut9 (opt4)
aggagagucccgcagucggcguccagcggcucugcuuguucgugugugugucguugcaggccuuauucaagcuuaccaugggccagaucgugaccuucuuccaggaggugccccacgugaucgaggaggugaugaacaucgugcugaucgcccugagcauccuggccgugcugaagggccuguacaacguggccaccugcggccugaucggccuggugaccuuccugcugcugugcggcagaagcugcaccaccacccuguacaagggcguguacgagcugcagacccuggagcugaacauggagacccugaacaugaccaugccccugagcugcaccaagaacaacagccaccacuacaucagagugggcaacgagaccggccuggagcugacccugaccaacaccagcaucaucaaccacaaguucugcaaccugagcgacgcccacaagaagaaccuguacgaccacgcccugaugagcaucaucagcaccuuccaccugagcauccccaacuucaaccaguacgaggccaugagcugcgacuucaacggcggcaagaucagcgugcaguacaaccugagccacagcuacgccggcgacgccgccaaccacugcggcaccguggccaacggcgugcugcagaccuucaugagaauggccuggggcggcagcuacaucgcccuggacagcggcugcggcaacugggacugcaucaugaccagcuaccaguaccugaucauccagaacaccaccugggacgaccacugccaguucagcagacccagccccaucggcuaccugggccugcugagccagagaaccagagacguguacaucagcagaagacugcugggcaccuucaccuggacccugagcgacagcgagggcaaggacacccccggcggcuacugccugaccagauggaugcugaucgaggccgagcugaagugcuucggcaacaccgccguggccaagugcaacgagaagcacgacgaggaguucugcgacaugcugagacuguucgacuucaacaagcaggccauccagagacugaaggccgaggcccagaugagcauccagcugaucaacaaggccgugaacgcccugaucaacgaccagcugaucaugaagaaccaccugagagacaucaugugcauccccuacugcaacuacagcaaguacugguaccugaacaacaccgccaccggcaagaccagccugcccaagugcuggcugaucagcaacggcagcuaccugaacgagacccacuucagcgacgacaucgagcaggaggccgacaacaugaucaccgagaugcugcagaaggaguacauggagagacagggcaagaccccccugggccugguggaccuguucguguucagcaccagcuucuaccugaucagcaucuuccugcaccuggugaagauccccacccacagacacaucgugggcaagagcugccccaagccccacagacugaaccacaugggcaucugcagcugcggccuguacaagcagcccggcgugcccgugagauggaagagaugaggacuagucccuguucccagagcccacuuuuuuuucuuuuuuugaaauaaaauagccugucuuucagaucucaaaggcucuuuucagagccaccaaaaaaaaaaaaaaaaaaaaaaaaaaaaaaaaaaaaaaaaaaaaaaaaaaaaaaaaaaaaaaaaagaauu

SEQ ID NO: 35069 - RNA, 1717 nt, Artificial Sequence
  mRNA product Design a-1 (hSL-A64-N5) comprising derived and/or modified sequence from LASV(G3010-SLE-2013;Clade IV)__AIT17344__GPCmut9 (opt4)
aggagagucccgcagucggcguccagcggcucugcuuguucgugugugugucguugcaggccuuauucaagcuuaccaugggccagaucgugaccuucuuccaggaggugccccacgugaucgaggaggugaugaacaucgugcugaucgcccugagcauccuggccgugcugaagggccuguacaacuucgccaccugcggccuggugggccuggugaccuuccugcugcugugcggcagaagcugcaccaccagccuguacaagggcguguacgagcugcagacccuggagcugaacauggagacccugaacaugaccaugccccugagcugcaccaagaacaacagccaccacuacaucauggugggcaacgagaccggccuggagcugacccugaccaacaccagcaucaucaaccacaaguucugcaaccugagcgacgcccacaagaagaaccuguacaaccacgcccugaugagcaucaucagcaccuuccaccugagcauccccaacuucaaccaguacgaggccaugagcugcgacuucaacggcggcaagaucagcgugcaguacaaccugagccacagcuacgccggcgacgccgccagccacugcggcaccguggccaacggcgugcugcagaccuucaugagaauggccuggggcggcagcuacaucgcccuggacagcggcugcggcaagugggacugcaucaugaccagcuaccaguaccugaucauccagaacaccaccugggaggaccacugccaguucagcagacccagccccaucggcuaccugggccugcugagccagagaaccagagacaucuacaucagcagaagacugcugggcaccuucaccuggacccugagcgacagcgagggcaaggacacccccggcggcuacugccugaccagauggaugcugaucgaggccgagcugaagugcuucggcaacaccgccguggccaagugcaacgagaagcacgacgaggaguucugcgacaugcugagacuguucgacuucaacaagcaggccauccagagacugaagaccgaggcccagaugagcauccagcugaucaacaaggccgugaacgcccugaucaacgaccagcugaucaugaagaaccaccugagagacaucaugugcauccccuacugcaacuacagcaaguacugguaccugaaccacaccaccaccggcaagaccagccugcccaagugcuggcuggugagcaacggcagcuaccugaacgagacccacuucagcgacgacaucgagcagcaggccgacaacaugaucaccgagaugcugcagaaggaguacauggagagacagggcaagaccccccugggccugguggaccuguucguguucagcaccagcuucuaccugaucagcaucuuccugcaccuggugaagauccccacccacagacacaucgugggcaagagcugccccaagccccacagacugaaccacaugggcaucugcagcugcggccuguacaagcagcccggcgugcccgugagauggaagagaugaggacuagucccuguucccagagcccacuuuuuuuucuuuuuuugaaauaaaauagccugucuuucagaucucaaaggcucuuuucagagccaccaaaaaaaaaaaaaaaaaaaaaaaaaaaaaaaaaaaaaaaaaaaaaaaaaaaaaaaaaaaaaaaaagaauu

SEQ ID NO: 35070 - RNA, 1717 nt, Artificial Sequence
  mRNA product Design a-1 (hSL-A64-N5) comprising derived and/or modified sequence from LASV(G502-SLE-2009;Clade IV)__AIT17126__GPCmut9 (opt4)
aggagagucccgcagucggcguccagcggcucugcuuguucgugugugugucguugcaggccuuauucaagcuuaccaugggccagaucgugaccuucuuccaggaggugccccacgugaucgaggaggugaugaacaucgugcugaucgcccugagcauccuggccgugcugaagggccuguacaacuucgccaccugcggccuggugggccugcugaccuuccugcugcugugcggcagaagcugcaccaccggccuguacaagggcguguacgagcugcagacccuggagcugaacauggagacccugaacaugaccaugccccugagcugcaccaagaacaacagccaccacuacaucauggugggcaacgagaccggccuggagcugacccugaccaacaccagcaucaucaaccacaaguucugcaaccugagcgacgcccacaagaagaaccuguacgaccacgcccugaugagcaucaucagcaccuuccaccugagcauccccaacuucaaccaguacgaggccaugagcugcgacuucaacggcggcaagaucagcgugcaguacaaccugagccacagcuacgccggcgacgccgccgaccacugcggcaccguggccaacggcgugcugcagaccuucaugagaauggccuggggcggcagcuacaucgcccuggacagcggcugcggcagaugggacugcaucaugaccagcuaccaguaccugaucauccagaacaccaccugggaggaccacugccaguucagcagacccagccccaucggcuaccugggccugcugagccagagaaccagagacaucuacaucagcagaagacugcugggcaccuucaccuggacccugagcgacagcgagggcaaggacacccccggcggcuacugccugaccagauggaugcugaucgaggccgagcugaagugcuucggcaacaccgccguggccaagugcaacgagaagcacgacgaggaguucugcgacaugcugagacuguucgacuucaacaagcaggccauccagagacugaaggccgaggcccagaugagcauccagcugaucaacaaggccgugaacgcccugaucaacgaccagcuggugaugaagaaccaccugagagacaucaugugcauccccuacugcaacuacagcagauacugguaccugaaccacaccaccaccggcagaaccagccugcccaagugcuggcuggugagcaacggcagcuaccugaacgagacccacuucagcgacgacaucgagcagcaggccgacaacaugaucaccgagaugcugcagaaggaguacauggagagacagggcaagaccccccugggccugguggaccuguucguguucagcaccagcuucuaccugaucagcaucuuccugcaccuggugaagauccccacccacagacacaucgugggcaagagcugccccaagccccacagacugaaccacaugggcaucugcagcugcggccuguacaagcagcccggcgugcccgugaaguggaagagaugaggacuagucccuguucccagagcccacuuuuuuuucuuuuuuugaaauaaaauagccugucuuucagaucucaaaggcucuuuucagagccaccaaaaaaaaaaaaaaaaaaaaaaaaaaaaaaaaaaaaaaaaaaaaaaaaaaaaaaaaaaaaaaaaagaauu

SEQ ID NO: 35071 - RNA, 1717 nt, Artificial Sequence
  mRNA product Design a-1 (hSL-A64-N5) comprising derived and/or modified sequence from LASV(G733-SLE-2010;Clade IV)__AIT17154__GPCmut9 (opt4)
aggagagucccgcagucggcguccagcggcucugcuuguucgugugugugucguugcaggccuuauucaagcuuaccaugggccagaucgugaccuucuuccaggaggugccccacgugaucgaggaggugaugaacaucgugcugaucgcccugagcauccuggccgugcugaagggccuguacaacuucgccaccugcggcaucgugggccuggugagcuuccugcugcugugcggcagaagcugcaccaccagccuguacaagggcguguacgagcugcagacccuggagcugaacauggagacccugaacaugaccaugccccugagcugcaccaagaacaacagccaccacuacaucauggugggcaacgagaccggccuggagcugacccugaccaacaccagcaucaucaaccacaaguucugcaaccugagcgacgcccacaagaagaaccuguacgaccacgcccugaugagcaucaucagcaccuuccaccugagcauccccaacuucaaccaguacgaggccaugagcugcgacuucaacggcggcaagaucagcgugcaguacaaccugagccacagcuacgccggcgacgccgccaaccacugcggcaccaucgccaacggcgugcugcagaccuucaugagaauggccuggggcggcagcuacaucgcccuggacagcggcugcgacagaugggacugcaucaugaccagcuaccaguaccugaucauccagaacaccaccugggaggaccacugccaguucagcagacccagccccaucggcuaccugggccugcugagccagagaaccagagacaucuacaucagcagaagacugcugggcaccuucaccuggacccugagcgacagcgagggcaaggacacccccggcggcuacugccugaccagauggaugcugaucgaggccgagcugaagugcuucggcaacaccgccguggccaagugcaacgagaagcacgacgaggaguucugcgacaugcugagacuguucgacuucaacaagcaggccauccagagacugaaggccgaggcccagaugagcauccagcugaucaacaaggccgugaacgcccugaucaacgaccagcugaucaugaagaaccaccugagagacaucaugugcauccccuacugcaacuacagcaaguacugguaccugaaccacaccaccaccggcaagaccagccugcccaagugcuggcuggugagcaacggcagcuaccugaacgagacccacuucagcgacgacaucgagcagcaggccgacaacaugaucaccgagaugcugcagaaggaguacauggagagacagggcaagaccccccugggccugguggaccuguucguguucagcaccagcuucuaccugaucagcaucuuccugcaccuggugaagauccccacccacagacacguggugggcaagagcugccccaagccccacagacugaaccacaugggcaucugcagcugcggccuguacggccagcccggcgugcccgugaaguggaagagaugaggacuagucccuguucccagagcccacuuuuuuuucuuuuuuugaaauaaaauagccugucuuucagaucucaaaggcucuuuucagagccaccaaaaaaaaaaaaaaaaaaaaaaaaaaaaaaaaaaaaaaaaaaaaaaaaaaaaaaaaaaaaaaaaagaauu

SEQ ID NO: 35072 - RNA, 1717 nt, Artificial Sequence
  mRNA product Design a-1 (hSL-A64-N5) comprising derived and/or modified sequence from MOPV/LASV reassortant(IGS-1;Clade IV)__AFY05576__GPCmut9 (opt4)
aggagagucccgcagucggcguccagcggcucugcuuguucgugugugugucguugcaggccuuauucaagcuuaccaugggccagaucgugaccuucuuccaggaggugccccacgugaucgaggaggugaugaacaucgugcugaucgcccugagcgugcuggccgugcugaagggccuguacaacuucgccaccugcggccuggugggccuggugaccuuccugcugcugugcggcagaagcugcaccaccagccuguacaagggcguguacgagcugcagacccuggagcugaacauggagacccugaacaugaccaugccccugagcugcaccaagaacaacagccaccacuacaucauggugggcaacgagaccggccuggagcugacccugaccaacaccagcaucaucaaccacaaguucugcaaccugagcgacgcccacaagaagaaccuguacgaccacgcccugaugagcaucaucagcaccuuccaccugagcauccccaacuucaaccaguacgaggccaugagcugcgacuucaacggcggcaagaucagcgugcaguacaaccugagccacagcuacgccggcgacgccgccaaccacugcggcaccguggccaacggcgugcugcagaccuucaugagaauggccuggggcggcagcuacaucgcccuggacagcggcugcggcaacugggacugcaucaugaccagcuaccaguaccugaucauccagaacaccaccugggaggaccacugccaguucagcagacccagccccaucggcuaccugggccugcugagccagagaaccagagacaucuacaucagcagaagacugcugggcaccuucaccuggacccugagcgacagcgagggcgaggacacccccggcggcuacugccugaccagauggaugcugaucgaggccgagcugaagugcuucggcaacaccgccguggccaagugcaacgagaagcacgacgaggaguucugcgacaugcugagacuguucgacuucaacaagcaggccauccagagacugaaggccgaggcccagaugagcauccagcugaucaacaaggccgugaacgcccugaucaacgaccagcugaucaugaagaaccaccugagagacaucaugugcauccccuacugcaacuacagcaaguacugguaccugaaccacaccaccaccggcagaaccagccugcccaagugcuggcuggugagcaacggcagcuaccugaacgagacccacuucagcgacgacaucgagcagcaggccgacaacaugaucaccgagaugcugcagaaggaguacauggagagacagggcaagaccccccugggccugguggaccuguucguguucagcaccagcuucuaccugaucagcaucuuccugcaccuggugaagauccccacccacagacacaucgugggcaagagcugccccaagccccacagacugaaccacaugggcaucugcagcugcggccuguacaagcagcccggcgugcccgugaaguggaagagaugaggacuagucccuguucccagagcccacuuuuuuuucuuuuuuugaaauaaaauagccugucuuucagaucucaaaggcucuuuucagagccaccaaaaaaaaaaaaaaaaaaaaaaaaaaaaaaaaaaaaaaaaaaaaaaaaaaaaaaaaaaaaaaaaagaauu

SEQ ID NO: 35073 - RNA, 1717 nt, Artificial Sequence
  mRNA product Design a-1 (hSL-A64-N5) comprising derived and/or modified sequence from LASV(LM765-SLE-2012;Clade IV)__AIT17814__GPCmut9 (opt4)
aggagagucccgcagucggcguccagcggcucugcuuguucgugugugugucguugcaggccuuauucaagcuuaccaugggccagaucgugaccuucuuccaggaggugccccacgugaucgaggaggugaugaacaucgugcugaucgcccugagcauccuggccgugcugaagggccuguacaacuucgccaccugcggccuggugggccuggugaccuuccugcugcugugcggcagaagcugcaccaccagccuguacaagggcguguacgagcugcagacccuggagcugaacauggagacccugaacaugaccaugccccugagcugcaccaagaacaacagccaccacuacaucauggugggcaacgagaccggccuggagcugacccugaccaacaccagcaucaucgaccacaaguucugcaaccugagcgacgcccacagaaagaaccuguacgaccacgcccugaugagcaucaucagcaccuuccaccugagcauccccaacuucaaccaguacgaggccaugagcugcgacuucaacggcggcaagaucagcgugcaguacaaccugagccacagcuacgccaaggacgccgccgaccacugcggcaccguggccaacggcgugcugcagaccuucaugagaauggccuggggcggcagcuacaucgcccuggacagcggcugcggcagaugggacugcaucaugaccagcuaccaguaccugaucauccagaacaccaccugggaggaccacugccaguucagcagacccagccccaucggcuaccugggccugcugagccagagaaccagagacaucuacaucagcagaagacugcugggcaccuucaccuggacccugagcgacagcgagggcaaggacacccccggcggcuacugccugaccagauggaugcugaucgaggccgagcugaagugcuucggcaacaccgccguggccaagugcaacgagaagcacgacgaggaguucugcgacaugcugagacuguucgacuucaacaagcaggccauccagagacugaaggccgaggcccagaugagcauccagcugaucaacaaggccgugaacgcccugaucaacgaccagcugaucaugaagaaccaccugagagacaucaugugcauccccuacugcaacuacagcaaguacugguaccugaaccacaccaccaccggcaagaccagccugcccaagugcuggcuggugagcaacggcagcuaccugaacgagacccacuucagcgacgacaucgagcagcaggccgacaacaugaucaccgagaugcugcagaaggaguacauggagagacagggcaagaccccccugggccugguggaccuguucguguucagcaccagcuucuaccugaucagcaucuuccugcaccuggugaagauccccacccacagacacaucgugggcaagcccugccccaagccccacagacugaaccacaugggcaucugcagcugcggccuguacaagcagcccggcgugcccgugaaguggaagagaugaggacuagucccuguucccagagcccacuuuuuuuucuuuuuuugaaauaaaauagccugucuuucagaucucaaaggcucuuuucagagccaccaaaaaaaaaaaaaaaaaaaaaaaaaaaaaaaaaaaaaaaaaaaaaaaaaaaaaaaaaaaaaaaaagaauu

SEQ ID NO: 35074 - RNA, 1717 nt, Artificial Sequence
  mRNA product Design a-1 (hSL-A64-N5) comprising derived and/or modified sequence from LASV(LM776-SLE-2012;Clade IV)__AIT17824__GPCmut9 (opt4)
aggagagucccgcagucggcguccagcggcucugcuuguucgugugugugucguugcaggccuuauucaagcuuaccaugggccagaucgugaccuucuuccaggaggugccccacgugaucgaggaggugaugaacaucgugcugaucgcccugagcauccuggccgugcugaagggccuguacaacuucgccaccugcggccuggugggccuggugaccuuccugcugcugugcggcagaagcugcaccaccagcguguacaagggcguguacgagcugcagacccuggagcugaacauggagacccugaacaugaccaugccccugagcugcaccaagaacaacagccaccacuacaucauggugggcaacgagaccggccuggagcugacccugaccaacaccagcaucaucaaccacaaguucugcaaccugagcgacgcccacaagaagaaccuguacgaccacgcccugaugagcaucaucagcaccuuccaccugagcauccccaacuucaaccaguacgaggccaugagcugcgacuucaacggcggcaagaucagcgugcaguacaaccugagccacagcuacgccggcgacgccgccaaccacugcggcaccguggccaacggcgugcugcagaccuucaugagaauggccuggggcggcagcuacaucgcccuggacagcggcugcggcaagugggacugcaucaugaccagcuaccaguaccugaucauccagaacaccaccugggaggaccacugccaguucagcagacccagccccaucggcuaccugggccugcugagccagagaaccagagacaucuacaucagcagaagacugcugggcaccuucaccuggacccugagcgacagcgagggcaaggacacccccggcggcuacugccugaccagauggaugcugaucgaggccgagcugaagugcuucggcaacaccgccguggccaagugcaacgagaagcacgacgaggaguucugcgacaugcugagacuguucgacuucaacaagcaggccauccagagacugaaggccgaggcccagaugagcauccagcugaucaacaaggccgugaacgcccugaucaacgaccagcugaucaugaagaaccaccugagagacaucaugugcauccccuacugcaacuacagcaaguacugguaccugaaccacaccaccaccggcaagaccagccugcccaagugcuggcuggugagcaacggcagcuaccugaacgagacccacuucagcgacgacaucgagcagcaggccgacaacaugaucaccgagaugcugcagaaggaguacauggagagacagggcaagaccccccugggccugguggaccuguucguguucagcaccagcuucuaccugaucagcaucuuccugcaccuggugaagauccccacccacagacacaucgugggcaagagcugccccaagccccacagacugaaccacaugggcaucugcagcugcggccuguacaagcagcccggcgugcccgugagauggaagagaugaggacuagucccuguucccagagcccacuuuuuuuucuuuuuuugaaauaaaauagccugucuuucagaucucaaaggcucuuuucagagccaccaaaaaaaaaaaaaaaaaaaaaaaaaaaaaaaaaaaaaaaaaaaaaaaaaaaaaaaaaaaaaaaaagaauu

SEQ ID NO: 35075 - RNA, 1717 nt, Artificial Sequence
  mRNA product Design a-1 (hSL-A64-N5) comprising derived and/or modified sequence from LASV(Mad39;Clade IV)__ANH09722__GPCmut9 (opt4)
aggagagucccgcagucggcguccagcggcucugcuuguucgugugugugucguugcaggccuuauucaagcuuaccaugggccagaucgugaccuucuuccaggaggugccccacgugaucgaggaggugaugaacaucgugcugaucgcccugagcauccuggccgugcugaagggccuguacaacguggccaccugcggccugaucggccuggugaccuuccugcugcugugcggcagaagcugcaccaccacccuguacaagggcguguacgagcugcaggcccuggagcugaacauggagacccugaacaugaccaugccccugagcugcaccaagaacaacagccaccacuacaucagagugggcaacgagaccggccuggagcugacccugaccaacaccagccugaucaaccacaaguucugcaaccugagcgacgcccacaagaagaaccuguacgaccacgcccugaugagcaucaucagcaccuuccaccugagcauccccaacuucaaccaguacgaggccaugagcugcgacuucaacgacggcaagaucagcgugcaguacaaccugagccacaccuacgccggcgacaccgccaaccacugcggcaccguggccaacggcgugcugcagaccuucaugagaauggccuggggcggcagcuacaucgcccuggacagcggcugcggcggcugggacugcaucaugaccagcuaccaguaccugaucauccagaacaccaccugggaggaccacugccaguucagcagacccagccccaucggcuaccugggccugcugagccagagaaccagagacaucuacaucagcagaagacugcugggcaccuucaccuggacccugagcgacagcgagggcaaggacacccccggcggcuacugccugaccagauggaugcugaucgaggccgagcugaagugcuucggcaacaccgccguggccaagugcaacgagaagcacgacgaggaguucugcgacaugcugagacuguucgacuucaacaagcaggccauccagagacugaaggccgaggcccagaugagcauccagcugaucaacaaggccgugaacgcccugaucaacgaccagcugaucaugaagaaccaccugagagacaucaugugcauccccuacugcaacuacagcaaguacugguaccugaaccacaccgugaccggcaagaccagccugcccaagugcuggcuggugagcaacggcagcuaccugaacgagacccacuucagcgacgacaucgagcagcaggccgacaacaugaucaccgagaugcugcagaaggaguacauggagagacagggcaagaccccccugggccugguggaccuguucguguucagcaccagcuucuaccugaucagcaucuuccugcaccuggugaagauccccacccacagacacguggugggcaagcccugccccaagccccacagacugaaccacaugggcaucugcagcugcggcuucuacaagcagcccggcgugcccgugagauggaagagaugaggacuagucccuguucccagagcccacuuuuuuuucuuuuuuugaaauaaaauagccugucuuucagaucucaaaggcucuuuucagagccaccaaaaaaaaaaaaaaaaaaaaaaaaaaaaaaaaaaaaaaaaaaaaaaaaaaaaaaaaaaaaaaaaagaauu

SEQ ID NO: 35076 - RNA, 1717 nt, Artificial Sequence
  mRNA product Design a-1 (hSL-A64-N5) comprising derived and/or modified sequence from LASV(Z0947-SLE-2011;Clade IV)__AIT17840__GPCmut9 (opt4)
aggagagucccgcagucggcguccagcggcucugcuuguucgugugugugucguugcaggccuuauucaagcuuaccaugggccagaucgugaccuucuuccaggaggugccccacgugaucgaggaggugaugaacaucgugcugaucgcccugagcauccuggccgugcugaagggccuguacaacuucgccaccugcggccuggugggccuggugaccuuccugcugcugugcggcagaagcugcaccaucagccuguacaagggcguguacgagcugcagacccuggagcugaacauggagacccugaacaugaccaugccccugagcugcaccaagaacaacagccaccacuacaucauggugggcaacgagaccggccuggagcugacccugaccaacaccagcaucaucaaccacaaguucugcaaccugagcgacgcccacaagaagaaccuguacgaccacgcccugaugagcaucaucagcaccuuccaccugagcauccccaacuucaaccaguacgaggccaugagcugcgacuucaacggcggcaagaucagcgugcaguacaaccugagccacagcuacgccggcgacgccgccaaccacugcggcaccguggccaacggcgugcugcagaccuucaugagaauggccuggggcggcagcuacaucgcccuggacagcggcugcgacagaugggacugcaucaugaccagcuaccaguaccugaucauccagaacaccaccugggaggaccacugccaguucagcagacccagccccaucggcuaccugggccugcugagccagagaaccagagacaucuacaucagcagaagacugcugggcaccuucaccuggacccugagcgacagcgagggcaaggacacccccggcggcuacugccugaccagauggaugcugaucgaggccgagcugaagugcuucggcaacaccgccguggccaagugcaacgagaagcacgacgaggaguucugcgacaugcugagacuguucgacuucaacaagcaggccauccagagacugaaggccgaggcccagaugagcauccagcugaucaacaaggccgugaacgcccugaucaacgaccagcugaucaugaagaaccaccugagagacaucaugugcauccccuacugcaacuacagcaaguacugguaccugaaccacaccaccaccggcaagaccagccugcccaagugcuggcuggugagcaacggcagcuaccugaacgagacccacuucagcgacgacaucgagcagcaggccgacaacaugaucaccgagaugcugcagaaggaguacauggagagacagggcaagaccccccugggccugguggaccuguucguguucagcaccagcuucuaccugaucagcaucuuccugcaccuggugaagauccccacccacagacacaucgugggcaagcccugccccaagccccacagacugaaccacaugggcaucugcagcugcggccuguacaagcagcccggcgugcccgugaaguggaagagaugaggacuagucccuguucccagagcccacuuuuuuuucuuuuuuugaaauaaaauagccugucuuucagaucucaaaggcucuuuucagagccaccaaaaaaaaaaaaaaaaaaaaaaaaaaaaaaaaaaaaaaaaaaaaaaaaaaaaaaaaaaaaaaaaagaauu

SEQ ID NO: 35077 - RNA, 1717 nt, Artificial Sequence
  mRNA product Design a-1 (hSL-A64-N5) comprising derived and/or modified sequence from LASV(Josiah;Clade IV)__NP_694870__GPCmut9 (opt5)
aggagagucccgcagucggcguccagcggcucugcuuguucgugugugugucguugcaggccuuauucaagcuuaccaugggccagaucgugaccuucuuucaagaggucccccacguuauugaagaggugaugaacaucgugcugauugcccucagcguccuggcugugcuuaaggggcuguacaauuucgccacaugcggacucguuggccuggugacguuucuucugcucugugggagauccugcaccacaucucuguauaaaggagucuacgaacugcagacccucgagcugaacauggaaacacuuaauaugaccaugccucugagcuguacaaagaacaauucccaucacuauaucauggugggcaacgagaccgggcucgagcugacgcuuaccaauacaucuauuaucaaccauaaauucugcaaucugagcgacgcgcacaagaaaaaccucuacgaucaugcucugauguccaucauuucuaccuuucaccugagcaucccgaauuucaaccaguaugaagccauguccugugacuuuaauggaggcaagauuagcguucaguacaaccucucucacuccuaugccggcgaugcugccaaucauugcgggacaguggcuaacggaguccugcaaaccuucaugcggauggccuggggcgggagcuacaucgcgcuugacucuggauguggcaacugggauugcauuaugacguccuaccaguaucugaucauucagaauacaaccugggaggaccacugucaguuuagccgccccucuccuaucggguaccucggacugcuuucccaaagaacacgggauaucuauauuagccgcagacugcucggcaccuucaccuggacacuguccgacucugaaggcaaggauacgcccgggggauacugccugacccgguggaugcucaucgaggccgagcugaaauguuuuggcaacacagcuguggccaagugcaaugaaaaacaugacgaggaguucugcgauaugcuucgccuguuugacuucaacaagcaggcuauucagagacucaaagccgaagcgcagaugagcauccaacugauuaauaaggccgugaacgcucuuaucaaugaucagcugaucaugaagaaccaccuccgggacauuauguguaucccuuauugcaauuacuccaaauauugguaccugaaccacaccacaaccgggcgcacgagccugcccaaguguuggcucgucucuaauggauccuaccugaacgaaacacauuucagcgacgauauugagcagcaagccgacaauaugaucaccgagaugcuucagaaagaauauauggagagacagggcaagaccccucuggggcucguugaucuguuuguguucucuaccagcuuuuaccugauuuccaucuuccuucaccucgugaaaaucccgacacaucggcacauugucggaaagucuugccccaaaccucaucgccugaaccacaugggcaucuguagcugcggccuguauaagcagcccggggugccuguuaaguggaaaagaugaggacuagucccuguucccagagcccacuuuuuuuucuuuuuuugaaauaaaauagccugucuuucagaucucaaaggcucuuuucagagccaccaaaaaaaaaaaaaaaaaaaaaaaaaaaaaaaaaaaaaaaaaaaaaaaaaaaaaaaaaaaaaaaaagaauu

SEQ ID NO: 35078 - RNA, 1714 nt, Artificial Sequence
  mRNA product Design a-1 (hSL-A64-N5) comprising derived and/or modified sequence from LASV(LP;Clade I)__AAF86701__GPCmut9 (opt5)
aggagagucccgcagucggcguccagcggcucugcuuguucgugugugugucguugcaggccuuauucaagcuuaccaugggccagaucauuaccuucuuucaagaggugccccacgucaucgaagagguuaugaacauugugcugaucgcccucagccugcuugcuauucugaaggggcucuacaauaucgccacaugcggaaucauuggccugguggcguuccuuuuucugugugggaaauccugcucucucacgcugaagggaggcuaugaacugcagacccucgagcugaacauggaaacacuuaauaugaccaugccucugagcuguaccaaaaacuccucucaucacuacaucagagucgggaaugagacaggacucgagcugacacuuaccaacacgagcauuaucaaucauaaguucugcaaccuguccgacgcucacaaaaagaaucucuaugaucaugcccugaugucuauuaucagcaccuuucaccuguccauuccgaacuucaaucaguacgaagccaugagcugugacuuuaacggcggcaagaucucugugcaguauaaucucucccacagcuacgcuggggaugccgcugagcauugcggaacaguugccaacggcgugcugcaaaccuucaugcggauggcguggggagggcgcuauaucgcccuugacucuggcugugggaauugggauugcauuaugacauccuaccaguaccugaucauucagaacaccacgugggaagaccacugucaguuuagcagacccucuccuaucggauaucucggccugcuuucccaacggacacgcgauauuuacaucagcagacggcugcucggcaccuucacauggacccuguccgacucugaggggaacgagacccccggaggcuauugccugacacgcuggaugcucaucgaagcugagcugaaauguuuugggaauacggccgucgcuaagugcaacgaaaaacaugaugaggaguucugcgacaugcuuagacuguuugauuucaauaagcaggccauucggcgccucaaagcggaagcccagaugagcauccagcugauuaacaaggcugugaaugcccuuaucaacgaccaacugauuaugaagaaucaccucagagauaucauguguaucccuuacugcaacuauuccaaauacugguaucugaaucacaccagcucuggacggacaucccugcccaaguguuggcucauuagcaacggcucuuaccugaaugagacccaguucagcgacgacaucgaacagcaagcugauaacaugauuacagagaugcuucagaaagaauacaucgagcgccaggggaagaccccucugggacucguugacauuuuuaucuucuccacgucuuuuuaucugauuagcaucuuccugcaucuuaucaaaauuccgacacacagacauaucgugggcaagcccugcccuaaaccccaccggcucaaucauaugggcgucuguuccugcgggcuguacaagcacccuggagugcccaccaaguggaaacgcugaggacuagucccuguucccagagcccacuuuuuuuucuuuuuuugaaauaaaauagccugucuuucagaucucaaaggcucuuuucagagccaccaaaaaaaaaaaaaaaaaaaaaaaaaaaaaaaaaaaaaaaaaaaaaaaaaaaaaaaaaaaaaaaaagaauu

SEQ ID NO: 35079 - RNA, 1714 nt, Artificial Sequence
  mRNA product Design a-1 (hSL-A64-N5) comprising derived and/or modified sequence from LASV(803213;Clade II)__AAF86703__GPCmut9 (opt5)
aggagagucccgcagucggcguccagcggcucugcuuguucgugugugugucguugcaggccuuauucaagcuuaccaugggccagaucauuaccuucuuucaagaggugccccacgucaucgaagagguuaugaacauugugcugaucgcccucagccugcuugcuauucugaaggggaucuacaauguggccacaugcggacucuucggccugaucuccuuucuucugcucugugggagaucuugcagcgucacguauaaaggaguguacgaacugcagacccuggagcucaacauggcgaaucugaacaugacaaugccucuuuccuguaccaagaauaacucucaucacuauauuaugguuggcaaugaaacagggcuggagcucacccugacaaacaccagcaucauuaaucauaaauucugcaaccuuuccgacgcucacaagaaaaaucuguacgaucaugcccucaugucuaucauuagcacguuucaccuguccaucccgaacuucaaucaguaugaggccaugagcugugacuuuaacggaggcaagauuucugugcaguacaaucugucccacagcuucgcugucgaugccgcuaaccauugcggcaccaucgccaacggggugcuccaaacauuuaugcggauggcguggggaggcucuuauaucgcccuggacuccggguguggaaauugggauugcauuaugaccagcuaccaguaccuuaucauucagaacacaaccugggaagaccacugucaguucucucgccccuccccuaucggcuaucuggggcuccugagccaaagaacgcgggauauuuacaucucccgcagacuucugggaacauuuaccuggacacucucugacagcgagggcaaugaagcucccggcggguauugccugacccgguggaugcugaucgaggccgagcucaaguguuucggaaacaccgcuguugccaaaugcaaugaaaagcaugaugaggaauuuugcgacaugcugcgccuuuucgauuucaacaaacaggcgauuaagagacugaaaacagaggcccagauguccauccagcucauuaauaaggcugugaacgcccugaucaaugaccaacuuauuaugaagaaccaucugcgggauaucauguguaucccuuacugcaauuauagccgcuacugguaucucaaccacacggucaccggcaaaacaucucugcccagauguuggcugguguccaaugggagcuaccucaacgaaacccacuuuucugacgacauugagcagcaggcugauaauaugaucacagagaugcugcaaaaggaauacauggaccggcagggaaaaaccccucuuggccugguggaucucuucgucuuuagcacguccuucuaucugauuucuaucuuucugcaccuuguuaagauuccgacacaucgccacaucguggggaaacccugcccuaagccccauagacucaaccacaugggaauuuguagcugcggccuguacaaacacccuggcgugcccgucaaguggaagcggugaggacuagucccuguucccagagcccacuuuuuuuucuuuuuuugaaauaaaauagccugucuuucagaucucaaaggcucuuuucagagccaccaaaaaaaaaaaaaaaaaaaaaaaaaaaaaaaaaaaaaaaaaaaaaaaaaaaaaaaaaaaaaaaaagaauu

SEQ ID NO: 35080 - RNA, 1714 nt, Artificial Sequence
  mRNA product Design a-1 (hSL-A64-N5) comprising derived and/or modified sequence from LASV(GA391;Clade III)__CAA36645__GPCmut9 (opt5)
aggagagucccgcagucggcguccagcggcucugcuuguucgugugugugucguugcaggccuuauucaagcuuaccaugggccagaucgugaccuucuuucaagaggucccccacguuauugaagaggugaugaacaucgugcugauugcccucagcauccuggcuauucuuaaggggcuguacaaugucgccacaugcggacucaucggccuggugacguuccuucugcucuccgggagaucuuguagccugaucuauaaaggaaccuacgaacugcagacacucgagcugaacauggaaacccuuaauaugacaaugccucuguccugcaccaagaacaauucucaucacuauauucggguuggcaacgagacagggcucgagcugacccuuacgaauaccagcauccugaaccauaaauuuuguaaucucuccgacgcgcacaagcgcaaccuguacgaucauucucugaugagcauuaucuccacauuccaccucagcauuccgaauuuuaaccaguaugaagcuaugucuugcgacuucaauggaggcaaaaucaccgugcaguacaaccugucccacagcuuugccgucgaugccgcuggccauugugggacacuugccaauggagugcugcaaaccuucaugagaauggcuuggggcgggucuuauauugcccucgacuccggaugcggcaacugggauuguaucaugacgagcuaccaguaccugaucauucagaacacaaccugggacgaucacugccaguuuucucggcccuccccuaucggguaucuuggacugcucagccaacgcacaagagacauuuacaucucccggcgccugcugggcaccuucaccuggacacucucugauagcgagggcaaugaaacgcccgggggauauugucugaccagauggaugcuuauugaggcggagcugaagugcuuuggcaacacagccguugcuaaguguaaugaaaaacaugacgaggaguucugcgauaugcuccggcuguuugacuucaacaagcaggccauccgcagacuuaaaaccgaagcucagauguccauccagcugauuaauaaggccgugaacgcgcucaucaaugaucaacugauuaugaaaaaccaucugcgggacaucaugugcauuccuuacuguaauuauagccgcuacugguaucucaaccacacaucuaccgggaagacgucccugcccagaugcuggcuuaucagcaauggaucuuaccugaacgaaacaaaguucagcgacgauaucgagcagcaggccgacaauaugauuaccgagaugcuccaaaaagaauacaucgaucggcagggcaagaccccucuggggcuggucgaccuuuuuguguucuccacaucuuuuuaucucauuagcaucuuccugcaccuggugaaaauuccgacccaccgccauaucgucggaaagcccuguccuaaaccccacagacucaaccauaugggcauuugcuccuguggccuguacaagcagccugggguucccgugcgguggaaaagaugaggacuagucccuguucccagagcccacuuuuuuuucuuuuuuugaaauaaaauagccugucuuucagaucucaaaggcucuuuucagagccaccaaaaaaaaaaaaaaaaaaaaaaaaaaaaaaaaaaaaaaaaaaaaaaaaaaaaaaaaaaaaaaaaagaauu

SEQ ID NO: 35081 - RNA, 1717 nt, Artificial Sequence
  mRNA product Design a-1 (hSL-A64-N5) comprising derived and/or modified sequence from LASV(AV;Clade V)__CCA30314__GPCmut9 (opt5)
aggagagucccgcagucggcguccagcggcucugcuuguucgugugugugucguugcaggccuuauucaagcuuaccaugggccagaucgugaccuucuuucaagaggucccccacguuauugaagaggugaugaacaucgugcugauugcccucagcauccuggcuguccuuaaggggcuguacaauauugccacaugcggacucaucggccugaucacguuccuucugcucugugggagauccugcucuagcaaccuguauaaaggaguguacgaacugcagucccucgaccugaauauggagacccuuaacaugacaaugccucugucuuguaccaagaauaacagccaucacuauauucggguuggcaaugauacagggcucgaacugacccuuacaaacaccuccauccugaaucauaaauuuugcaaccucucugacgcgcacaagaaagaucuguacgaccaugcucugaugagcauuaucuccacguuccaccucagcauuccgaauuuuaaccaguaugaggccaugucuugugauuucaauggaggcaagaucuccgugcaguacaaccugagccacucuuaugccauugacgcugccaaucauugcggcaccgucgcuaacgggauccuucaaacauuuaugcgcauggccuggggaggcuccuacaucgcgcuggauagcggguguggaaacugggacugcauuaugaccucuuaccaguaucucaucauucagaauacaaccugggagaaccacugucaguucuccagacccagcccuaucggcuaccuggggcuucugucccaacggacgcgcgauauuuauaucucuagacggcuccugggaacauuuaccuggacacugagcgacuccgaaggcaaugccacccccggcggguacugccucacccgcuggaugcugaucgaggcugaacuuaaguguuucggaaacacagccguggcuaaaugcaaugagaagcaugaugaggaauuuugcgacaugcugagacucuucgauuuuaacaaacaggccauuagccggcugaagucugaggcgcagauguccauccagcuuauuaauaaagccguuaacgcucugaucaaugaccaacucauuaugaagaaccaucugcgcgacaucauguguaucccuuauugcaauuacagcaaguauugguaccugaaccacacgauuaccggcaaaacaucucuccccaaguguuggcuggugagcaauggguccuaccuuaacgaaacccacuucucugaugacaucgagcagcaggccgauaauaugauuacagaaaugcugcaaaaagaguauauggagagacagggaaagaccccucucggccuggucgaccuguucguguuuagcacguccuucuaccuuaucagcauuuuucuccggcuggugaaaaucccgacacaccgccauauugucgggaagcccugcccuaaaccccacagacugaaccauaugggaaucuguucuugcggccucuauaagcagccuggcguucccgugcgguggaagcgcugaggacuagucccuguucccagagcccacuuuuuuuucuuuuuuugaaauaaaauagccugucuuucagaucucaaaggcucuuuucagagccaccaaaaaaaaaaaaaaaaaaaaaaaaaaaaaaaaaaaaaaaaaaaaaaaaaaaaaaaaaaaaaaaaagaauu

SEQ ID NO: 35082 - RNA, 1714 nt, Artificial Sequence
  mRNA product Design a-1 (hSL-A64-N5) comprising derived and/or modified sequence from LASV(Togo/2016/7082;Clade VI)__AMR44577__GPCmut9 (opt5)
aggagagucccgcagucggcguccagcggcucugcuuguucgugugugugucguugcaggccuuauucaagcuuaccaugggccagaucauuaccuucuuucaagaggugccccacgucaucgaagagguuaugaacauugugcugaucgcccucagccugcuugcuauucugaaggggguguacaaugucgccacaugcggaaucaucggccucgugacguuccuguuucuuugugggagauccugcucucugauuuauaaaggaagcuacgaacuccagacccuggagcugaacauggaaacacucaauaugaccaugccucuguccuguacaaagaacucuagccaucacuauauccggguuggcaaugagaccgggcuugagcugacacucaccaacacguccauuaucaaucauaaauucugcaaccugucugacgcgcacaagcgcaaucuuuacgaucaugcucugaugagcauucucuccaccuuucaccugagcaucccgaacuucaaucaguaugaagccaugucuugugacuuuaacggaggcaaaauuuccgugcaguacaaucugagccacgccuaugcugucgaugccgcugagcauugcggcacaguggccaacgggguucuccaaaccuucaugagaauggcguggggaggcucuuacaucgcccuggacuccggguguggaaauugggauugcaucaugacaagcuaccaguaucuuauuauccagaacaccacgugggaagaccacugucaguuuucucggcccuccccuauuggcuaccuggggcuccugagccaacgcacaagagauaucuauauuucccggcgccuucugggaaccuucacauggacccucucugacagcgagggcaacgagacccccggcggguacugccugacaagauggaugcugaucgaagcugagcucaaguguuuuggaaauacggccguggcuaagugcaacgaaaaacaugaugaggaguucugcgacaugcugcggcuuuuugauuucaauaagcaggccauccagcgccugaaauccgaagcgcagaugagcauucaacucaucaacaaggccgucaaugcucugauuaacgaccagcuuaucaugaaaaaucaccugagagauaugauguguauuccuuauugcaacuacucuaaguauugguaccucaaucacaccuccagcggccggacaucucugcccaaguguuggcuggugagcaacggguccuaccucaaugagacccauuucucugacgacaucgaacagcaagccgauaacaugaucacagagaugcugcagaaagaauauauugaccgccagggaaagaccccucuuggccugguggaucucuuugucuucagcacguccuuuuaccugaucagcauuuuccugcaccuuaucaaaauuccgacacauagacacaucguugggaagcccugcccuaaaccccaucggcucaaucacaugggaauuuguucuugcggccuguauaagcagccuggcgugcccacccgcuggaaaagaugaggacuagucccuguucccagagcccacuuuuuuuucuuuuuuugaaauaaaauagccugucuuucagaucucaaaggcucuuuucagagccaccaaaaaaaaaaaaaaaaaaaaaaaaaaaaaaaaaaaaaaaaaaaaaaaaaaaaaaaaaaaaaaaaagaauu

SEQ ID NO: 35083 - RNA, 1714 nt, Artificial Sequence
  mRNA product Design a-1 (hSL-A64-N5) comprising derived and/or modified sequence from LASV(KAK-428;Clade n.d. (VII))__ANH09740__GPCmut9 (opt5)
aggagagucccgcagucggcguccagcggcucugcuuguucgugugugugucguugcaggccuuauucaagcuuaccaugggccagaucgugaccuucuuucaagaggucccccacguuauugaagaggugaugaacaucgugcugauugcccucagccugcuugcuauccugaaggggcucuacaauuucgccacaugcggagucauuggccugaucacguuucuucugcucugugggagauccugcucugcgaccuauaaaggacaguacgaacugcagacacuggagcucaacauggaaagccugaauaugaccaugccucuuuccuguacaaagaacaauucucaucacuauauccgggcuggcaacaauaccgggcuggagcucacacugaccaacacgagcauuaucucccauaaauucugcaaucuuucugacgcccacaagaaaaaccuguacgaucauacccucaugagcauuaucacaaccuuucaccuguccauuccgaauuucaaccaguaugaggccaugagcugugacuuuaauggaggcaagaucucuauucaauacaaccugucccacagcuaugcuggcgaugccgcucagcauugcgggacaguggccaauggaguucuccagaccuucaugcgcauggcguggggcgggucuuaccuggcccuugacuccggauguagaggcugggauugcaucaucagcucuuaccaguaucugauuauccaaaacacgacaugggacgaucacugucaguuuucccggcccagcccuauuggguaccucggauucgugucccagaagacccgcgacaucuauauuucuagacggcugcuuggcacauuuaccuggacccugagcgauuccgaaggccaugacaugcccgggggauacugccucacacgcuggaugcugaucgaggcugaucugaaauguuucggcaacacggccgucgcuaagugcaaugaaaaacacgacgaggaguuuugcgauauguggagacucuucgacuucaacaagcaggccauccaacggcugaaagcggaagcccagaugaauauucagcuuaucaacaaggcugugaaugcccugauuaacgaccaacucaugaugaagaaucaucugcgcgauaucauguguauuccuuauugcaacuacagcaaauuuugguaucuuaauaacaccacaaccgggagaacaucucugccccgguguuggcucaucuccaauggaagcuaccugaacgagacccacuucucugacgauaucgaacagcaggcugacaauaugauuacggagaugcugcagaaggaauacauggaucgccaaggcaaaacaccucucgggcugguugaccuuuuuguguucagcaccuccuuuuaucugaucaccauuuuccuccaccuggucaagaucccgacacauagacacauugugggaaaacccugcccuaagccccaucggcugaaccacaugggcaucuguucuugcggccuuuacaaacagccuggggugcccguccgcuggaagagaugaggacuagucccuguucccagagcccacuuuuuuuucuuuuuuugaaauaaaauagccugucuuucagaucucaaaggcucuuuucagagccaccaaaaaaaaaaaaaaaaaaaaaaaaaaaaaaaaaaaaaaaaaaaaaaaaaaaaaaaaaaaaaaaaagaauu

SEQ ID NO: 35084 - RNA, 1714 nt, Artificial Sequence; identical to SEQ ID NO: 35078
  mRNA product Design a-1 (hSL-A64-N5) comprising derived and/or modified sequence from LASV(Pinneo-NIG-1969;Clade I)__AIT17836__GPCmut9 (opt5)

SEQ ID NO: 35085 - RNA, 1714 nt, Artificial Sequence
  mRNA product Design a-1 (hSL-A64-N5) comprising derived and/or modified sequence from LASV(ISTH0009-NIG-2011;Clade II)__AIT17404__GPCmut9 (opt5)
aggagagucccgcagucggcguccagcggcucugcuuguucgugugugugucguugcaggccuuauucaagcuuaccaugggccagaucauuaccuucuuucaagaggugccccacgucaucgaagagguuaugaacauugugcugaucgcccucagccugcuugcuauucugaaggggaucuacaauguggccacaugcggacucuucggccuggucuccuuucuucugcucugugggagaucuugcagcacgaccuauaaaggaguguacgaacugcagacacuggagcucgacauggcgucccugaacaugaccaugccucuuucuuguacaaagaauaacagccaucacuauaucaugguuggcaaugaaaccgggcuggagcucacacugaccaacacguccauuaucaaucauaaauucugcaaccuuucugaugcucacaagaaaaaucuguacgaccaugcccucaugagcauuaucuccaccuuucaccugagcauuccgaacuucaaucaguaugaggccaugucuugugauuuuaacggaggcaagaucuccgugcaguacaaucugagccacgcuuaugccgucgacgcugccaaccauugcggcacaauugcgaauggggugcuccaaaccuucaugcggauggccuggggaggcucuuacaucgcucuggauuccggguguggaagcugggacugcaucaugacaucuuaccaguaucuuauuauccagaacaccacgugggaagaucacugucaguuuucccgccccagcccuauuggcuaccuggggcuccugucccaaagaacacgggacaucuauauuucucgcagacuucugggaaccuucacauggacccucagcgauuccgagggcaacgaaacccccggcggguacugccugacacgguggaugcugaucgaggccgagcucaaguguuuuggaaauacggcuguugccaaaugcaacgaaaagcaugacgaggaguucugcgauaugcugcgccuuuuugacuucaauaaacaggcgaucagacggcugaagaccgaagcccagaugagcauucagcucaucaacaaagcugugaaugcccugauuaacgaucaacuuaucaugaagaaucaucugcgcgacauuauguguaucccuuauugcaacuacucuaaguauugguaccucaaucacacagucaccggcaaaacaucccugcccagauguuggcuggugagcaacgggucuuaccucaaugaaacccacuucagcgacgauaucgagcagcaggcugacaacaugauuacggagcugcuucaaaaggaauauauggaucggcagggaaaaacaccucugggccucguggaccuguuugucuucuccaccucuuuuuaccugaucagcauuuuccuucaccucaucaagauuccgacccaucgccacaucacagggaaacccugcccuaagccccauagacugaaucacaugggaauuuguuccugcggccuguauaaacacccuggcguucccgugaaguggaagcggugaggacuagucccuguucccagagcccacuuuuuuuucuuuuuuugaaauaaaauagccugucuuucagaucucaaaggcucuuuucagagccaccaaaaaaaaaaaaaaaaaaaaaaaaaaaaaaaaaaaaaaaaaaaaaaaaaaaaaaaaaaaaaaaaagaauu

SEQ ID NO: 35086 - RNA, 1714 nt, Artificial Sequence
  mRNA product Design a-1 (hSL-A64-N5) comprising derived and/or modified sequence from LASV(ISTH2010-NIG-2012;Clade II)__AIT17482__GPCmut9 (opt5)
aggagagucccgcagucggcguccagcggcucugcuuguucgugugugugucguugcaggccuuauucaagcuuaccaugggccagaucauuaccuucuuucaagaggugccccacgucaucgaagagguuaugaacauugugcugaucgcccucagccugcuugcuauucugaaggggaucuacaauguggccacaugcggacucuucggccuggucuccuuucuucugcucugugggagaucuugcagcacgaccuauaaaggaguguacgaacugcagacacuggagcucgacauggcgucccugaacaugaccaugccucuuucuuguacaaagaauaacagccaucacuauaucaugguuggcaaugaaaccgggcuggagcucacacugaccaacacguccauuaucaaucauaaauucugcaaccuuucugaugcucacaagaaaaaucuguacgaccaugcccucaugagcauuaucuccaccuuucaccugagcauuccgaacuucaaucaguaugaggccaugucuugugauuuuaacggaggcaagaucuccgugcaguacaaucugagccacgcuuaugccgucgacgcugccaaccauugcggcacaauugcgaauggggugcuccaaaccuucaugcggauggccuggggaggcucuuacaucgcucuggauuccggguguggaagcugggacugcaucaugacaucuuaccaguaucuuauuauccagaacauuaccugggaagaucacugucaguuuucccgccccagcccuaucggcuaccuggggcuccugucccaaagaacgcgggacauuuauaucucucgcagacuucugggaacauucaccuggacacucagcgauuccgagggcaacgaaacccccggcggguacugccugacccgguggaugcugaucgaggccgagcucaaguguuuuggaaauacagcuguugccaaaugcaacgaaaagcaugacgaggaguucugcgauaugcugcgccuuuuugacuucaauaaacaggcgauuagacggcugaagacggaagcccagaugagcauccagcucauuaacaaagcugugaaugcccugaucaacgaucaacuuauuaugaagaaucaucugcgcgacaucauguguaucccuuauugcaacuacucuaaguauugguaccucaaucacaccgucacaggcaaaaccucccugcccagauguuggcuggugagcaacgggucuuaccucaaugaaacacacuucagcgacgauauugagcagcaggcugacaacaugaucaccgagcugcuucaaaaggaauauauugaucggcagggaaaaacgccucugggccucguggaccuguuugucuucuccacaucuuuuuaccugaucagcauuuuccuucaccucguuaagaucccgacccaucgccacgugguggggaaacccugcccuaagccccauagacugaaucacaugggaauuuguuccugcggccuguauaaacacccuggcguccccgugaaguggaagcggugaggacuagucccuguucccagagcccacuuuuuuuucuuuuuuugaaauaaaauagccugucuuucagaucucaaaggcucuuuucagagccaccaaaaaaaaaaaaaaaaaaaaaaaaaaaaaaaaaaaaaaaaaaaaaaaaaaaaaaaaaaaaaaaaagaauu

SEQ ID NO: 35087 - RNA, 1714 nt, Artificial Sequence
  mRNA product Design a-1 (hSL-A64-N5) comprising derived and/or modified sequence from LASV(Lassa virus/H.sapiens-wt/NGA/2015/ISTH_0543;Clade II)__AVO03639__GPCmut9 (opt5)
aggagagucccgcagucggcguccagcggcucugcuuguucgugugugugucguugcaggccuuauucaagcuuaccaugggccagaucauuaccuucuuucaagaggugccccacgucaucgaagagguuaugaacauugugcugaucgcccucagccugcuugcuauucugaaggggaucuacaauguggccacaugcggacucuucggccuggucuccuuucuucugcucugugggagaucuugcagcacgaccuauaaaggaguguacgaacugcagacacuggagcucgacauggcgaaccugaauaugaccaugccucuuuccuguacaaagaacaauucucaucacuauaucaugguuggcaacgaaaccgggcuggagcucacacugaccaauacgagcauuaucaaccauaaauucugcaaucuuuccgaugcucacaagaaaaaccuguacgaccaugcccucaugucuauuaucagcaccuuucaccuguccauuccgaauuucaaccaguaugaggccaugagcugugauuuuaauggaggcaagaucucugugcaguacaaccugucccacacauaugcugucgacgccgcuaaucauugcggcaccauugccaacggggugcuccaaacauucaugcggauggcguggggaggcagcuacaucgcccuggauucuggguguggauccugggacugcaucaugaccagcuaccaguaucuuguuauucagaacacgacaugggaagaucacugucaguuuucucgccccuccccuaucggcuaccuggggcuccugagccaaagaacccgggacauuuauaucucccgcagacuucugggaacauucaccuggacccucucugauagcgagggcaaugaaacacccggcggguacugccugacgcgguggaugcugauugaggcugagcucaaguguuuuggaaacaccgccguggcuaaaugcaaugaaaagcaugacgaggaguucugcgauaugcugcgccuuuuugacuucaacaaacaggccaucagacggcugaagacagaagcgcagauguccauccagcucauuaauaaagccgucaacgcucugaucaaugaucaacuuauuaugaagaaccaucugcgcgacaucauguguauuccuuauugcaauuacagcaaguauugguaccucaaccacaccgugacaggcaaaaccucucugcccagauguuggcugguguccaaugggagcuaccucaacgaaacgcacuucucugacgauaucgagcagcaggccgacaauaugaucacagagcugcuucaaaaggaauauauugaucggcagggaaaaaccccucugggccucgucgaccuguuuguuuucagcaccuccuuuuaccugaucucuauuuuccuucaccucgugaagaucccgacacaucgccacauuaccgggaaacccugcccuaagccccauagacugaaccacaugggaaucuguagcugcggccuguauaaacacccuggcgugcccgucaaguggaagcggugaggacuagucccuguucccagagcccacuuuuuuuucuuuuuuugaaauaaaauagccugucuuucagaucucaaaggcucuuuucagagccaccaaaaaaaaaaaaaaaaaaaaaaaaaaaaaaaaaaaaaaaaaaaaaaaaaaaaaaaaaaaaaaaaagaauu

SEQ ID NO: 35088 - RNA, 1714 nt, Artificial Sequence
  mRNA product Design a-1 (hSL-A64-N5) comprising derived and/or modified sequence from LASV(Lassa virus/H.sapiens-wt/NGA/2016/ISTH_0009;Clade II)__AVO03571__GPCmut9 (opt5)
aggagagucccgcagucggcguccagcggcucugcuuguucgugugugugucguugcaggccuuauucaagcuuaccaugggccagaucauuaccuucuuucaagaggugccccacgucaucgaagagguuaugaacauugugcugaucgcccucagccugcuugcuauucugaaggggaucuacaauguggccacaugcggacuccugggccuugucuccuuccugcuccugugugggagaucuugcagcacgaccuauaaaggaguguacgaacugcagacacucgagcuggacauggcgucccuuaacaugaccaugccucugucuuguacaaagaauaacagccaucacuauaucaugguuggcaaugaaaccgggcucgagcugacacuuaccaacacguccauuaucaaucauaaauuuugcaaccugucugaugcucacaagaaaaaucucuacgaccaugcccugaugagcauuaucuccaccuuccaccugagcauuccgaacuuuaaucaguaugaggccaugucuugugauuucaacggaggccggaucuccgugcaguacaaucucagccacucuuaugcugucgacgccgcuaaccauugcggcacaauugccaauggggugcugcaaaccuuuaugcgcauggcguggggaggcuccuacaucgcccuugauagcggguguggaucuugggacugcaucaugacauccuaccaguaucugauuauccagaacaccacgugggaagaucacugucaguucagcagacccuccccuauuggcuaccucgggcugcuuucucaacggacacgcgacaucuauauuagcagacggcugcucggaaccuuuacauggacccuguccgauagcgagggcaacgaaacccccggcggguacugccugacacgcuggaugcucaucgaggcugagcugaaguguuucggaaauacggccguugcuaagugcaacgaaaaacaugacgaggaauuuugcgauaugcuuagacuguucgacuuuaauaagcaggccauccggcgccucaaaaccgaggcgcagaugucuauucagcugaucaacaaggccgugaaugcucuuauuaacgaucaacugaucaugaaaaaucaccucagagacauuauguguaucccuuauugcaacuacuccaaguauugguaccugaaucacacagucaccggcaagacaagccugccccgguguuggcucgugucuaacgggagcuaccugaaugaaacccauuucuccgacgauaucgagcagcaggccgacaacaugauuacggagcuucugcaaaaagaauauaucgaucgccagggaaagacaccucucggccugguggaccuguucgucuuuucuaccagcuucuaccuuauuuccaucuuucuccaccugguuaaaauuccgacccauagacacaucacagggaagcccugcccuaaaccccaucggcugaaucacaugggaauuuguagcugcggccucuauaaccacccuggcgugcccgugaaguggaaacgcugaggacuagucccuguucccagagcccacuuuuuuuucuuuuuuugaaauaaaauagccugucuuucagaucucaaaggcucuuuucagagccaccaaaaaaaaaaaaaaaaaaaaaaaaaaaaaaaaaaaaaaaaaaaaaaaaaaaaaaaaaaaaaaaaagaauu

SEQ ID NO: 35089 - RNA, 1714 nt, Artificial Sequence
  mRNA product Design a-1 (hSL-A64-N5) comprising derived and/or modified sequence from LASV(Lassa virus/H.sapiens-wt/NGA/2016/ISTH_0017;Clade II)__AVO03567__GPCmut9 (opt5)
aggagagucccgcagucggcguccagcggcucugcuuguucgugugugugucguugcaggccuuauucaagcuuaccaugggccagaucauuaccuucuuucaagaggugccccacgucaucgaagagguuaugaacauugugcugaucgcccucagccugcuugcuauucugaaggggaucuacaauguggccacaugcggacucuucggccuggucuccuuucuucugcucugugggagaucuugcagcacgaccuauaaaggaguguacgaacugcagacacuggagcucgacauggcgucccugaacaugaccaugccucuuucuuguacaaagaauaacagccaucacuauaucaugguuggcaaugaaaccgggcuggagcucacacugaccaacacguccauuaucaaucauaaauucugcaaccuuucugaugcucacaagaaaaaucuguacgaccaugcccucaugagcauuaucuccaccuuucaccugagcauuccgaacuucaaucaguaugaggccaugucuugugauuuuaacggaggcaagaucuccgugcaguacaaucugagccacacauaugcuauugacgccgcuaaccauugcggcaccaucgccaaugggguccuccaaacauucaugcggauggcguggggaggcucuuacaucgcccuggauuccggguguggaagcugggacugcauuaugaccucuuaccaguaucuuaucauucagaacacgacaugggaagaucacugucaguuuucccgccccagcccuaucggcuaccuggggcuccugucccaaagaacccgggacauuuauaucucucgcagacuucugggaacauucaccuggacccucagcgauuccgagggcaacgaaacacccggcggguacugccugacgcgguggaugcugaucgaggcugagcucaaguguuuuggaaauaccgccguggcuaaaugcaacgaaaagcaugacgaggaguucugcgauaugcugcgccuuuuugacuucaauaaacaggccauuagacggcugaagacagaagcgcagaugagcauccagcucauuaacaaagccguuaaugcucugaucaacgaucaacuuauuaugaagaaucaucugcgcgacaucauguguaucccuuauugcaacuacucuaaguauugguaccucaaucacaccgugacaggcaaaaccucccugcccagauguuggcuggucagcaacgggucuuaccucaaugaaacgcacuucagcgacgauauugagcagcaggccgacaacaugaucacagagcugcuucaaaaggaauauauggaucggcagggaaaaaccccucugggccucguggaccuguuuguguucuccaccucuuuuuaccugauuagcaucuuccuucaccucguccgcauuccgacacauagacacguuaucgggaagcccugcccuaaaccccaucggcugaaucacaugggaauuuguuccugcggccuguauaagcacccuggcgugcccgugaaauggaagcgcugaggacuagucccuguucccagagcccacuuuuuuuucuuuuuuugaaauaaaauagccugucuuucagaucucaaaggcucuuuucagagccaccaaaaaaaaaaaaaaaaaaaaaaaaaaaaaaaaaaaaaaaaaaaaaaaaaaaaaaaaaaaaaaaaagaauu

SEQ ID NO: 35090 - RNA, 1714 nt, Artificial Sequence
  mRNA product Design a-1 (hSL-A64-N5) comprising derived and/or modified sequence from LASV(Lassa virus/H.sapiens-wt/NGA/2018/ISTH_0959;Clade II)__AVV65099__GPCmut9 (opt5)
aggagagucccgcagucggcguccagcggcucugcuuguucgugugugugucguugcaggccuuauucaagcuuaccaugggccagaucauuaccuucuuucaagaggugccccacgucaucgaagagguuaugaacauugugcugaucgcccucagccugcuugcuauucugaaggggaucuacaauguggucacaugcggacucuucggccugguguccuuucuucugcucugugggagaucuugcagcacgaccuauaaaggaguuuacgaacugcagacacuggagcucgacauggccucccugaacaugaccaugccucuuucuuguacaaagaauaacagccaucacuauaucauggugggcaaugaaaccgggcuggagcucacacugaccaacacguccauuaucaaucauaaauucugcaaccuuucugaugcgcacaagaaaaaucuguacgaccaugcucucaugagcauuaucuccaccuuucaccugagcauuccgaacuucaaucaguaugaggccaugucuugugauuuuaacggaggcaagaucuccguccaguacaaucugagccacgccuaugcuauugacgccgcuaaccauugcggcacaaucgccaauggggugcuccaaaccuucaugcggauggcguggggaggcucuuacaucgcccuggauuccggguguggaagcugggacugcauuaugacaucuuaccaguaucuuaucauucagaacaccacgugggaagaucacugucaguuuucccgccccagcccuaucggcuaccuggggcuccugucccaaagaacacgggacauuuauaucucucgcagacuucugggaaccuucacauggacccucagcgauuccgagggcaacgaaacccccggcggguacugccugacacgguggaugcugaucgaggcugagcucaaguguuuuggaaauacggccguugcuaaaugcaacgaaaagcaugacgaggaguucugcgauaugcugcgccuuuuugacuucaauaaacaggccauuagacggcugaagaccgaagcgcagaugagcauccagcucauuaacaaagccgugaaugcucugaucaacgaucaacuuauuaugaagaaucaucugcgcgacaucauguguaucccuuauugcaacuacucuaaguauugguaccucaaucacacagucaccggcaaaacaucccugcccagauguuggcuggugagcaacgggucuuaccucaaugaaacccacuucagcgacgauauugagcagcaggccgacaacaugaucacggagcugcuucaaaaggaauauauugaucggcagggaaaaacaccucugggccucguggaccuguuugucuucuccaccucuuuuuaccugaucagcauuuuccuucaccucguuaagaucccgacccaucgccacgugauugggaaacccugcccuaagccccauagacugaaucacaugggaaucuguuccugcggccuguauaaacacccuggcgugcccgucaaguggaagcggugaggacuagucccuguucccagagcccacuuuuuuuucuuuuuuugaaauaaaauagccugucuuucagaucucaaaggcucuuuucagagccaccaaaaaaaaaaaaaaaaaaaaaaaaaaaaaaaaaaaaaaaaaaaaaaaaaaaaaaaaaaaaaaaaagaauu

SEQ ID NO: 35091 - RNA, 1714 nt, Artificial Sequence
  mRNA product Design a-1 (hSL-A64-N5) comprising derived and/or modified sequence from LASV(LASV003-NIG-2008;Clade II)__AIT17580__GPCmut9 (opt5)
aggagagucccgcagucggcguccagcggcucugcuuguucgugugugugucguugcaggccuuauucaagcuuaccaugggccagaucauuaccuucuuucaagaggugccccacgucaucgaagagguuaugaacauugugcugaucgcccucagccugcuugcuauucugaaggggaucuacaauguggccacaugcggacucuucggccuggucuccuuucuucugcucugugggagaucuugcagcacgaccuauaaaggaguguacgaacugcagacacuggagcucgacauggcgucccugaacaugaccaugccucuuucuuguacaaagaauaacagccaucacuauaucaugguuggcaaugaaaccgggcuggagcucacacugaccaacacguccauuaucaaucauaaauucugcaaccuuucugaugcucacaagaaaaaucuguacgaccaugcccucaugagcauuaucuccaccuuucaccugagcauuccgaacuucaaucaguaugaggccaugucuugugauuuuaacggaggcaagaucuccgugcaguacaaucugagccacacauaugcugucgacgccgcuaaccauugcggcaccauugccaauggggugcuccaaacauucaugcggauggcguggggaggcucuuacaucgcccuggauuccggguguggaagcugggacugcaucaugaccucuuaccaguaucuuauuauccagaacacgacaugggaagaucacugucaguuuucccgccccagcccuauuggcuaccuggggcuccugucccaaagaacccgggacaucuauauuucucgcagacuucugggaacauucaccuggacccucagcgauuccgagagcaacgaaacacccggcggcuacugccugacgcgguggaugcugaucgaggcugagcucaaguguuuugggaauaccgccguugcuaaaugcaacgaaaagcaugacgaggaguucugcgauaugcugcgccuuuuugacuucaauaaacaggccaucagacggcugaaggcggaagcccagaugucuauucagcucaucaacaaagcugugaaugcccugauuaacgaucaacuuaucaugaagaaucaucugcgcgacauuauguguaucccuuauugcaacuacuccaaguauugguaccucaaucacacagucaccggaagaacaagccugccccgguguuggcuggugucuaacggcagcuaccucaaugaaacccacuucuccgacgauaucgagcagcaggcugacaacaugauuacggagcugcuucaaaaagaauauauggaucgccaggggaagacaccucugggacucguggaccuguuugucuucucuaccagcuuuuaccugaucuccauuuuccuucaccucguuaaaaucccgacccauagacacgugauuggcaagcccugcccuaaaccccaucggcugaaucacauggggaucuguagcugcggacuguauaagcacccuggcgugcccgucaaauggaagcgcugaggacuagucccuguucccagagcccacuuuuuuuucuuuuuuugaaauaaaauagccugucuuucagaucucaaaggcucuuuucagagccaccaaaaaaaaaaaaaaaaaaaaaaaaaaaaaaaaaaaaaaaaaaaaaaaaaaaaaaaaaaaaaaaaagaauu

SEQ ID NO: 35092 - RNA, 1714 nt, Artificial Sequence
  mRNA product Design a-1 (hSL-A64-N5) comprising derived and/or modified sequence from LASV(LASV035-NIG-2009;Clade II)__AIT17588__GPCmut9 (opt5)
aggagagucccgcagucggcguccagcggcucugcuuguucgugugugugucguugcaggccuuauucaagcuuaccaugggccagaucauuaccuucuuucaagaggugccccacgucaucgaagagguuaugaacauugugcugaucgcccucagccugcuugcuauucugaaggggaucuacaauguggccacaugcggacucuucggccuggucuccuuucuucugcucugugggagaucuugcagcacgaccuauaaaggaguguacgaacugcagacacuggagcucgacauggcgucccugaacaugaccaugccucuuucuuguacaaagaauaacagccaucacuauaucaugguuggcaaugaaaccgggcuggagcucacacugaccaacacguccauuaucaaucauaaauucugcaaccuuucugaugcucacaagaaaaaucuguacgaccaugcccucaugagcauuaucuccaccuuucaccugagcauuccgaacuucaaucaguaugaggccaugucuugugauuuuaacggaggcaagaucuccgugcaguacaaucugagccacgcuuaugccgucgacgcugccaaccauugcggcacaauugcgaauggggugcuccaaaccuucaugcggauggccuggggaggcucuuacaucgcucuggauuccggguguggaagcugggacugcaucaugacaucuuaccaguaucuuauuauccagaacaccacgugggaagaucacugucaguuuucccgccccagcccuauuggcuaccuggggcuccugucccaaagaacacgggacaucuauauuucucgcagacuucugggaaccuucacauggacccucagcgauuccgagggcaacgaaacccccggcggguacugccugacacgguggaugcugaucgaggccgagcucaaguguuuuggaaauacggcuguugccaaaugcaacgaaaagcaugacgaggaguucugcgauaugcugcgccuuuuugacuucaauaaacaggcgaucagacggcugaaggccgaagcucagaugagcauucagcucaucaacaaagccgugaaugcucugauuaacgaucaacuuaucaugaagaaucaucugcgcgacauuauguguaucccuuauugcaacuacucuaaguauugguaccucaaucacaccgucacaggcaaaaccucccugcccagauguuggcuggugagcaacgggucuuaccucaaugaaacacacuucagcgacgauaucgagcagcaggccgacaacaugauuaccgagcugcuucaaaaggaauauaucgaucggcagggaaaaacgccucugggccucguggaccuguuugucuucuccacaucuuuuuaccugauuagcaucuuccuucaccucguuaagauuccgacccaucgccacgugaucgggaaacccugcccuaagccccauagacugaaucacaugggaauuuguuccugcggccuguauaaacacccuggcgugcccgucaaguggaagcggugaggacuagucccuguucccagagcccacuuuuuuuucuuuuuuugaaauaaaauagccugucuuucagaucucaaaggcucuuuucagagccaccaaaaaaaaaaaaaaaaaaaaaaaaaaaaaaaaaaaaaaaaaaaaaaaaaaaaaaaaaaaaaaaaagaauu

SEQ ID NO: 35093 - RNA, 1714 nt, Artificial Sequence
  mRNA product Design a-1 (hSL-A64-N5) comprising derived and/or modified sequence from LASV(LASV1000-NIG-2009;Clade II)__AIT17782__GPCmut9 (opt5)
aggagagucccgcagucggcguccagcggcucugcuuguucgugugugugucguugcaggccuuauucaagcuuaccaugggccagaucauuaccuucuuucaagaggugccccacgucaucgaagagguuaugaacauugugcugaucgcccucagccugcuugcuauucugaaggggaucuacaauguggccacaugcggacucuucggccuggucuccuuucuucugcucugugggagaucuugcagcacgaccuauaaaggaguguacgaacugcagacacuggagcucgacauggcgucccugaacaugaccaugccucuuucuuguacaaagaauaacagccaucacuauaucaugguuggcaaugaaaccgggcuggagcucacacugaccaacacguccauuaucaaucauaaauucugcaaccuuucugaugcucacaagaaaaaucuguacgaccaugcccucaugagcauuaucuccaccuuucaccugagcauuccgaacuucaaucaguaugaggccaugucuugugauuuuaacggaggcaagaucuccgugcaguacaaucugagccacacauaugcugucgacgccgcuaaccauugcggcaccauugccaauggggugcuccaaacauucaugcggauggcguggggaggcucuuacaucgcccuggauuccggguguggaagcugggacugcaucaugaccucuuaccaguaucuuauuauccagaacacgacaugggaagaucacugucaguuuucccgccccagcccuauuggcuaccuggggcuccugucccaaagaacccgggacaucuauauuucucgcagacuucugggaacauucaccuggacccucagcgauuccgagggcaacgaaacacccggcggguacugccugacgcgguggaugcugaucgaggcugagcucaaguguuuuggaaauaccgccguugcuaaaugcaacgaaaagcaugacgaggaguucugcgauaugcugcgccuuuuugacuucaauaaacaggccaucaagagacugaaaacagaagcgcagaugagcauucagcucaucaacaaggccgugaaugcucugauuaacgaucaacuuaucaugaagaaucaucugcgggacauuauguguaucccuuauugcaacuacucuaaauauugguaccucaaucacaccgucacaggcaagaccucccugccccgcuguuggcuggugagcaacgggucuuaccucaaugaaacgcacuucagcgacgauaucgagcagcaggccgacaacaugauuacagagcugcuucaaaaagaauauaucgauagacagggaaagaccccucugggccucguggaccuguuugucuucuccaccucuuuuuaccugauuagcaucuuccuucaccucguuaaaauuccgacacaucggcacgugguggggaagcccugcccuaaaccccaucgccugaaucacaugggaaucuguuccugcggccuguauaagcacccuggcguccccgugaaguggaaaagaugaggacuagucccuguucccagagcccacuuuuuuuucuuuuuuugaaauaaaauagccugucuuucagaucucaaaggcucuuuucagagccaccaaaaaaaaaaaaaaaaaaaaaaaaaaaaaaaaaaaaaaaaaaaaaaaaaaaaaaaaaaaaaaaaagaauu

SEQ ID NO: 35094 - RNA, 1714 nt, Artificial Sequence
  mRNA product Design a-1 (hSL-A64-N5) comprising derived and/or modified sequence from LASV(LASV221-NIG-2010;Clade II)__AIT17624__GPCmut9 (opt5)
aggagagucccgcagucggcguccagcggcucugcuuguucgugugugugucguugcaggccuuauucaagcuuaccaugggccagaucauuaccuucuuucaagaggugccccacgucaucgaagagguuaugaacauugugcugaucgcccucagccugcuugcuauucugaaggggaucuacaauguggccacaugcggacucuucggccuggucuccuuucuucugcucugugggagaucuugcagcacgaccuauaaaggaguguacgaacugcagacacuggagcucgacauggcgucccugaacaugaccaugccucuuucuuguacaaagaauaacagccaucacuauaucaugguuggcaaugaaaccgggcuggagcucacacugaccaacacguccauuaucaaucauaaauucugcaaccuuucugaugcucacaagaaaaaucuguacgaccaugcccucaugagcauuaucuccaccuuucaccugagcauuccgaacuucaaucaguaugaggccaugucuugugauuuuaacggaggcaagaucuccgugcaguacaaucugagccacacauaugcuauugacgccgcuaaccauugcggcaccaucgccaaugggguccuccaaacauucaugcggauggcguggggaggcucuuacaucgcccuggauuccggguguggaagcugggacugcauuaugaccucuuaccaguaucuuaucauucagaacacgacaugggaagaucacugucaguuuucccgccccagcccuaucggcuaccuggggcuccugucccaaagaacccgggacauuuauaucucucgcagacuucugggaacauucaccuggacccucagcgauuccgagggcaacgaaacacccggcggguacugccugacgcgguggaugcugaucgaggcugagcucaaguguuuuggaaauaccgccguggcuaaaugcaacgaaaagcaugacgaggaguucugcgauaugcugcgccuuuuugacuucaauaaacaggccauuagacggcugaagacagaagcgcagaugagcauccagcucauuaacaaagccguuaaugcucugaucaacgaucaacuuauuaugaagaaucaucugcgcgacaucauguguaucccuuauugcaacuacucuaaguauugguaccucaaucacaccgugacaggcaaaaccucccugcccagauguuggcuggucagcaacgggucuuaccucaaugaaacgcacuucagcgacgauauugagcagcaggccgacaacaugaucacagagaugcugcaaaaggaauauauggaucggcagggaaaaaccccucuuggccugguggaccucuuuguguucuccaccucuuuuuaccugauuagcaucuuccugcaccuugucaagauuccgacacaucgccacguuaucgggaaacccugcccuaagccccauagacucaaucacaugggaauuuguuccugcggccuguauaaacacccuggcgugcccgugaaguggaagcggugaggacuagucccuguucccagagcccacuuuuuuuucuuuuuuugaaauaaaauagccugucuuucagaucucaaaggcucuuuucagagccaccaaaaaaaaaaaaaaaaaaaaaaaaaaaaaaaaaaaaaaaaaaaaaaaaaaaaaaaaaaaaaaaaagaauu

SEQ ID NO: 35095 - RNA, 1714 nt, Artificial Sequence
  mRNA product Design a-1 (hSL-A64-N5) comprising derived and/or modified sequence from LASV(LASV237-NIG-2010;Clade II)__AIT17638__GPCmut9 (opt5)
aggagagucccgcagucggcguccagcggcucugcuuguucgugugugugucguugcaggccuuauucaagcuuaccaugggccagaucauuaccuucuuucaagaggugccccacgucaucgaagagguuaugaacauugugcugaucgcccucagccugcuugcuauucugaaggggaucuacaauguggccacaugcggacucuucggccuggucuccuuucuucugcucugugggagaucuugcagcacgaccuauaaaggaguguacgaacugcagacacuggagcucgacauggcgucccugaacaugaccaugccucuuucuuguacaaagaauaacagccaucacuauaucaugguuggcaaugaaaccgggcuggagcucacacugaccaacacguccauuaucaaucauaaauucugcaaccuuucugaugcucacaagaaagaccuguacgaucaugcccucaugagcauuaucuccaccuuucaccugagcauuccgaauuucaaccaguaugaggccaugucuugugacuuuaauggaggcaagaucuccgugcaguacaaccugagccacacauaugcugucgaugccgcuaaucauugcggcaccauugccaacggggugcuccaaacauucaugcggauggcguggggaggcucuuacaucgcccuggacuccggguguggaagcugggauugcaucaugaccucuuaccaguaucuuauuauccagaauacgacaugggaagaccacugucaguuuucccgccccagcccuauuggcuaccuggggcuccugucccaaagaacccgggauaucuauauuucucgcagacuucugggaacauucaccuggacccucagcgacuccgagggcaacgaaacacccggcggguacugccugacgcgguggaugcugaucgaggcugagcucaaguguuuuggaaacaccgccguugcuaaaugcaaugaaaagcaugaugaggaguucugcgacaugcugcgccuuuuugauuucaacaaacaggccaucagacggcugaagacagaagcgcagaugagcauucagcucaucaauaaagccgugaacgcucugauuaaugaccaacuuaucaugaagaaccaucugcgcgacauuauguguaucccuuauugcaauuacucuaaguauugguaccucaaccacaccgucacaggcaaaaccucccugcccagauguuggcuggugagcaaugggucuuaccucaacgaaacgcacuucagcgaugacaucgagcagcaggccgauaauaugauuacagagcugcuucaaaaggaauauauggaccggcagggaaaaaccccucugggccucguggaucuguuugucuucuccaccucuuuuuaccugaucagcauuuuccuucaccucaucaagauuccgacacaucgccacaucaccgggaaacccugcccuaagccccauagacugaaccacaugggaauuuguuccugcggccuguauaaacacccuggcguucccgugaaguggaagcggugaggacuagucccuguucccagagcccacuuuuuuuucuuuuuuugaaauaaaauagccugucuuucagaucucaaaggcucuuuucagagccaccaaaaaaaaaaaaaaaaaaaaaaaaaaaaaaaaaaaaaaaaaaaaaaaaaaaaaaaaaaaaaaaaagaauu

SEQ ID NO: 35096 - RNA, 1714 nt, Artificial Sequence
  mRNA product Design a-1 (hSL-A64-N5) comprising derived and/or modified sequence from LASV(LASV253-NIG-2011;Clade II)__AIT17670__GPCmut9 (opt5)
aggagagucccgcagucggcguccagcggcucugcuuguucgugugugugucguugcaggccuuauucaagcuuaccaugggccagaucauuaccuucuuucaagaggugccccacgucaucgaagagguuaugaacauugugcugaucgcccucagccugcuugcuauucugaaggggaucuacaauguggccacaugcggacucuucggccuggucuccuuucuucugcucugugggagaucuugcagcacgaccuauaaaggaguguacgaacugcagacacuggagcucgacauggcgucccugaacaugaccaugccucuuucuuguacaaagaauaacagccaucacuauaucaugguuggcaaugaaaccgggcuggagcucacacugaccaacacguccauuaucaaucauaaauucugcaaccuuucugaugcucacaagaaaaaucuguacgaccaugcccucaugagcauuaucuccaccuuucaccugagcauuccgaacuucaaucaguaugaggccaugucuugugauuuuaacggaggcaagaucuccgugcaguacaaucugagccacacauaugcugucgacgccgcuaaccauugcggcaccauugccaauggggugcuccaaacauucaugcggauggcguggggaggcucuuacaucgcccuggauuccggguguggaagcugggacugcaucaugaccucuuaccaguaucuuauuauccagaacacgacaugggaagaucacugucaguuuucccgccccagcccuauuggcuaccuggggcuccugucccaaagaacccgggacaucuauauuucucgcagacuucugggaacauucaccuggacccucagcgauuccgagggcaacgaaacacccggcggguacugccugacgcgguggaugcugaucgaggcugagcucaaguguuuuggaaauaccgccguugcuaaaugcaacgaaaagcaugacgaggaguucugcgauaugcugcgccuuuuugacuucaauaaacaggccaucagacggcugaaggcggaagcccagaugagcauucagcucaucaacaaagcugugaaugcccugauuaacgaucaacuuaucaugaagaaucaucugcgcgacauuauguguaucccuuauugcaacuacucuaaguauugguaccucaaucacacagucaccggcagaacaucccugccccgguguuggcuggugagcaacgggucuuaccucaaugaaacccacuucagcgacgauaucgagcagcaggcugacaacaugauuacggagcugcuucaaaaagaauauaucgaucgccagggaaagacaccucugggccucguggaccuguuugucuucuccaccucuuuuuaccugauuagcaucuuccuucaccucguuaaaauuccgacccauagacacaucauugggaagcccugcccuaaaccccaucggcugaaucacaugggaaucuguuccugcggccuguauaagcacccuggcgugcccgugaaauggaagcgcugaggacuagucccuguucccagagcccacuuuuuuuucuuuuuuugaaauaaaauagccugucuuucagaucucaaaggcucuuuucagagccaccaaaaaaaaaaaaaaaaaaaaaaaaaaaaaaaaaaaaaaaaaaaaaaaaaaaaaaaaaaaaaaaaagaauu

SEQ ID NO: 35097 - RNA, 1714 nt, Artificial Sequence
  mRNA product Design a-1 (hSL-A64-N5) comprising derived and/or modified sequence from LASV(LASV254-NIG-2011;Clade II)__AIT17674__GPCmut9 (opt5)
aggagagucccgcagucggcguccagcggcucugcuuguucgugugugugucguugcaggccuuauucaagcuuaccaugggccagaucauuaccuucuuucaagaggugccccacgucaucgaagagguuaugaacauugugcugaucgcccucagccugcuugcuauucugaaggggaucuacaauguggccacaugcggacucuucggccuggucuccuuucuucugcucugugggagaucuugcagcacgaccuauaaaggaguguacgaacugcagacacuggagcucgacaugaccaaccugaauaugacaaugccucuuuccuguaccaagaacaauucucaucacuauaucaugguuggcaacgaaacagggcuggagcucacccugacgaauaccagcauuaucaaccauaaauucugcaaucuuuccgaugcgcacaagaaaaaccuguacaaucaugcucucaugucuauuaucagcacauuucaccuguccauuccgaacuucaaucaguaugaggccaugagcugugacuuuaacggaggcaagaucucugugcaguacaaucugucccacagcuaugccgucgaugcugccaaccauugcggcaccauugcuaacggggugcuccaaacauucaugcggauggccuggggaggcucuuacaucgcgcuggacuccggguguggaaauugggauugcaucaugaccagcuaccaguaucuuauuauccagaacacgacaugggaagaccacugucaguuuucucgccccuccccuauuggcuaccuggggcuccugagccaaagaacccgggauaucuauauuucccgcagacuucugggaacauucaccuggacccucucugacagcgagggcaaugaaacacccggcggguacugccugacgcgguggaugcugaucgaggccgagcucaaguguuuuggaaacaccgcuguugccaaaugcaaugaaaagcaugaugaggaguucugcgacaugcugcgccuuuuugauuucaacaaacaggcuaucagacggcugaagacagaagcccaggcgaauauucagcucaucaacaaagccgugaaugcucugauuaacgaccaacuuaucaugaagaaucaucugcgcgauauuauguguaucccuuauugcaacuacuccaaguauugguaccucaaucacaccgucacaggcaaaaccagccugcccagauguuggcuggugucuaacggguccuaccucaaugaaacgcacuucagcgacgacaucgagcagcaggccgauaacaugauuacagagcugcuucaaaaggaauauauggaccggcagggaaaaaccccucugggccucguggaucuguuugucuucucuaccagcuuuuaccugaucuccauuuuccuucaccucguuaagaucccgacacaucgccacgugauugggaaacccugcccuaagccccauagacugaaccacaugggaaucuguucuugcggccuguauaaacacccuggcgugcccgucaaguggaagcggugaggacuagucccuguucccagagcccacuuuuuuuucuuuuuuugaaauaaaauagccugucuuucagaucucaaaggcucuuuucagagccaccaaaaaaaaaaaaaaaaaaaaaaaaaaaaaaaaaaaaaaaaaaaaaaaaaaaaaaaaaaaaaaaaagaauu

SEQ ID NO: 35098 - RNA, 1714 nt, Artificial Sequence
  mRNA product Design a-1 (hSL-A64-N5) comprising derived and/or modified sequence from LASV(Nig08-A19;Clade III)__ADU56618__GPCmut9 (opt5)
aggagagucccgcagucggcguccagcggcucugcuuguucgugugugugucguugcaggccuuauucaagcuuaccaugggccagaucgugaccuucuuucaagaggucccccacguuauugaagaggugaugaacaucgugcugauugcccucagcauccuggcuauucuuaaggggcuguacaauaucgccacaugcggacucaucggccuggucacguuccuucugcucuccgggagaucuuguagcaugaccuauaaaggaguguacgaacugcagacacuggagcucaacaugaauacccugaacaugacaaugccucuuuccugcaccaagaauaacucucaucacuauauuaugguuggcaaugaaacagggcuggagcucacccugacgaacaccagccuucugcaucacaaauuuuguaaucucuccgacgcgcauaagaaaaaccuguacgaucacacacugaugucuaucauuagcaccuuccaccucuccaucccgaauuuuaaccaguaugaggcuaugagcugcgacuucaauggaggcaagauuacagugcaguacaaccugucucauuccuaugccaucgaugccgcuaaucacuguggcaccgucgccaacggggugcuucaaacguuuaugcggauggcuuggggaggcagcuacauugcccuggacucugggugcggaaagugggauuguaucaugacauccuaccaguaucucaucauucagaacaccacaugggaagaccauugccaguucagccgccccucuccuaucggcuaccuggggcuucugucccaaagaacccgggauauuuauaucagccgcagacuccugggaaccuuuacauggacgcuguccgacucugagggcaaugaaacccccggcggguacugucucacacgguggaugcugauugaggcggagcuuaaaugcuucggaaacaccgccguugcuaaguguaaugaaaaacacgaugaggaauuuugcgacaugcugcgccucuucgauuuuaacaagcaggccaucagacggcugaaagcugaggcccagaugagcauccagcuuauuaauaaggcggugaacgcccugaucaaugaccaacucauuaugaagaaccaucugcgcgauaucaugugcauuccuuauuguaauuacuccaaauauugguaccugaaccacacaagcaccggcagaacgucucucccccggugcuggcuggucuccaaugggagcuaccuuaacgaaacacacuucucugacgacaucgagcagcaggcugauaauaugaucaccgagaugcugcaaaaggaauaucucgaccgccagggaaaaaccccucugggccugguggaucuuuucguguuuagcacauccuucuaccucauuucuaucuuucugcaucuggucaagauuccgacccacagacauaucguugggaaacccuguccuaagccccaccggcucaaccacaugggaauuugcagcuguggccuguauaaacagccuggcgugcccgugcgcuggaagagaugaggacuagucccuguucccagagcccacuuuuuuuucuuuuuuugaaauaaaauagccugucuuucagaucucaaaggcucuuuucagagccaccaaaaaaaaaaaaaaaaaaaaaaaaaaaaaaaaaaaaaaaaaaaaaaaaaaaaaaaaaaaaaaaaagaauu

SEQ ID NO: 35099 - RNA, 1717 nt, Artificial Sequence
  mRNA product Design a-1 (hSL-A64-N5) comprising derived and/or modified sequence from LASV(G1180-SLE-2010;Clade IV)__AIT17168__GPCmut9 (opt5)
aggagagucccgcagucggcguccagcggcucugcuuguucgugugugugucguugcaggccuuauucaagcuuaccaugggccagaucgugaccuucuuucaagaggucccccacguuauugaagaggugaugaacaucgugcugauugcccucagcauccuggcuguccuuaaggggcuguacaauuucgccacaugcggacucgugggccugcuuacguuucugcuccugugugggagauccugcaccgcgucucgguauaaaggaguuuacgaacugcagacacucgagcugaacauggaaacccuuaauaugacaaugccucugagcuguaccaagaacaauucccaucacuauauuauggugggcaacgagacagggcucgagcugacccuuacgaauaccucuaucaucaaccauaaauucugcaaucugagcgacgcucacaagaaaaaccucuacgaucaugcccugauguccauuaucucuacauuucaccugagcauuccgaauuucaaccaguaugaagccauguccugugacuuuaauggaggcaagaucagcguccaguacaaccucucucacuccuaugcuggcgaugccgcuaaucauugcgggaccguggccaacggaguucugcaaacauucaugcgcauggcguggggcgggagcuacauugcccuugacucuggauguggcuccugggauugcaucaugaccagcuaccaguaucugauuauccagaacacgacaugggaggaccacugucaguuuucuagacccuccccuaucggguaccucggacugcuuagccaacggacccgcgauauuuauaucuccagacggcugcucggcacauucaccuggacccugucugacagcgaaggcaaggauacacccgggggauacugccugacgcgcuggaugcucauugaggcugagcugaaauguuuuggcaauaccgccguggcuaagugcaacgaaaaacaugacgaggaguucugcgauaugcuuagacuguuugacuucaauaagcaggccauccagcggcucaaagcggaagcccagauguccauucaacugaucaacaaggcugucaaugcccuuaucaacgaucagcugauuaugaagaaucaccuccgcgacaucauguguauuccuuauugcaacuacagcaaauauugguaccugaaucacacaaccacagggaagaccucucugcccaaauguuggcucguguccaacggaagcuaccugaaugaaacgcauuucucugacgauaucgagcagcaagcugacaacaugauuacagagaugcuucagaaggaauauauggagagacagggcaaaaccccucuggggcucguggaucuguuugucuucagcaccuccuuuuaccugaucucuaucuuccuucaccucguuaagauuccgacacaucggcacaucgugggaaaaagcugccccaagccucaucgccugaaucacaugggcauuuguuccugcggccuguauaagcagcccggggugccugucaaauggaagagaugaggacuagucccuguucccagagcccacuuuuuuuucuuuuuuugaaauaaaauagccugucuuucagaucucaaaggcucuuuucagagccaccaaaaaaaaaaaaaaaaaaaaaaaaaaaaaaaaaaaaaaaaaaaaaaaaaaaaaaaaaaaaaaaaagaauu

SEQ ID NO: 35100 - RNA, 1717 nt, Artificial Sequence
  mRNA product Design a-1 (hSL-A64-N5) comprising derived and/or modified sequence from LASV(G1442-SLE-2011;Clade IV)__AIT17180__GPCmut9 (opt5)
aggagagucccgcagucggcguccagcggcucugcuuguucgugugugugucguugcaggccuuauucaagcuuaccaugggccagaucgugaccuucuuucaagaggucccccacguuauugaagaggugaugaacaucgugcugauugcccucagcauccuggcuguccuuaaggggcuguacaauguggccacaugcggacucauuggccugguuacguuccuucugcucugugggagauccugcaccacaacccuguauaaaggaguguacgaacugcagacacucgagcugaacauggaaacccuuaauaugacaaugccucugucuuguaccaagaacaauagccaucacuauauccgggucggcaacgagacggggcucgagcugacccuuacaaauaccuccaucauuaaccauaaauuuugcaaucugucugacgcgcacaagaaaaaccucuacgaucaugcucugaugagcaucauuuccacauuccaccugucuaucccgaauuuuaaccaguaugaagccaugagcugugacuucaauggaggcaagauuuccgugcaguacaaccucagccacucuuaugccggcgaugcugccaaucauugcgggaccguugcuaacggagugcugcaaacguuuaugcgcauggccuggggcggguccuacaucgcgcuugacagcggauguggcaacugggauugcauuaugacaucuuaccaguaucugaucauccagaauaccacaugggacgaucacugucaguucuccagacccagcccuauuggguaccucggacugcuuucucaacggacccgcgacgucuauaucuccagacggcugcucggcaccuuuacauggacgcugagcgauuccgagggcaaggacacccccgggggauacugccugacacgcuggaugcucauugaagccgagcugaaauguuucggcaacaccgcuguggccaagugcaaugagaaacaugaugaagaguuuugcgacaugcuuagacuguucgauuuuaacaagcaggcuauccagcggcucaaagccgaagcgcagaugucuauucaacugaucaauaaggccgugaacgcucuuaucaaugaccagcugauuaugaagaaccaccuccgcgacaucauguguauuccuuauugcaauuacagcaaauauugguaccugaacaauacagccaccgggaagacgucccugcccaaauguuggcucaucagcaacggaucuuaccugaaugagacacacuucuccgaugacauugaacaggaggcugauaacaugaucaccgagaugcuucaaaaggaauauauggagagacagggcaaaaccccucuggggcucgucgaccuguucguuuuuagcacaucuuucuaccugaucagcauuuuucuucaucucgugaagaucccgacccaccggcauauugugggaaaauccugccccaagccucaccgccugaaucauaugggcaucuguucuugcggccuguauaagcagcccggggucccugugagauggaaacggugaggacuagucccuguucccagagcccacuuuuuuuucuuuuuuugaaauaaaauagccugucuuucagaucucaaaggcucuuuucagagccaccaaaaaaaaaaaaaaaaaaaaaaaaaaaaaaaaaaaaaaaaaaaaaaaaaaaaaaaaaaaaaaaaagaauu

SEQ ID NO: 35101 - RNA, 1717 nt, Artificial Sequence
  mRNA product Design a-1 (hSL-A64-N5) comprising derived and/or modified sequence from LASV(G3010-SLE-2013;Clade IV)__AIT17344__GPCmut9 (opt5)
aggagagucccgcagucggcguccagcggcucugcuuguucgugugugugucguugcaggccuuauucaagcuuaccaugggccagaucgugaccuucuuucaagaggucccccacguuauugaagaggugaugaacaucgugcugauugcccucagcauccuggcuguccuuaaggggcuguacaauuucgccacaugcggacucgugggccugguuacguuucuucugcucugugggagauccugcaccacaucucuguauaaaggaguguacgaacugcagacccucgagcugaacauggaaacacuuaauaugaccaugccucugagcuguacaaagaacaauucccaucacuauauuauggucggcaacgagaccgggcucgagcugacgcuuaccaauacaucuaucaucaaccauaaauucugcaaucugagcgacgcgcacaagaaaaaccucuacaaucaugcucugauguccauuaucucuaccuuucaccugagcauuccgaacuucaaucaguaugaagccauguccugugauuuuaacggaggcaagaucagcgugcaguacaaucucucucacuccuaugccggcgacgcugccagccauugcgggacaguugcuaacggagugcugcaaaccuucaugcggauggccuggggcgggucuuacauugcgcuugauuccggauguggcaagugggacugcaucaugacgagcuaccaguaucugauuauccagaacacaaccugggaggaucacugucaguuuucucgccccuccccuaucggguaccucggacugcuuagccaaagaacacgggacauuuauaucucccgcagacugcucggcaccuucaccuggacacugucugauagcgaaggcaaagacacgcccgggggauacugccugacccgguggaugcucauugaggccgagcugaaguguuuuggcaauacagcugucgccaaaugcaacgaaaagcaugaugaggaguucugcgacaugcuucgccuguuugauuucaauaaacaggcuauccagagacucaagaccgaagcccagauguccauucaacugaucaacaaggcggugaaugcccuuaucaacgaccagcugauuaugaaaaaucaccuccgggauaucauguguauuccuuauugcaacuacagcaaguauugguaccugaaucacacaaccacggggaaaacaucucugcccaaguguuggcucguguccaacggaagcuaccugaaugaaacccauuucucugacgacaucgagcagcaagcugauaacaugauuaccgagaugcuucagaaagaauauauggagcgccagggcaagacaccucuggggcucgucgaccuguuuguuuucagcaccuccuuuuaccugaucucuaucuuccuucaccucgugaaaauuccgacacauagacacaucgugggaaagagcugccccaagccucaucggcugaaucacaugggcauuuguuccugcggccuguauaaacagcccggggucccugugcgcuggaagagaugaggacuagucccuguucccagagcccacuuuuuuuucuuuuuuugaaauaaaauagccugucuuucagaucucaaaggcucuuuucagagccaccaaaaaaaaaaaaaaaaaaaaaaaaaaaaaaaaaaaaaaaaaaaaaaaaaaaaaaaaaaaaaaaaagaauu

SEQ ID NO: 35102 - RNA, 1717 nt, Artificial Sequence
  mRNA product Design a-1 (hSL-A64-N5) comprising derived and/or modified sequence from LASV(G502-SLE-2009;Clade IV)__AIT17126__GPCmut9 (opt5)
aggagagucccgcagucggcguccagcggcucugcuuguucgugugugugucguugcaggccuuauucaagcuuaccaugggccagaucgugaccuucuuucaagaggucccccacguuauugaagaggugaugaacaucgugcugauugcccucagcauccuggcuguccuuaaggggcuguacaauuucgccacaugcggacucgugggccugcuuacguuucugcuccugugugggagauccugcaccacaggacuguauaaaggcguuuacgaacuccagacccuggagcuuaacauggaaacacugaauaugaccaugccucucucuuguacaaagaacaauagccaucacuauauuaugguggggaacgagaccggacuggagcuuacgcugaccaauacauccaucaucaaccauaaauucugcaaucucucugacgcgcacaagaaaaaccuguacgaucaugcucugaugagcauuaucuccaccuuucaccucucuauuccgaauuucaaccaguaugaagccaugagcugugacuuuaauggcggcaagaucuccguccaguacaaccugagccacucuuaugccggggaugcugccgaccauugcggaacaguggcuaauggcguucuucaaaccuucaugcggauggccuggggaggguccuacauugcgcuggauagcggcugugggcgcugggacugcaucaugacgucuuaccaguaucucauuauccagaacacaaccugggaggaucacugucaguuuuccagacccagcccuaucggauaccugggccuucugucucaacggacacgcgacauuuauaucuccagacggcuccugggcaccuucaccuggacacugagcgauuccgaagggaaggacacgcccggaggcuacugccucacccgcuggaugcugauugaggccgagcuuaaauguuuugggaacacagcuguggccaagugcaaugaaaaacaugaugaggaguucugcgacaugcugagacucuuugauuucaacaagcaggcuauccagcggcugaaagccgaagcgcagaugucuauucaacuuaucaauaaggccgucaacgcucugaucaaugaccagcucgugaugaagaaccaucugcgcgacauuauguguaucccuuauugcaauuacagcagauauugguaccugaaccacaccacaaccggacggacgucccuccccaaauguuggcuggugagcaauggcucuuaccuuaacgaaacacacuucuccgaugacauugagcagcaagccgauaauaugaucaccgagaugcugcagaaggaauauauggagcgccaggggaaaaccccucucggacuggucgaccuguuuguuuucagcacaucuuuuuaccuuauuagcaucuuccuccaccuggugaagaucccgacccauagacacauugugggcaaauccugccccaagccucaucggcugaaccacaugggcaucuguucuugcgggcucuauaaacagcccggagucccugugaaguggaagcgcugaggacuagucccuguucccagagcccacuuuuuuuucuuuuuuugaaauaaaauagccugucuuucagaucucaaaggcucuuuucagagccaccaaaaaaaaaaaaaaaaaaaaaaaaaaaaaaaaaaaaaaaaaaaaaaaaaaaaaaaaaaaaaaaaagaauu

SEQ ID NO: 35103 - RNA, 1717 nt, Artificial Sequence
  mRNA product Design a-1 (hSL-A64-N5) comprising derived and/or modified sequence from LASV(G733-SLE-2010;Clade IV)__AIT17154__GPCmut9 (opt5)
aggagagucccgcagucggcguccagcggcucugcuuguucgugugugugucguugcaggccuuauucaagcuuaccaugggccagaucgugaccuucuuucaagaggucccccacguuauugaagaggugaugaacaucgugcugauugcccucagcauccuggcuguccuuaaggggcuguacaauuucgccacaugcggaauugugggccucguuuccuuucugcuucugugugggagaucuugcacgaccagccucuauaaaggaguguacgaacugcagacacuggagcucaacauggaaacccugaauaugacaaugccucuuuccuguaccaagaacaauucucaucacuauaucauggucggcaacgagacagggcuggagcucacccugacgaauaccagcaucauuaaccauaaauucugcaaucuuuccgacgcgcacaagaaaaaccuguacgaucaugcucucaugucuaucauuagcacauuucaccuguccaucccgaauuucaaccaguaugaagccaugagcugugacuuuaauggaggcaagauuucugugcaguacaaccugucccacagcuaugccggcgaugcugccaaucauugcgggaccaucgcuaacggaguucuccaaacauucaugcggauggccuggggcgggucuuacauugcgcuggacuccggaugugaucgcugggacugcaucaugaccagcuaccaguaucuuaucauucagaacacgacaugggaggaucacugucaguuuucuagacccuccccuaucggcuaccuggggcuccugagccaacggacccgcgacauuuauaucuccagacggcuucugggaacauucaccuggacccucucugauagcgaaggcaaggacacacccggcggguacugccugacgcgcuggaugcugauugaggccgagcucaaauguuuuggaaauaccgcuguggccaagugcaacgaaaaacaugaugaggaguucugcgacaugcugagacuuuuugauuucaauaagcaggcuauccagcggcugaaagccgaagcgcagauguccauccaacucauuaacaaggccgucaaugcucugaucaacgaccagcuuauuaugaagaaucaucugcgcgacaucauguguauuccuuauugcaacuacagcaaauauugguaccucaaucacacaaccacaggcaagaccucucugcccaaauguuggcugguguccaacgggagcuaccucaaugaaacgcacuucucugaugacaucgagcagcaagccgauaacaugaucacagagaugcugcagaaggaauauauggagagacagggaaaaaccccucuuggccugguggaccucuuugucuucagcaccuccuuuuaccugauuucuaucuuccugcaccuuguuaagauuccgacacaucggcacgugguggggaaaagcugccccaagccucaucgccucaaucacaugggaaucuguuccugcggccuguauggccagcccggggucccugugaaguggaaaagaugaggacuagucccuguucccagagcccacuuuuuuuucuuuuuuugaaauaaaauagccugucuuucagaucucaaaggcucuuuucagagccaccaaaaaaaaaaaaaaaaaaaaaaaaaaaaaaaaaaaaaaaaaaaaaaaaaaaaaaaaaaaaaaaaagaauu

SEQ ID NO: 35104 - RNA, 1717 nt, Artificial Sequence
  mRNA product Design a-1 (hSL-A64-N5) comprising derived and/or modified sequence from MOPV/LASV reassortant(IGS-1;Clade IV)__AFY05576__GPCmut9 (opt5)
aggagagucccgcagucggcguccagcggcucugcuuguucgugugugugucguugcaggccuuauucaagcuuaccaugggccagaucgugaccuucuuucaagaggucccccacguuauugaagaggugaugaacaucgugcugauugcccucagcguccuggcugugcuuaaggggcuguacaauuucgccacaugcggacucguuggccuggugacguuucuucugcucugugggagauccugcaccacaucucuguauaaaggagucuacgaacugcagacccucgagcugaacauggaaacacuuaauaugaccaugccucugagcuguacaaagaacaauucccaucacuauaucauggugggcaacgagaccgggcucgagcugacgcuuaccaauacaucuauuaucaaccauaaauucugcaaucugagcgacgcgcacaagaaaaaccucuacgaucaugcucugauguccaucauuucuaccuuucaccugagcaucccgaauuucaaccaguaugaagccauguccugugacuuuaauggaggcaagauuagcguucaguacaaccucucucacuccuaugccggcgaugcugccaaucauugcgggacaguggcuaacggaguccugcaaaccuucaugcggauggccuggggcgggagcuacaucgcgcuugacucuggauguggcaacugggauugcauuaugacguccuaccaguaucugaucauucagaauacaaccugggaggaccacugucaguuuagccgccccucuccuaucggguaccucggacugcuuucccaaagaacacgggauaucuauauuagccgcagacugcucggcaccuucaccuggacacuguccgacucugaaggcgaggauacgcccgggggauacugccugacccgguggaugcucaucgaggccgaacugaaguguuuuggcaacacagcuguggccaaaugcaaugagaagcaugacgaagaguucugcgauaugcuucgccuguuugacuucaacaaacaggcuauucagagacucaaggccgaagcgcagaugagcauccaacugauuaauaaagccgugaacgcucuuaucaaugaucagcugaucaugaagaaccaccuccgggacauuauguguaucccuuauugcaauuacuccaaguauugguaccugaaccacaccacaaccgggcgcacgagccugcccaaauguuggcucgucucuaauggauccuaccugaacgagacacauuucagcgacgauauugagcagcaagccgacaauaugaucaccgaaaugcuucagaaggaguauauggaaagacagggcaaaaccccucuggggcucguugaucuguuuguguucucuaccagcuuuuaccugauuuccaucuuccuucaccucgugaagaucccgacacaucggcacauugucggaaaaucuugccccaagccucaucgccugaaccacaugggcaucuguagcugcggccuguauaaacagcccggggugccuguuaaguggaagagaugaggacuagucccuguucccagagcccacuuuuuuuucuuuuuuugaaauaaaauagccugucuuucagaucucaaaggcucuuuucagagccaccaaaaaaaaaaaaaaaaaaaaaaaaaaaaaaaaaaaaaaaaaaaaaaaaaaaaaaaaaaaaaaaaagaauu

SEQ ID NO: 35105 - RNA, 1717 nt, Artificial Sequence
  mRNA product Design a-1 (hSL-A64-N5) comprising derived and/or modified sequence from LASV(LM765-SLE-2012;Clade IV)__AIT17814__GPCmut9 (opt5)
aggagagucccgcagucggcguccagcggcucugcuuguucgugugugugucguugcaggccuuauucaagcuuaccaugggccagaucgugaccuucuuucaagaggucccccacguuauugaagaggugaugaacaucgugcugauugcccucagcauccuggcuguccuuaaggggcuguacaauuucgccacaugcggacucgugggccugguuacguuucuucugcucugugggagauccugcaccacaucucuguauaaaggaguguacgaacugcagacccucgagcugaacauggaaacacuuaauaugaccaugccucugagcuguacaaagaacaauucccaucacuauauuauggucggcaacgagaccgggcucgagcugacgcuuaccaauacaucuaucaucgaccauaaauucugcaaccugagcgaugcgcaccggaagaaucucuacgaccaugcucugauguccauuaucucuaccuuucaccugagcauuccgaacuucaaucaguaugaagccauguccugugauuuuaacggaggcaaaaucagcgugcaguacaaucucucucacuccuaugccaaggacgcugccgaucauugcggcacaguugcuaacggggugcugcaaaccuucaugcgcauggccuggggaggcagcuacauugcgcuugacucuggguguggaagaugggauugcaucaugacguccuaccaguaucugauuauccagaauacaaccugggaggaccacugucaguuuagccggcccucuccuaucggcuaccucgggcugcuuucccaacgcacaagagauauuuauaucagccggcgccugcucggaaccuucaccuggacacuguccgacucugaaggcaaggauacgcccggcggguacugccugaccagauggaugcucauugaggccgagcugaaauguuuuggaaacacagcugucgccaagugcaacgaaaaacaugacgaggaguucugcgauaugcuucggcuguuugacuucaauaagcaggcuauccagcgccucaaagccgaagcgcagaugagcauucaacugaucaacaaggccgugaaugcucuuaucaacgaccagcugauuaugaagaaucaccucagagauaucauguguauuccuuauugcaacuacuccaaauauugguaccugaaucacaccacaaccggcaagacgagccugcccaaauguuggcucgugucuaacggguccuaccugaaugaaacacauuucagcgacgauaucgagcagcaagccgacaacaugauuaccgagaugcuucagaaggaauauauggagcggcagggaaaaaccccucugggccucgucgaucuguuuguuuucucuaccagcuuuuaccugaucuccaucuuccuucaccucgugaagauuccgacacaucgccacaucguggggaaacccugcccuaagccccauagacugaaucacaugggaauuuguucuugcggccuguauaagcagccuggcguccccgugaaauggaagcggugaggacuagucccuguucccagagcccacuuuuuuuucuuuuuuugaaauaaaauagccugucuuucagaucucaaaggcucuuuucagagccaccaaaaaaaaaaaaaaaaaaaaaaaaaaaaaaaaaaaaaaaaaaaaaaaaaaaaaaaaaaaaaaaaagaauu

SEQ ID NO: 35106 - RNA, 1717 nt, Artificial Sequence
  mRNA product Design a-1 (hSL-A64-N5) comprising derived and/or modified sequence from LASV(LM776-SLE-2012;Clade IV)__AIT17824__GPCmut9 (opt5)
aggagagucccgcagucggcguccagcggcucugcuuguucgugugugugucguugcaggccuuauucaagcuuaccaugggccagaucgugaccuucuuucaagaggucccccacguuauugaagaggugaugaacaucgugcugauugcccucagcauccuggcuguccuuaaggggcuguacaauuucgccacaugcggacucgugggccugguuacguuucuucugcucugugggagauccugcaccacaucuguguauaaaggagucuacgaacugcagacccuggagcucaacauggaaacacugaauaugaccaugccucuuagcuguacaaagaacaauucccaucacuauauuauggugggcaacgagaccgggcuggagcucacgcugaccaauacaucuaucaucaaccauaaauucugcaaucuuagcgacgcgcacaagaaaaaccuguacgaucaugcucucauguccauuaucucuaccuuucaccugagcauuccgaauuucaaccaguaugaagccauguccugugacuuuaauggaggcaagaucagcguucaguacaaccugucucacuccuaugccggcgaugcugccaaucauugcgggacaguggcuaacggaguccuccaaaccuucaugcggauggccuggggcgggagcuacauugcgcuggacucuggauguggcaagugggauugcaucaugacguccuaccaguaucuuauuauccagaacacaaccugggaggaccacugucaguuuagccgccccucuccuaucggguaccugggacuccugucccaaagaacacgggauauuuauaucagccgcagacuucugggcaccuucaccuggacacucuccgacucugaaggcaaagauacgcccgggggauacugccugacccgguggaugcugauugaggccgagcucaaguguuuuggcaauacagcuguggccaaaugcaacgaaaagcaugacgaggaguucugcgauaugcugcgccuuuuugacuucaauaaacaggcuauccagagacugaaggccgaagcgcagaugagcauucaacucaucaacaaggccgugaaugcucugaucaacgaucagcuuauuaugaaaaaucaucugcgggacaucauguguauuccuuauugcaacuacuccaaguauugguaccucaaucacaccacaaccgggaaaacgagccugcccaaguguuggcuggucucuaacggauccuaccucaaugaaacacacuucagcgacgauaucgagcagcaagccgacaacaugauuaccgagaugcugcagaaagaauauauggagcgccagggcaagaccccucuugggcugguugaucucuuuguguucucuaccagcuuuuaccugaucuccaucuuccugcaccuugugaaaauuccgacacauagacacaucgucggaaagucuugccccaagccucaucggcucaaucacaugggcauuuguagcugcggccuguauaaacagcccggggugccuguucgcuggaagagaugaggacuagucccuguucccagagcccacuuuuuuuucuuuuuuugaaauaaaauagccugucuuucagaucucaaaggcucuuuucagagccaccaaaaaaaaaaaaaaaaaaaaaaaaaaaaaaaaaaaaaaaaaaaaaaaaaaaaaaaaaaaaaaaaagaauu

SEQ ID NO: 35107 - RNA, 1717 nt, Artificial Sequence
  mRNA product Design a-1 (hSL-A64-N5) comprising derived and/or modified sequence from LASV(Mad39;Clade IV)__ANH09722__GPCmut9 (opt5)
aggagagucccgcagucggcguccagcggcucugcuuguucgugugugugucguugcaggccuuauucaagcuuaccaugggccagaucgugaccuucuuucaagaggucccccacguuauugaagaggugaugaacaucgugcugauugcccucagcauccuggcuguccuuaaggggcuguacaauguggccacaugcggacucauuggccugguuacguuccuucugcucugugggagauccugcaccacaacccuguauaaaggaguguacgaacugcaggcgcucgagcugaacauggaaacacuuaauaugaccaugccucugucuuguacaaagaacaauagccaucacuauauccgggucggcaacgagaccgggcucgagcugacgcuuaccaauacaucccugaucaaccauaaauuuugcaaucucucugacgcucacaagaaaaaccuguacgaucaugcccugaugagcauuaucuccaccuuccaccucucuauuccgaauuuuaaccaguaugaagccaugagcugugacuucaaugauggaaagaucuccgugcaguacaaccugagccacacauaugcuggcgacaccgccaaucauugcggcacgguugcuaacggggugcuucaaacauuuaugcgcauggccuggggaggcucuuacauugcgcuggauuccggguguggaggcugggacugcaucaugaccagcuaccaguaucucauuauccagaacacaaccugggaggaucacugucaguucucuagacccuccccuaucggguaccugggacuucugagccaacggacccgcgacauuuauaucucuagacggcuccugggcacauuuacguggacccuguccgauagcgaaggcaaggacacacccgggggauacugccucacccgcuggaugcugauugaggccgagcuuaaauguuucggcaauacagcugucgccaagugcaacgaaaaacaugaugaggaauuuugcgacaugcugagacucuucgauuuuaauaagcaggcuauccagcggcugaaagccgaggcgcagauguccauucaacuuaucaacaaggccgugaaugcucugaucaacgaccagcucauuaugaagaaucaucugcgcgacaucauguguauuccuuauugcaacuacucuaaauauugguaccugaaucacaccgugacggggaagacaagccuccccaaauguuggcuggucuccaacggaagcuaccuuaaugaaacccacuucucugaugacaucgagcagcaagccgauaacaugauuaccgagaugcugcagaaggaauauauggagagacagggcaaaacaccucucgggcugguugaccuguucguguuuuccaccagcuucuaccuuaucucuaucuuucuccaccuggugaagauuccgacacaucggcacgucgugggaaaacccugcccuaagccccaucgccugaaucacaugggcaucuguagcugcggcuucuauaagcagccugggguucccgugagauggaaacggugaggacuagucccuguucccagagcccacuuuuuuuucuuuuuuugaaauaaaauagccugucuuucagaucucaaaggcucuuuucagagccaccaaaaaaaaaaaaaaaaaaaaaaaaaaaaaaaaaaaaaaaaaaaaaaaaaaaaaaaaaaaaaaaaagaauu

SEQ ID NO: 35108 - RNA, 1717 nt, Artificial Sequence
  mRNA product Design a-1 (hSL-A64-N5) comprising derived and/or modified sequence from LASV(Z0947-SLE-2011;Clade IV)__AIT17840__GPCmut9 (opt5)
aggagagucccgcagucggcguccagcggcucugcuuguucgugugugugucguugcaggccuuauucaagcuuaccaugggccagaucgugaccuucuuucaagaggucccccacguuauugaagaggugaugaacaucgugcugauugcccucagcauccuggcuguccuuaaggggcuguacaauuucgccacaugcggacucgugggccugguuacguuucuucugcucugugggagauccugcaccauuucucuguauaaaggaguguacgaacugcagacacucgagcugaacauggaaacccuuaauaugacaaugccucugagcuguaccaagaacaauucccaucacuauaucauggucggcaacgagacagggcucgagcugacccuuacgaauaccucuaucauuaaccauaaauucugcaaucugagcgacgcgcacaagaaaaaccucuacgaucaugcucugauguccaucauuucuacauuucaccugagcaucccgaauuucaaccaguaugaagccauguccugugacuuuaauggaggcaagauuagcgugcaguacaaccucucucacuccuaugccggcgaugcugccaaucauugcgggaccguugcuaacggagugcugcaaacauucaugcggauggccuggggcgggagcuacaucgcgcuugacucuggaugugaucgcugggacugcauuaugaccuccuaccaguaucugaucauccagaacacgacaugggaggaucacugucaguuuagcagacccucuccuauuggcuaccucgggcugcuuucccaacggacccgcgacaucuauauuagcagacggcugcucggaacauucaccuggacccuguccgauucugaaggcaaggacacacccggcggguacugccugacgcgcuggaugcucaucgaggccgagcugaaauguuuuggaaauaccgcugucgccaagugcaacgaaaaacaugaugaggaguucugcgacaugcuuagacuguuugauuucaauaagcaggcuauucagcggcucaaagccgaagcgcagaugagcauccaacugaucaacaaggccgugaaugcucuuauuaacgaccagcugaucaugaagaaucaccuccgcgacauuauguguaucccuuauugcaacuacuccaaauauugguaccugaaucacacaaccacaggcaagaccagccugcccaaauguuggcucgugucuaacggguccuaccugaaugaaacgcauuucagcgaugacauugagcagcaagccgauaacaugaucacagagaugcuucagaaggaauauauggagagacagggaaaaaccccucugggccucgucgaccuguuuguuuucucuaccagcuuuuaccugaucuccauuuuccuucaccucgugaagaucccgacacaucggcacauuguggggaaacccugcccuaagccccaucgccugaaucacaugggaaucuguucuugcggccuguauaagcagccuggcguccccgugaaauggaagagaugaggacuagucccuguucccagagcccacuuuuuuuucuuuuuuugaaauaaaauagccugucuuucagaucucaaaggcucuuuucagagccaccaaaaaaaaaaaaaaaaaaaaaaaaaaaaaaaaaaaaaaaaaaaaaaaaaaaaaaaaaaaaaaaaagaauu

SEQ ID NO: 35109 - RNA, 1748 nt, Artificial Sequence
  mRNA product Design a-1 (hSL-A100) comprising derived and/or modified sequence from LASV(Josiah;Clade IV)__NP_694870__GPCmut9 (opt1)
aggagagucccgcagucggcguccagcggcucugcuuguucgugugugugucguugcaggccuuauucaagcuuaccaugggccagaucgugaccuucuuccaggaggucccccacgugaucgaggaggugaugaacaucguccugaucgcccucagcgugcuggccgugcugaaggggcucuacaacuucgcgaccugcggccuggucgggcuggugacguuccuccugcugugcggccgcuccugcaccaccagccucuacaaggggguguacgagcugcagacccuggagcucaacauggagacgcugaacaugaccaugccgcuguccugcaccaagaacaacagccaccacuacaucauggucggcaacgagaccggccucgagcugacgcugaccaacaccuccaucaucaaccacaaguucugcaaccucagcgacgcccacaagaagaaccuguacgaccacgcccugauguccaucaucagcaccuuccaccucuccauccccaacuucaaccaguacgaggccaugagcugcgacuucaacgggggcaagaucuccgugcaguacaaccugagccacuccuacgccggggacgcggccaaccacugcggcacgguggccaacgggguccugcagaccuucaugcggauggccuggggcggcagcuacaucgcgcucgacuccgggugcggcaacugggacugcaucaugaccagcuaccaguaccugaucauccagaacaccacgugggaggaccacugccaguucucccggcccagccccaucggguaccugggccuccugucccagcgcacccgggacaucuacaucagccgccggcugcucggcaccuucaccuggacgcugagcgacuccgaggggaaggacaccccgggcggguacugccugacccgcuggaugcucaucgaggccgagcugaagugcuucggcaacaccgccguggccaagugcaacgagaagcacgacgaggaguucugcgacaugcugcggcuguucgacuucaacaagcaggccauccagcgccugaaggcggaggcccagaugagcauccagcugaucaacaaggccgugaacgcccucaucaacgaccagcugaucaugaagaaccaccuccgggacaucaugugcauccccuacugcaacuacuccaaguacugguaccucaaccacacgaccaccggccgcaccagccugcccaagugcuggcuggucuccaacggcagcuaccucaacgagacgcacuucuccgacgacaucgagcagcaggccgacaacaugaucaccgagaugcugcagaaggaguacauggagcggcaggggaagacgccccugggccucguggaccuguucguguucagcaccuccuucuaccugaucagcaucuuccugcaccucgucaagaucccgacccaccgccacaucguggggaaguccugccccaagccccaccggcugaaccacaugggcaucugcagcugcgggcuguacaagcagcccggcgugccggucaaguggaagcgcugaggacuagucccuguucccagagcccacuuuuuuuucuuuuuuugaaauaaaauagccugucuuucagaucucaaaggcucuuuucagagccaccaaaaaaaaaaaaaaaaaaaaaaaaaaaaaaaaaaaaaaaaaaaaaaaaaaaaaaaaaaaaaaaaaaaaaaaaaaaaaaaaaaaaaaaaaaaaaaaaaaaaa

SEQ ID NO: 35110 - RNA, 1745 nt, Artificial Sequence
  mRNA product Design a-1 (hSL-A100) comprising derived and/or modified sequence from LASV(LP;Clade I)__AAF86701__GPCmut9 (opt1)
aggagagucccgcagucggcguccagcggcucugcuuguucgugugugugucguugcaggccuuauucaagcuuaccaugggccagaucaucaccuucuuccaggaggugccccacgucaucgaggaggugaugaacaucgugcugaucgcccucagccugcuggccauccucaaggggcuguacaacaucgcgaccugcggcaucaucgggcuggucgccuuccucuuccugugcggcaaguccugcagccugacgcucaagggcggguacgagcugcagacccuggagcucaacauggagacccugaacaugaccaugccgcuguccugcacgaagaacagcucccaccacuacauccgcgugggcaacgagaccgggcucgagcugacccugaccaacacgagcaucaucaaccacaaguucugcaaccucuccgacgcccacaagaagaaccuguacgaccacgcccugaugagcaucaucuccaccuuccaccucagcauccccaacuucaaccaguacgaggccauguccugcgacuucaacggcgggaagaucagcgugcaguacaaccugucccacagcuacgcgggcgacgccgccgagcacugcgggaccgucgccaacggcgugcugcagaccuucaugcggauggcguggggcgggcgcuacaucgcccucgacuccggcugcgggaacugggacugcaucaugacgagcuaccaguaccugaucauccagaacaccaccugggaggaccacugccaguucucccggcccagccccaucggcuaccugggccuccugucccagcgcacccgggacaucuacaucagccgccggcugcucgggacguucaccuggacccugagcgacuccgagggcaacgagacccccgggggcuacugccugacgcgcuggaugcucaucgaggccgagcugaagugcuucgggaacaccgccguggccaagugcaacgagaagcacgacgaggaguucugcgacaugcugcggcuguucgacuucaacaagcaggcgauccgccggcugaaggccgaggcccagaugagcauccagcugaucaacaaggccgucaacgcccucaucaacgaccagcugaucaugaagaaccaccuccgcgacaucaugugcauccccuacugcaacuacuccaaguacugguaccucaaccacaccagcuccggccggaccagccugcccaagugcuggcugaucuccaacgggagcuaccucaacgagacgcaguucuccgacgacaucgagcagcaggcggacaacaugaucaccgagaugcugcagaaggaguacaucgagcgccagggcaagaccccgcuggggcucguggacaucuucaucuucagcaccuccuucuaccugaucagcaucuuccugcaccugaucaagaucccgacgcaccggcacaucgugggcaagcccugccccaagccccaccgccucaaccacaugggggucugcuccugcggccuguacaagcacccgggcgugcccaccaaguggaagcggugaggacuagucccuguucccagagcccacuuuuuuuucuuuuuuugaaauaaaauagccugucuuucagaucucaaaggcucuuuucagagccaccaaaaaaaaaaaaaaaaaaaaaaaaaaaaaaaaaaaaaaaaaaaaaaaaaaaaaaaaaaaaaaaaaaaaaaaaaaaaaaaaaaaaaaaaaaaaaaaaaaaaa

SEQ ID NO: 35111 - RNA, 1745 nt, Artificial Sequence
  mRNA product Design a-1 (hSL-A100) comprising derived and/or modified sequence from LASV(803213;Clade II)__AAF86703__GPCmut9 (opt1)
aggagagucccgcagucggcguccagcggcucugcuuguucgugugugugucguugcaggccuuauucaagcuuaccaugggccagaucaucaccuucuuccaggaggugccccacgucaucgaggaggugaugaacaucgugcugaucgcccucagccugcuggccauccucaaggggaucuacaacgucgcgaccugcggccuguucgggcugaucuccuuccuccugcugugcggccgcagcugcuccgugacguacaaggggguguacgagcuccagacccuggagcugaacauggccaaccucaacaugaccaugccgcugagcugcaccaagaacaacucccaccacuacaucauggucggcaacgagacgggccuggagcucacccugaccaacaccagcaucaucaaccacaaguucugcaaccuguccgacgcccacaagaagaaccucuacgaccacgcccugaugagcaucaucuccacguuccaccugagcauccccaacuucaaccaguacgaggccauguccugcgacuucaacgggggcaagaucagcgugcaguacaaccucucccacagcuucgcgguggacgccgccaaccacugcgggaccaucgccaacggcguccugcagaccuucaugcggauggcguggggcggguccuacaucgcccuggacagcggcugcgggaacugggacugcaucaugaccuccuaccaguaccucaucauccagaacacgaccugggaggaccacugccaguucagccgccccucccccaucggcuaccuggggcugcucagccagcggacccgcgacaucuacaucagccggcgccugcugggcaccuucacguggacccucuccgacagcgagggcaacgaggcccccgggggcuacugccugacccgguggaugcugaucgaggccgagcucaagugcuucgggaacaccgccguggcgaagugcaacgagaagcacgacgaggaguucugcgacaugcugcgccuguucgacuucaacaagcaggccaucaagcggcucaagacggaggcccagauguccauccagcugaucaacaaggccgugaacgcccugaucaacgaccagcucaucaugaagaaccaccuccgcgacaucaugugcauccccuacugcaacuacagccgguacugguaccugaaccacaccgucaccgggaagaccucccugccccgcugcuggcuggugagcaacggcuccuaccugaacgagacgcacuucagcgacgacaucgagcagcaggcggacaacaugaucaccgagaugcuccagaaggaguacauggaccggcagggcaagaccccgcuggggcugguggaccucuucgucuucuccaccagcuucuaccugaucuccaucuuccugcaccuggugaagaucccgacgcaccgccacaucgugggcaagcccugccccaagccccaccggcucaaccacauggggaucugcagcugcggccuguacaagcacccggggguccccgugaaguggaagcgcugaggacuagucccuguucccagagcccacuuuuuuuucuuuuuuugaaauaaaauagccugucuuucagaucucaaaggcucuuuucagagccaccaaaaaaaaaaaaaaaaaaaaaaaaaaaaaaaaaaaaaaaaaaaaaaaaaaaaaaaaaaaaaaaaaaaaaaaaaaaaaaaaaaaaaaaaaaaaaaaaaaaaa

SEQ ID NO: 35112 - RNA, 1745 nt, Artificial Sequence
  mRNA product Design a-1 (hSL-A100) comprising derived and/or modified sequence from LASV(GA391;Clade III)__CAA36645__GPCmut9 (opt1)
aggagagucccgcagucggcguccagcggcucugcuuguucgugugugugucguugcaggccuuauucaagcuuaccaugggccagaucgugaccuucuuccaggaggucccccacgugaucgaggaggugaugaacaucguccugaucgcccucagcauccuggccauccugaaggggcucuacaacguggcgaccugcggccugaucgggcuggugacguuccuccugcuguccggccgcagcugcucccucaucuacaaggggaccuacgagcugcagacccuggagcucaacauggagacccugaacaugacgaugccgcugagcugcaccaagaacaacucccaccacuacauccgggucggcaacgagaccggccucgagcugacccugacgaacaccagcauccucaaccacaaguucugcaaccuguccgacgcccacaagcgcaaccuguacgaccacagccucauguccaucaucagcaccuuccaccuguccauccccaacuucaaccaguacgaggccaugagcugcgacuucaacgggggcaagaucaccgugcaguacaaccugucccacagcuucgccguggacgccgcggggcacugcggcacgcucgccaacgggguccugcagaccuucaugcggauggccuggggcggcuccuacaucgcccuggacagcgggugcggcaacugggacugcaucaugaccuccuaccaguaccucaucauccagaacaccacgugggacgaccacugccaguucagccggcccucccccaucggguaccugggccugcucagccagcgcacccgggacaucuacaucagccgccggcugcugggcaccuucaccuggacgcucuccgacagcgaggggaacgagaccccgggcggguacugccugacccgcuggaugcugaucgaggcggagcucaagugcuucggcaacaccgccguggccaagugcaacgagaagcacgacgaggaguucugcgacaugcugcggcuguucgacuucaacaagcaggccauccgccggcucaagacggaggcccagauguccauccagcugaucaacaaggcggugaacgcccugaucaacgaccagcucaucaugaagaaccaccuccgcgacaucaugugcauccccuacugcaacuacagccgguacugguaccugaaccacaccuccaccggcaagaccagccugccccgcugcuggcugaucuccaacggcagcuaccugaacgagacgaaguucuccgacgacaucgagcagcaggccgacaacaugaucaccgagaugcuccagaaggaguacaucgaccggcaggggaagacgccccugggccuggucgaccuguucguguucagcaccuccuucuaccucaucagcaucuuccugcaccuggugaagaucccgacccaccgccacaucgucgggaagcccugccccaagccccaccggcucaaccacaugggcaucugcuccugcgggcuguacaagcagccgggcgugcccgugcgcuggaagcggugaggacuagucccuguucccagagcccacuuuuuuuucuuuuuuugaaauaaaauagccugucuuucagaucucaaaggcucuuuucagagccaccaaaaaaaaaaaaaaaaaaaaaaaaaaaaaaaaaaaaaaaaaaaaaaaaaaaaaaaaaaaaaaaaaaaaaaaaaaaaaaaaaaaaaaaaaaaaaaaaaaaaa

SEQ ID NO: 35113 - RNA, 1748 nt, Artificial Sequence
  mRNA product Design a-1 (hSL-A100) comprising derived and/or modified sequence from LASV(AV;Clade V)__CCA30314__GPCmut9 (opt1)
aggagagucccgcagucggcguccagcggcucugcuuguucgugugugugucguugcaggccuuauucaagcuuaccaugggccagaucgugaccuucuuccaggaggucccccacgugaucgaggaggugaugaacaucguccugaucgcccucagcauccuggccgugcugaaggggcucuacaacaucgcgaccugcggccugaucgggcugaucacguuccuccugcugugcggccgcuccugcagcuccaaccucuacaaggggguguacgagcugcagagccuggaccucaacauggagacccugaacaugaccaugccgcuguccugcaccaagaacaacagccaccacuacauccgggucggcaacgacacgggccucgagcugacccugaccaacaccuccauccucaaccacaaguucugcaaccugagcgacgcccacaagaaggaccuguacgaccacgcccucauguccaucaucagcacguuccaccuguccauccccaacuucaaccaguacgaggccaugagcugcgacuucaacgggggcaagaucuccgugcaguacaaccugagccacuccuacgccaucgacgcggccaaccacugcgggaccguggccaacggcauccuccagaccuucaugcgcauggccuggggcgggagcuacaucgcgcuggacuccggcugcgggaacugggacugcaucaugaccagcuaccaguaccugaucauccagaacacgaccugggagaaccacugccaguucucccgccccagccccaucggcuaccucgggcugcugagccagcggacccgcgacaucuacaucucccggcgccuccugggcaccuucacguggacccugagcgacuccgagggcaacgccacccccgggggcuacugccucacccgguggaugcugaucgaggccgagcugaagugcuucgggaacacggccgucgccaagugcaacgagaagcacgacgaggaguucugcgacaugcuccgccuguucgacuucaacaagcaggcgaucagccggcugaaguccgaggcccagaugagcauccagcucaucaacaaggccgugaacgcccugaucaacgaccagcugaucaugaagaaccaccuccgcgacaucaugugcauccccuacugcaacuacuccaaguacugguaccugaaccacaccaucaccgggaagaccagccugcccaagugcuggcucguguccaacggcagcuaccugaacgagacgcacuucuccgacgacaucgagcagcaggccgacaacaugaucaccgagaugcugcagaaggaguacauggagcggcagggcaagaccccgcucgggcuggucgaccuguucguguucagcaccuccuucuaccugaucagcaucuuccuccgccuggugaagaucccgacgcaccggcacaucgucggcaagcccugccccaagccccaccgccugaaccacauggggaucugcuccugcggccucuacaagcagccgggggugcccgugcgguggaagcgcugaggacuagucccuguucccagagcccacuuuuuuuucuuuuuuugaaauaaaauagccugucuuucagaucucaaaggcucuuuucagagccaccaaaaaaaaaaaaaaaaaaaaaaaaaaaaaaaaaaaaaaaaaaaaaaaaaaaaaaaaaaaaaaaaaaaaaaaaaaaaaaaaaaaaaaaaaaaaaaaaaaaaa

SEQ ID NO: 35114 - RNA, 1745 nt, Artificial Sequence
  mRNA product Design a-1 (hSL-A100) comprising derived and/or modified sequence from LASV(Togo/2016/7082;Clade VI)__AMR44577__GPCmut9 (opt1)
aggagagucccgcagucggcguccagcggcucugcuuguucgugugugugucguugcaggccuuauucaagcuuaccaugggccagaucaucaccuucuuccaggaggugccccacgucaucgaggaggugaugaacaucgugcugaucgcccucagccugcuggccauccucaagggggucuacaacguggcgaccugcggcaucaucgggcuggugacguuccuguuccucugcggccgcuccugcagccugaucuacaagggguccuacgagcugcagacccucgagcugaacauggagacccugaacaugaccaugccgcucagcugcacgaagaacuccagccaccacuacauccgggucggcaacgagaccggccuggagcugacccucaccaacacguccaucaucaaccacaaguucugcaaccugagcgacgcccacaagcgcaaccuguacgaccacgcccucauguccauccugagcaccuuccaccuguccauccccaacuucaaccaguacgaggccaugagcugcgacuucaacgggggcaagaucuccgugcaguacaaccucagccacgccuacgcgguggacgccgccgagcacugcgggaccgucgccaacggcgugcugcagaccuucaugcggauggcguggggcggguccuacaucgcccuggacagcggcugcgggaacugggacugcaucaugacguccuaccaguaccucaucauccagaacaccaccugggaggaccacugccaguucagccggcccucccccaucggcuaccuggggcugcucagccagcgcacccgggacaucuacaucagccgccggcugcugggcacguucaccuggacccucuccgacagcgagggcaacgagacccccgggggcuacugccugacgcgcuggaugcugaucgaggccgagcucaagugcuucgggaacaccgccguggccaagugcaacgagaagcacgacgaggaguucugcgacaugcugcggcuguucgacuucaacaagcaggcgauccagcgccucaaguccgaggcccagaugagcauccagcugaucaacaaggccgucaacgcccugaucaacgaccagcucaucaugaagaaccaccuccgggacaugaugugcauccccuacugcaacuacuccaaguacugguaccugaaccacaccagcuccgggcgcaccagccugcccaagugcuggcugguguccaacggcagcuaccugaacgagacgcacuucuccgacgacaucgagcagcaggccgacaacaugaucaccgagaugcuccagaaggaguacaucgaccggcagggcaagaccccgcuggggcugguggaccucuucgucuucagcaccuccuucuaccugaucagcaucuuccugcaccugaucaagaucccgacgcaccgccacaucgugggcaagcccugccccaagccccaccggcucaaccacauggggaucugcuccugcggccuguacaagcagccgggggugcccacccgcuggaagcggugaggacuagucccuguucccagagcccacuuuuuuuucuuuuuuugaaauaaaauagccugucuuucagaucucaaaggcucuuuucagagccaccaaaaaaaaaaaaaaaaaaaaaaaaaaaaaaaaaaaaaaaaaaaaaaaaaaaaaaaaaaaaaaaaaaaaaaaaaaaaaaaaaaaaaaaaaaaaaaaaaaaaa

SEQ ID NO: 35115 - RNA, 1745 nt, Artificial Sequence
  mRNA product Design a-1 (hSL-A100) comprising derived and/or modified sequence from LASV(KAK-428;Clade n.d. (VII))__ANH09740__GPCmut9 (opt1)
aggagagucccgcagucggcguccagcggcucugcuuguucgugugugugucguugcaggccuuauucaagcuuaccaugggccagaucgugaccuucuuccaggaggucccccacgugaucgaggaggugaugaacaucguccugaucgcccucagccugcuggccauccucaaggggcuguacaacuucgcgaccugcggcgugaucgggcugaucacguuccuccugcugugcggccgcuccugcagcgccaccuacaaggggcaguacgagcuccagacccuggagcugaacauggagucccucaacaugaccaugccgcugagcugcacgaagaacaacucccaccacuacauccgggccggcaacaacaccggccuggagcucacccugaccaacacgagcaucaucucccacaaguucugcaaccugagcgacgcccacaagaagaaccucuacgaccacacccugauguccaucaucaccaccuuccaccugagcauccccaacuucaaccaguacgaggccauguccugcgacuucaacgggggcaagaucagcauccaguacaaccucucccacagcuacgcgggggacgccgcccagcacugcggcacgguggccaacgggguccugcagaccuucaugcgcauggcguggggcggcuccuaccuggcccucgacagcgggugccgcggcugggacugcaucaucuccagcuaccaguaccugaucauccagaacaccaccugggacgaccacugccaguucucccggcccagccccaucggguaccugggcuucgugagccagaagacgcgcgacaucuacaucucccggcgccuccugggcaccuucaccuggacccugagcgacuccgaggggcacgacaugccgggcggguacugccucacgcgguggaugcugaucgaggccgaccugaagugcuucggcaacaccgccguggccaagugcaacgagaagcacgacgaggaguucugcgacauguggcgccucuucgacuucaacaagcaggcgauccagcggcugaaggccgaggcccagaugaacauccagcugaucaacaaggccgucaacgcccucaucaacgaccagcugaugaugaagaaccaccuccgcgacaucaugugcauccccuacugcaacuacagcaaguucugguaccugaacaacaccaccacgggccggaccucccugccccgcugcuggcugaucagcaacggcuccuaccucaacgagacccacuucagcgacgacaucgagcagcaggcggacaacaugaucaccgagaugcugcagaaggaguacauggaccggcaggggaagacgccccugggccucguggaccuguucguguucuccaccagcuucuaccugaucaccaucuuccuccaccuggucaagaucccgacccaccgccacaucguggggaagcccugccccaagccccaccggcugaaccacaugggcaucugcuccugcgggcuguacaagcagccgggcgugcccguccgcuggaagcggugaggacuagucccuguucccagagcccacuuuuuuuucuuuuuuugaaauaaaauagccugucuuucagaucucaaaggcucuuuucagagccaccaaaaaaaaaaaaaaaaaaaaaaaaaaaaaaaaaaaaaaaaaaaaaaaaaaaaaaaaaaaaaaaaaaaaaaaaaaaaaaaaaaaaaaaaaaaaaaaaaaaaa

SEQ ID NO: 35116 - RNA, 1745 nt, Artificial Sequence; identical to SEQ ID NO: 35110
  mRNA product Design a-1 (hSL-A100) comprising derived and/or modified sequence from LASV(Pinneo-NIG-1969;Clade I)__AIT17836__GPCmut9 (opt1)

SEQ ID NO: 35117 - RNA, 1745 nt, Artificial Sequence
  mRNA product Design a-1 (hSL-A100) comprising derived and/or modified sequence from LASV(ISTH0009-NIG-2011;Clade II)__AIT17404__GPCmut9 (opt1)
aggagagucccgcagucggcguccagcggcucugcuuguucgugugugugucguugcaggccuuauucaagcuuaccaugggccagaucaucaccuucuuccaggaggugccccacgucaucgaggaggugaugaacaucgugcugaucgcccucagccugcuggccauccucaaggggaucuacaacgucgcgaccugcggccuguucgggcugguguccuuccuccugcugugcggccgcagcugcuccacgaccuacaaggggguguacgagcuccagacccuggagcuggacauggccagccucaacaugaccaugccgcuguccugcacgaagaacaacagccaccacuacaucauggucggcaacgagaccggccuggagcucacccugaccaacacguccaucaucaaccacaaguucugcaaccugagcgacgcccacaagaagaaccucuacgaccacgcccugauguccaucaucagcaccuuccaccuguccauccccaacuucaaccaguacgaggccaugagcugcgacuucaacgggggcaagaucuccgugcaguacaaccucagccacgcguacgccguggacgccgccaaccacugcgggaccaucgcgaacggcguccugcagaccuucaugcggauggccuggggcggguccuacaucgcccuggacagcggcugcggguccugggacugcaucaugacgagcuaccaguaccucaucauccagaacaccaccugggaggaccacugccaguucucccgccccagccccaucggcuaccuggggcugcucagccagcggacccgcgacaucuacaucucccggcgccugcugggcacguucaccuggacccucagcgacuccgagggcaacgagacccccgggggcuacugccugacgcgguggaugcugaucgaggccgagcucaagugcuucgggaacaccgccguggcgaagugcaacgagaagcacgacgaggaguucugcgacaugcugcgccuguucgacuucaacaagcaggccauccggcgccucaagaccgaggcccagaugagcauccagcugaucaacaaggccgugaacgcccugaucaacgaccagcucaucaugaagaaccaccuccgggacaucaugugcaucccguacugcaacuacuccaaguacugguaccugaaccacaccgucacggggaagaccagccugccccgcugcuggcugguguccaacggcagcuaccugaacgagacccacuucuccgacgacaucgagcagcaggcggacaacaugaucaccgagcuccugcagaaggaguacauggaccggcagggcaagacgccccuggggcucguggaccuguucgucuucagcaccuccuucuaccugaucagcaucuuccugcaccucaucaagaucccgacccaccgccacaucaccggcaagcccugccccaagccccaccggcugaaccacauggggaucugcuccugcggccuguacaagcacccgggggugcccgugaaguggaagcgcugaggacuagucccuguucccagagcccacuuuuuuuucuuuuuuugaaauaaaauagccugucuuucagaucucaaaggcucuuuucagagccaccaaaaaaaaaaaaaaaaaaaaaaaaaaaaaaaaaaaaaaaaaaaaaaaaaaaaaaaaaaaaaaaaaaaaaaaaaaaaaaaaaaaaaaaaaaaaaaaaaaaaa

SEQ ID NO: 35118 - RNA, 1745 nt, Artificial Sequence
  mRNA product Design a-1 (hSL-A100) comprising derived and/or modified sequence from LASV(ISTH2010-NIG-2012;Clade II)__AIT17482__GPCmut9 (opt1)
aggagagucccgcagucggcguccagcggcucugcuuguucgugugugugucguugcaggccuuauucaagcuuaccaugggccagaucaucaccuucuuccaggaggugccccacgucaucgaggaggugaugaacaucgugcugaucgcccucagccugcuggccauccucaaggggaucuacaacgucgcgaccugcggccuguucgggcugguguccuuccuccugcugugcggccgcagcugcuccacgaccuacaaggggguguacgagcuccagacccuggagcuggacauggccagccucaacaugaccaugccgcuguccugcacgaagaacaacagccaccacuacaucauggucggcaacgagaccggccuggagcucacccugaccaacacguccaucaucaaccacaaguucugcaaccugagcgacgcccacaagaagaaccucuacgaccacgcccugauguccaucaucagcaccuuccaccuguccauccccaacuucaaccaguacgaggccaugagcugcgacuucaacgggggcaagaucuccgugcaguacaaccucagccacgcguacgccguggacgccgccaaccacugcgggaccaucgcgaacggcguccugcagaccuucaugcggauggccuggggcggguccuacaucgcccuggacagcggcugcggguccugggacugcaucaugacgagcuaccaguaccucaucauccagaacaucaccugggaggaccacugccaguucucccgccccagccccaucggcuaccuggggcugcucagccagcggacccgcgacaucuacaucucccggcgccugcugggcaccuucacguggacccucagcgacuccgagggcaacgagacccccgggggcuacugccugacccgguggaugcugaucgaggccgagcucaagugcuucgggaacacggccguggcgaagugcaacgagaagcacgacgaggaguucugcgacaugcugcgccuguucgacuucaacaagcaggccauccggcgccucaagaccgaggcccagaugagcauccagcugaucaacaaggccgugaacgcccugaucaacgaccagcucaucaugaagaaccaccuccgggacaucaugugcauccccuacugcaacuacuccaaguacugguaccugaaccacaccgucaccgggaagacgagccugccccgcugcuggcugguguccaacggcagcuaccugaacgagacccacuucuccgacgacaucgagcagcaggcggacaacaugaucaccgagcuccugcagaaggaguacaucgaccggcagggcaagaccccgcuggggcucguggaccuguucgucuucagcacguccuucuaccugaucagcaucuuccugcaccucgugaagaucccgacccaccgccacguggucggcaagcccugccccaagccccaccggcugaaccacauggggaucugcuccugcggccuguacaagcacccgggggugcccgugaaguggaagcgcugaggacuagucccuguucccagagcccacuuuuuuuucuuuuuuugaaauaaaauagccugucuuucagaucucaaaggcucuuuucagagccaccaaaaaaaaaaaaaaaaaaaaaaaaaaaaaaaaaaaaaaaaaaaaaaaaaaaaaaaaaaaaaaaaaaaaaaaaaaaaaaaaaaaaaaaaaaaaaaaaaaaaa

SEQ ID NO: 35119 - RNA, 1745 nt, Artificial Sequence
  mRNA product Design a-1 (hSL-A100) comprising derived and/or modified sequence from LASV(Lassa virus/H.sapiens-wt/NGA/2015/ISTH_0543;Clade II)__AVO03639__GPCmut9 (opt1)
aggagagucccgcagucggcguccagcggcucugcuuguucgugugugugucguugcaggccuuauucaagcuuaccaugggccagaucaucaccuucuuccaggaggugccccacgucaucgaggaggugaugaacaucgugcugaucgcccucagccugcuggccauccucaaggggaucuacaacgucgcgaccugcggccuguucgggcugguguccuuccuccugcugugcggccgcagcugcuccacgaccuacaaggggguguacgagcuccagacccuggagcuggacauggccaaccucaacaugaccaugccgcugagcugcacgaagaacaacucccaccacuacaucauggucggcaacgagaccggccuggagcucacccugaccaacacgagcaucaucaaccacaaguucugcaaccuguccgacgcccacaagaagaaccucuacgaccacgcccugaugagcaucaucuccaccuuccaccugagcauccccaacuucaaccaguacgaggccauguccugcgacuucaacgggggcaagaucagcgugcaguacaaccucucccacaccuacgcgguggacgccgccaaccacugcgggaccaucgccaacggcguccugcagacguucaugcggauggcguggggcgggagcuacaucgcccuggacuccggcugcgggagcugggacugcaucaugaccuccuaccaguaccucgugauccagaacaccaccugggaggaccacugccaguucagccgccccucccccaucggcuaccuggggcugcucagccagcggacgcgcgacaucuacaucagccggcgccugcugggcaccuucaccuggacccucuccgacagcgagggcaacgagacgcccgggggcuacugccugacccgguggaugcugaucgaggccgagcucaagugcuucgggaacaccgccguggccaagugcaacgagaagcacgacgaggaguucugcgacaugcugcgccuguucgacuucaacaagcaggcgauccggcgccucaagaccgaggcccagauguccauccagcugaucaacaaggccgucaacgcccugaucaacgaccagcucaucaugaagaaccaccuccgggacaucaugugcauccccuacugcaacuacagcaaguacugguaccugaaccacacggugaccgggaagaccucccugccccgcugcuggcuggugagcaacggcuccuaccugaacgagacccacuucagcgacgacaucgagcagcaggccgacaacaugaucacggagcuccugcagaaggaguacaucgaccggcagggcaagaccccgcuggggcucgucgaccuguucguguucuccaccagcuucuaccugaucuccaucuuccugcaccucgugaagaucccgacccaccgccacaucacgggcaagcccugccccaagccccaccggcugaaccacauggggaucugcagcugcggccuguacaagcacccggggguccccgugaaguggaagcgcugaggacuagucccuguucccagagcccacuuuuuuuucuuuuuuugaaauaaaauagccugucuuucagaucucaaaggcucuuuucagagccaccaaaaaaaaaaaaaaaaaaaaaaaaaaaaaaaaaaaaaaaaaaaaaaaaaaaaaaaaaaaaaaaaaaaaaaaaaaaaaaaaaaaaaaaaaaaaaaaaaaaaa

SEQ ID NO: 35120 - RNA, 1745 nt, Artificial Sequence
  mRNA product Design a-1 (hSL-A100) comprising derived and/or modified sequence from LASV(Lassa virus/H.sapiens-wt/NGA/2016/ISTH_0009;Clade II)__AVO03571__GPCmut9 (opt1)
aggagagucccgcagucggcguccagcggcucugcuuguucgugugugugucguugcaggccuuauucaagcuuaccaugggccagaucaucaccuucuuccaggaggugccccacgucaucgaggaggugaugaacaucgugcugaucgcccucagccugcuggccauccucaaggggaucuacaacgucgcgaccugcggccugcuggggcucguguccuuccugcugcucugcggccgcagcugcuccacgaccuacaaggggguguacgagcugcagacccuggagcucgacauggccagccugaacaugaccaugccgcuguccugcacgaagaacaacagccaccacuacaucauggucggcaacgagaccggccucgagcugacccugaccaacacguccaucaucaaccacaaguucugcaaccucagcgacgcccacaagaagaaccuguacgaccacgcccugauguccaucaucagcaccuuccaccucuccauccccaacuucaaccaguacgaggccaugagcugcgacuucaacgggggccggaucuccgugcaguacaaccugagccacuccuacgcgguggacgccgccaaccacugcgggaccaucgccaacggcguccugcagaccuucaugcgcauggcguggggcgggagcuacaucgcccucgacuccggcugcgggagcugggacugcaucaugacguccuaccaguaccugaucauccagaacaccaccugggaggaccacugccaguucagccggcccagccccaucggcuaccuggggcuccugucccagcgcacccgggacaucuacaucagccgccggcugcucggcacguucaccuggacccuguccgacagcgagggcaacgagacccccgggggcuacugccugacgcgcuggaugcucaucgaggccgagcugaagugcuucgggaacaccgccguggccaagugcaacgagaagcacgacgaggaguucugcgacaugcugcggcuguucgacuucaacaagcaggcgauccgccggcugaagaccgaggcccagauguccauccagcugaucaacaaggccgugaacgcccucaucaacgaccagcugaucaugaagaaccaccuccgcgacaucaugugcaucccguacugcaacuacagcaaguacugguaccucaaccacaccgucacggggaagaccucccugccccggugcuggcuggugagcaacggcuccuaccucaacgagacccacuucagcgacgacaucgagcagcaggccgacaacaugaucaccgagcugcugcagaaggaguacaucgaccgccagggcaagacgccccucgggcugguggaccuguucgucuucuccaccagcuucuaccugaucuccaucuuccuccaccuggugaagaucccgacccaccggcacaucaccggcaagcccugccccaagccccaccgccugaaccacauggggaucugcagcugcggccucuacaaccacccgggggugcccgucaaguggaagcggugaggacuagucccuguucccagagcccacuuuuuuuucuuuuuuugaaauaaaauagccugucuuucagaucucaaaggcucuuuucagagccaccaaaaaaaaaaaaaaaaaaaaaaaaaaaaaaaaaaaaaaaaaaaaaaaaaaaaaaaaaaaaaaaaaaaaaaaaaaaaaaaaaaaaaaaaaaaaaaaaaaaaa

SEQ ID NO: 35121 - RNA, 1745 nt, Artificial Sequence
  mRNA product Design a-1 (hSL-A100) comprising derived and/or modified sequence from LASV(Lassa virus/H.sapiens-wt/NGA/2016/ISTH_0017;Clade II)__AVO03567__GPCmut9 (opt1)
aggagagucccgcagucggcguccagcggcucugcuuguucgugugugugucguugcaggccuuauucaagcuuaccaugggccagaucaucaccuucuuccaggaggugccccacgucaucgaggaggugaugaacaucgugcugaucgcccucagccugcuggccauccucaaggggaucuacaacgucgcgaccugcggccuguucgggcugguguccuuccuccugcugugcggccgcagcugcuccacgaccuacaaggggguguacgagcuccagacccuggagcuggacauggccagccucaacaugaccaugccgcuguccugcacgaagaacaacagccaccacuacaucauggucggcaacgagaccggccuggagcucacccugaccaacacguccaucaucaaccacaaguucugcaaccugagcgacgcccacaagaagaaccucuacgaccacgcccugauguccaucaucagcaccuuccaccuguccauccccaacuucaaccaguacgaggccaugagcugcgacuucaacgggggcaagaucuccgugcaguacaaccucagccacaccuacgcgaucgacgccgccaaccacugcgggaccaucgccaacggcgugcugcagacguucaugcggauggcguggggcggguccuacaucgcccuggacagcggcugcggguccugggacugcaucaugaccagcuaccaguaccucaucauccagaacaccaccugggaggaccacugccaguucucccgccccagccccaucggcuaccuggggcugcucagccagcggacgcgcgacaucuacaucucccggcgccugcugggcaccuucaccuggacccucagcgacuccgagggcaacgagacgcccgggggcuacugccugacccgguggaugcugaucgaggccgagcucaagugcuucgggaacaccgccgucgccaagugcaacgagaagcacgacgaggaguucugcgacaugcugcgccuguucgacuucaacaagcaggcgauccggcgccucaagaccgaggcccagaugagcauccagcugaucaacaaggccgugaacgcccugaucaacgaccagcucaucaugaagaaccaccuccgggacaucaugugcauccccuacugcaacuacuccaaguacugguaccugaaccacacggugaccgggaagaccagccugccccgcugcuggcuggucuccaacggcagcuaccugaacgagacccacuucuccgacgacaucgagcagcaggccgacaacaugaucacggagcuccugcagaaggaguacauggaccggcagggcaagaccccgcuggggcucguggaccuguucguguucagcaccuccuucuaccugaucagcaucuuccugcaccucguccgcaucccgacccaccggcacgugaucggcaagcccugccccaagccccaccgccugaaccacauggggaucugcuccugcggccuguacaagcacccgggggugcccgucaaguggaagcggugaggacuagucccuguucccagagcccacuuuuuuuucuuuuuuugaaauaaaauagccugucuuucagaucucaaaggcucuuuucagagccaccaaaaaaaaaaaaaaaaaaaaaaaaaaaaaaaaaaaaaaaaaaaaaaaaaaaaaaaaaaaaaaaaaaaaaaaaaaaaaaaaaaaaaaaaaaaaaaaaaaaaa

SEQ ID NO: 35122 - RNA, 1745 nt, Artificial Sequence
  mRNA product Design a-1 (hSL-A100) comprising derived and/or modified sequence from LASV(Lassa virus/H.sapiens-wt/NGA/2018/ISTH_0959;Clade II)__AVV65099__GPCmut9 (opt1)
aggagagucccgcagucggcguccagcggcucugcuuguucgugugugugucguugcaggccuuauucaagcuuaccaugggccagaucaucaccuucuuccaggaggugccccacgucaucgaggaggugaugaacaucgugcugaucgcccucagccugcuggccauccucaaggggaucuacaacgucgugaccugcggccuguucgggcugguguccuuccuccugcugugcggccgcagcugcuccacgaccuacaagggggucuacgagcuccagacccuggagcuggacauggcgagccucaacaugaccaugccgcuguccugcacgaagaacaacagccaccacuacaucauggugggcaacgagaccggccuggagcucacccugaccaacacguccaucaucaaccacaaguucugcaaccugagcgacgcccacaagaagaaccucuacgaccacgcccugauguccaucaucagcaccuuccaccuguccauccccaacuucaaccaguacgaggccaugagcugcgacuucaacgggggcaagaucuccgugcaguacaaccucagccacgccuacgcgaucgacgccgccaaccacugcgggaccaucgccaacggcguccugcagaccuucaugcggauggcguggggcggguccuacaucgcccuggacagcggcugcggguccugggacugcaucaugacgagcuaccaguaccucaucauccagaacaccaccugggaggaccacugccaguucucccgccccagccccaucggcuaccuggggcugcucagccagcggacccgcgacaucuacaucucccggcgccugcugggcacguucaccuggacccucagcgacuccgagggcaacgagacccccgggggcuacugccugacgcgguggaugcugaucgaggccgagcucaagugcuucgggaacaccgccguggccaagugcaacgagaagcacgacgaggaguucugcgacaugcugcgccuguucgacuucaacaagcaggcgauccggcgccucaagaccgaggcccagaugagcauccagcugaucaacaaggccgugaacgcccugaucaacgaccagcucaucaugaagaaccaccuccgggacaucaugugcaucccguacugcaacuacuccaaguacugguaccugaaccacaccgucacggggaagaccagccugccccgcugcuggcugguguccaacggcagcuaccugaacgagacccacuucuccgacgacaucgagcagcaggccgacaacaugaucaccgagcuccugcagaaggaguacaucgaccggcagggcaagacgccccuggggcucguggaccuguucgucuucagcaccuccuucuaccugaucagcaucuuccugcaccucgugaagaucccgacccaccgccacgugaucggcaagcccugccccaagccccaccggcugaaccacauggggaucugcuccugcggccuguacaagcacccggggguccccgugaaguggaagcgcugaggacuagucccuguucccagagcccacuuuuuuuucuuuuuuugaaauaaaauagccugucuuucagaucucaaaggcucuuuucagagccaccaaaaaaaaaaaaaaaaaaaaaaaaaaaaaaaaaaaaaaaaaaaaaaaaaaaaaaaaaaaaaaaaaaaaaaaaaaaaaaaaaaaaaaaaaaaaaaaaaaaaa

SEQ ID NO: 35123 - RNA, 1745 nt, Artificial Sequence
  mRNA product Design a-1 (hSL-A100) comprising derived and/or modified sequence from LASV(LASV003-NIG-2008;Clade II)__AIT17580__GPCmut9 (opt1)
aggagagucccgcagucggcguccagcggcucugcuuguucgugugugugucguugcaggccuuauucaagcuuaccaugggccagaucaucaccuucuuccaggaggugccccacgucaucgaggaggugaugaacaucgugcugaucgcccucagccugcuggccauccucaaggggaucuacaacgucgcgaccugcggccuguucgggcugguguccuuccuccugcugugcggccgcagcugcuccacgaccuacaaggggguguacgagcuccagacccuggagcuggacauggccagccucaacaugaccaugccgcuguccugcacgaagaacaacagccaccacuacaucauggucggcaacgagaccggccuggagcucacccugaccaacacguccaucaucaaccacaaguucugcaaccugagcgacgcccacaagaagaaccucuacgaccacgcccugauguccaucaucagcaccuuccaccuguccauccccaacuucaaccaguacgaggccaugagcugcgacuucaacgggggcaagaucuccgugcaguacaaccucagccacaccuacgcgguggacgccgccaaccacugcgggaccaucgccaacggcguccugcagacguucaugcggauggcguggggcggguccuacaucgcccuggacagcggcugcggguccugggacugcaucaugaccagcuaccaguaccucaucauccagaacaccaccugggaggaccacugccaguucucccgccccagccccaucggcuaccuggggcugcucagccagcggacgcgcgacaucuacaucucccggcgccugcugggcaccuucaccuggacccucagcgacuccgagagcaacgagacgccgggcggguacugccugacccgguggaugcugaucgaggccgagcucaagugcuucggcaacaccgccguggccaagugcaacgagaagcacgacgaggaguucugcgacaugcugcgccuguucgacuucaacaagcaggcgauccggcgccucaaggccgaggcccagauguccauccagcugaucaacaaggccgugaacgcccugaucaacgaccagcucaucaugaagaaccaccuccgggacaucaugugcauccccuacugcaacuacagcaaguacugguaccugaaccacaccgucacgggccgcaccucccugccccggugcuggcuggugagcaacggguccuaccugaacgagacccacuucagcgacgacaucgagcagcaggcggacaacaugaucaccgagcuccugcagaaggaguacauggaccgccagggcaagacgccccugggccucguggaccuguucgucuucuccaccagcuucuaccugaucuccaucuuccugcaccucgugaagaucccgacccaccggcacgugaucgggaagcccugccccaagccccaccgccugaaccacaugggcaucugcagcugcgggcuguacaagcacccgggcguccccgugaaguggaagcggugaggacuagucccuguucccagagcccacuuuuuuuucuuuuuuugaaauaaaauagccugucuuucagaucucaaaggcucuuuucagagccaccaaaaaaaaaaaaaaaaaaaaaaaaaaaaaaaaaaaaaaaaaaaaaaaaaaaaaaaaaaaaaaaaaaaaaaaaaaaaaaaaaaaaaaaaaaaaaaaaaaaaa

SEQ ID NO: 35124 - RNA, 1745 nt, Artificial Sequence
  mRNA product Design a-1 (hSL-A100) comprising derived and/or modified sequence from LASV(LASV035-NIG-2009;Clade II)__AIT17588__GPCmut9 (opt1)
aggagagucccgcagucggcguccagcggcucugcuuguucgugugugugucguugcaggccuuauucaagcuuaccaugggccagaucaucaccuucuuccaggaggugccccacgucaucgaggaggugaugaacaucgugcugaucgcccucagccugcuggccauccucaaggggaucuacaacgucgcgaccugcggccuguucgggcugguguccuuccuccugcugugcggccgcagcugcuccacgaccuacaaggggguguacgagcuccagacccuggagcuggacauggccagccucaacaugaccaugccgcuguccugcacgaagaacaacagccaccacuacaucauggucggcaacgagaccggccuggagcucacccugaccaacacguccaucaucaaccacaaguucugcaaccugagcgacgcccacaagaagaaccucuacgaccacgcccugauguccaucaucagcaccuuccaccuguccauccccaacuucaaccaguacgaggccaugagcugcgacuucaacgggggcaagaucuccgugcaguacaaccucagccacgcguacgccguggacgccgccaaccacugcgggaccaucgcgaacggcguccugcagaccuucaugcggauggccuggggcggguccuacaucgcccuggacagcggcugcggguccugggacugcaucaugacgagcuaccaguaccucaucauccagaacaccaccugggaggaccacugccaguucucccgccccagccccaucggcuaccuggggcugcucagccagcggacccgcgacaucuacaucucccggcgccugcugggcacguucaccuggacccucagcgacuccgagggcaacgagacccccgggggcuacugccugacgcgguggaugcugaucgaggccgagcucaagugcuucgggaacaccgccguggcgaagugcaacgagaagcacgacgaggaguucugcgacaugcugcgccuguucgacuucaacaagcaggccauccggcgccucaaggccgaggcccagaugagcauccagcugaucaacaaggccgugaacgcgcugaucaacgaccagcucaucaugaagaaccaccuccgggacaucaugugcauccccuacugcaacuacuccaaguacugguaccugaaccacaccgucaccgggaagacgagccugccccgcugcuggcugguguccaacggcagcuaccugaacgagacccacuucuccgacgacaucgagcagcaggccgacaacaugaucaccgagcuccugcagaaggaguacaucgaccggcagggcaagaccccgcuggggcucguggaccuguucgucuucagcacguccuucuaccugaucagcaucuuccugcaccucgugaagaucccgacccaccgccacgugaucggcaagcccugccccaagccccaccggcugaaccacauggggaucugcuccugcggccuguacaagcacccggggguccccgugaaguggaagcgcugaggacuagucccuguucccagagcccacuuuuuuuucuuuuuuugaaauaaaauagccugucuuucagaucucaaaggcucuuuucagagccaccaaaaaaaaaaaaaaaaaaaaaaaaaaaaaaaaaaaaaaaaaaaaaaaaaaaaaaaaaaaaaaaaaaaaaaaaaaaaaaaaaaaaaaaaaaaaaaaaaaaaa

SEQ ID NO: 35125 - RNA, 1745 nt, Artificial Sequence
  mRNA product Design a-1 (hSL-A100) comprising derived and/or modified sequence from LASV(LASV1000-NIG-2009;Clade II)__AIT17782__GPCmut9 (opt1)
aggagagucccgcagucggcguccagcggcucugcuuguucgugugugugucguugcaggccuuauucaagcuuaccaugggccagaucaucaccuucuuccaggaggugccccacgucaucgaggaggugaugaacaucgugcugaucgcccucagccugcuggccauccucaaggggaucuacaacgucgcgaccugcggccuguucgggcugguguccuuccuccugcugugcggccgcagcugcuccacgaccuacaaggggguguacgagcuccagacccuggagcuggacauggccagccucaacaugaccaugccgcuguccugcacgaagaacaacagccaccacuacaucauggucggcaacgagaccggccuggagcucacccugaccaacacguccaucaucaaccacaaguucugcaaccugagcgacgcccacaagaagaaccucuacgaccacgcccugauguccaucaucagcaccuuccaccuguccauccccaacuucaaccaguacgaggccaugagcugcgacuucaacgggggcaagaucuccgugcaguacaaccucagccacaccuacgcgguggacgccgccaaccacugcgggaccaucgccaacggcguccugcagacguucaugcggauggcguggggcggguccuacaucgcccuggacagcggcugcggguccugggacugcaucaugaccagcuaccaguaccucaucauccagaacaccaccugggaggaccacugccaguucucccgccccagccccaucggcuaccuggggcugcucagccagcggacgcgcgacaucuacaucucccggcgccugcugggcaccuucaccuggacccucagcgacuccgagggcaacgagacgcccgggggcuacugccugacccgguggaugcugaucgaggccgagcucaagugcuucgggaacaccgccguggccaagugcaacgagaagcacgacgaggaguucugcgacaugcugcgccuguucgacuucaacaagcaggcgaucaagcggcucaagaccgaggcccagaugagcauccagcugaucaacaaggccgugaacgcccugaucaacgaccagcucaucaugaagaaccaccuccgcgacaucaugugcauccccuacugcaacuacuccaaguacugguaccugaaccacacggucaccgggaagaccagccugccccggugcuggcugguguccaacggcagcuaccugaacgagacccacuucuccgacgacaucgagcagcaggccgacaacaugaucacggagcuccugcagaaggaguacaucgaccgccagggcaagaccccgcuggggcucguggaccuguucgucuucagcaccuccuucuaccugaucagcaucuuccugcaccucgugaagaucccgacccaccggcacguggucggcaagcccugccccaagccccaccgccugaaccacauggggaucugcuccugcggccuguacaagcacccgggggugcccgugaaguggaagcggugaggacuagucccuguucccagagcccacuuuuuuuucuuuuuuugaaauaaaauagccugucuuucagaucucaaaggcucuuuucagagccaccaaaaaaaaaaaaaaaaaaaaaaaaaaaaaaaaaaaaaaaaaaaaaaaaaaaaaaaaaaaaaaaaaaaaaaaaaaaaaaaaaaaaaaaaaaaaaaaaaaaaa

SEQ ID NO: 35126 - RNA, 1745 nt, Artificial Sequence
  mRNA product Design a-1 (hSL-A100) comprising derived and/or modified sequence from LASV(LASV221-NIG-2010;Clade II)__AIT17624__GPCmut9 (opt1)
aggagagucccgcagucggcguccagcggcucugcuuguucgugugugugucguugcaggccuuauucaagcuuaccaugggccagaucaucaccuucuuccaggaggugccccacgucaucgaggaggugaugaacaucgugcugaucgcccucagccugcuggccauccucaaggggaucuacaacgucgcgaccugcggccuguucgggcugguguccuuccuccugcugugcggccgcagcugcuccacgaccuacaaggggguguacgagcuccagacccuggagcuggacauggccagccucaacaugaccaugccgcuguccugcacgaagaacaacagccaccacuacaucauggucggcaacgagaccggccuggagcucacccugaccaacacguccaucaucaaccacaaguucugcaaccugagcgacgcccacaagaagaaccucuacgaccacgcccugauguccaucaucagcaccuuccaccuguccauccccaacuucaaccaguacgaggccaugagcugcgacuucaacgggggcaagaucuccgugcaguacaaccucagccacaccuacgcgaucgacgccgccaaccacugcgggaccaucgccaacggcgugcugcagacguucaugcggauggcguggggcggguccuacaucgcccuggacagcggcugcggguccugggacugcaucaugaccagcuaccaguaccucaucauccagaacaccaccugggaggaccacugccaguucucccgccccagccccaucggcuaccuggggcugcucagccagcggacgcgcgacaucuacaucucccggcgccugcugggcaccuucaccuggacccucagcgacuccgagggcaacgagacgcccgggggcuacugccugacccgguggaugcugaucgaggccgagcucaagugcuucgggaacaccgccgucgccaagugcaacgagaagcacgacgaggaguucugcgacaugcugcgccuguucgacuucaacaagcaggcgauccggcgccucaagaccgaggcccagaugagcauccagcugaucaacaaggccgugaacgcccugaucaacgaccagcucaucaugaagaaccaccuccgggacaucaugugcauccccuacugcaacuacuccaaguacugguaccugaaccacacggugaccgggaagaccagccugccccgcugcuggcuggucuccaacggcagcuaccugaacgagacccacuucuccgacgacaucgagcagcaggccgacaacaugaucacggagaugcuccagaaggaguacauggaccggcagggcaagaccccgcuggggcugguggaccucuucguguucagcaccuccuucuaccugaucagcaucuuccugcaccuggucaagaucccgacccaccgccacgugaucggcaagcccugccccaagccccaccggcucaaccacauggggaucugcuccugcggccuguacaagcacccgggggugcccgucaaguggaagcgcugaggacuagucccuguucccagagcccacuuuuuuuucuuuuuuugaaauaaaauagccugucuuucagaucucaaaggcucuuuucagagccaccaaaaaaaaaaaaaaaaaaaaaaaaaaaaaaaaaaaaaaaaaaaaaaaaaaaaaaaaaaaaaaaaaaaaaaaaaaaaaaaaaaaaaaaaaaaaaaaaaaaaa

SEQ ID NO: 35127 - RNA, 1745 nt, Artificial Sequence
  mRNA product Design a-1 (hSL-A100) comprising derived and/or modified sequence from LASV(LASV237-NIG-2010;Clade II)__AIT17638__GPCmut9 (opt1)
aggagagucccgcagucggcguccagcggcucugcuuguucgugugugugucguugcaggccuuauucaagcuuaccaugggccagaucaucaccuucuuccaggaggugccccacgucaucgaggaggugaugaacaucgugcugaucgcccucagccugcuggccauccucaaggggaucuacaacgucgcgaccugcggccuguucgggcugguguccuuccuccugcugugcggccgcagcugcuccacgaccuacaaggggguguacgagcuccagacccuggagcuggacauggccagccucaacaugaccaugccgcuguccugcacgaagaacaacagccaccacuacaucauggucggcaacgagaccggccuggagcucacccugaccaacacguccaucaucaaccacaaguucugcaaccugagcgacgcccacaagaaggaccucuacgaccacgcccugauguccaucaucagcaccuuccaccuguccauccccaacuucaaccaguacgaggccaugagcugcgacuucaacgggggcaagaucuccgugcaguacaaccucagccacaccuacgcgguggacgccgccaaccacugcgggaccaucgccaacggcguccugcagacguucaugcggauggcguggggcggguccuacaucgcccuggacagcggcugcggguccugggacugcaucaugaccagcuaccaguaccucaucauccagaacaccaccugggaggaccacugccaguucucccgccccagccccaucggcuaccuggggcugcucagccagcggacgcgcgacaucuacaucucccggcgccugcugggcaccuucaccuggacccucagcgacuccgagggcaacgagacgcccgggggcuacugccugacccgguggaugcugaucgaggccgagcucaagugcuucgggaacaccgccguggccaagugcaacgagaagcacgacgaggaguucugcgacaugcugcgccuguucgacuucaacaagcaggcgauccggcgccucaagaccgaggcccagaugagcauccagcugaucaacaaggccgugaacgcccugaucaacgaccagcucaucaugaagaaccaccuccgggacaucaugugcauccccuacugcaacuacuccaaguacugguaccugaaccacacggucaccgggaagaccagccugccccgcugcuggcugguguccaacggcagcuaccugaacgagacccacuucuccgacgacaucgagcagcaggccgacaacaugaucacggagcuccugcagaaggaguacauggaccggcagggcaagaccccgcuggggcucguggaccuguucgucuucagcaccuccuucuaccugaucagcaucuuccugcaccucaucaagaucccgacccaccgccacaucacgggcaagcccugccccaagccccaccggcugaaccacauggggaucugcuccugcggccuguacaagcacccgggggugcccgugaaguggaagcgcugaggacuagucccuguucccagagcccacuuuuuuuucuuuuuuugaaauaaaauagccugucuuucagaucucaaaggcucuuuucagagccaccaaaaaaaaaaaaaaaaaaaaaaaaaaaaaaaaaaaaaaaaaaaaaaaaaaaaaaaaaaaaaaaaaaaaaaaaaaaaaaaaaaaaaaaaaaaaaaaaaaaaa

SEQ ID NO: 35128 - RNA, 1745 nt, Artificial Sequence
  mRNA product Design a-1 (hSL-A100) comprising derived and/or modified sequence from LASV(LASV253-NIG-2011;Clade II)__AIT17670__GPCmut9 (opt1)
aggagagucccgcagucggcguccagcggcucugcuuguucgugugugugucguugcaggccuuauucaagcuuaccaugggccagaucaucaccuucuuccaggaggugccccacgucaucgaggaggugaugaacaucgugcugaucgcccucagccugcuggccauccucaaggggaucuacaacgucgcgaccugcggccuguucgggcugguguccuuccuccugcugugcggccgcagcugcuccacgaccuacaaggggguguacgagcuccagacccuggagcuggacauggccagccucaacaugaccaugccgcuguccugcacgaagaacaacagccaccacuacaucauggucggcaacgagaccggccuggagcucacccugaccaacacguccaucaucaaccacaaguucugcaaccugagcgacgcccacaagaagaaccucuacgaccacgcccugauguccaucaucagcaccuuccaccuguccauccccaacuucaaccaguacgaggccaugagcugcgacuucaacgggggcaagaucuccgugcaguacaaccucagccacaccuacgcgguggacgccgccaaccacugcgggaccaucgccaacggcguccugcagacguucaugcggauggcguggggcggguccuacaucgcccuggacagcggcugcggguccugggacugcaucaugaccagcuaccaguaccucaucauccagaacaccaccugggaggaccacugccaguucucccgccccagccccaucggcuaccuggggcugcucagccagcggacgcgcgacaucuacaucucccggcgccugcugggcaccuucaccuggacccucagcgacuccgagggcaacgagacgcccgggggcuacugccugacccgguggaugcugaucgaggccgagcucaagugcuucgggaacaccgccguggccaagugcaacgagaagcacgacgaggaguucugcgacaugcugcgccuguucgacuucaacaagcaggcgauccggcgccucaaggccgaggcccagaugagcauccagcugaucaacaaggccgugaacgcccugaucaacgaccagcucaucaugaagaaccaccuccgggacaucaugugcaucccguacugcaacuacuccaaguacugguaccugaaccacaccgucacggggcgcaccagccugccccggugcuggcugguguccaacggcagcuaccugaacgagacccacuucuccgacgacaucgagcagcaggcggacaacaugaucaccgagcuccugcagaaggaguacaucgaccgccagggcaagacgccccuggggcucguggaccuguucgucuucagcaccuccuucuaccugaucagcaucuuccugcaccucgugaagaucccgacccaccggcacaucaucggcaagcccugccccaagccccaccgccugaaccacauggggaucugcuccugcggccuguacaagcacccgggggugcccgucaaguggaagcggugaggacuagucccuguucccagagcccacuuuuuuuucuuuuuuugaaauaaaauagccugucuuucagaucucaaaggcucuuuucagagccaccaaaaaaaaaaaaaaaaaaaaaaaaaaaaaaaaaaaaaaaaaaaaaaaaaaaaaaaaaaaaaaaaaaaaaaaaaaaaaaaaaaaaaaaaaaaaaaaaaaaaa

SEQ ID NO: 35129 - RNA, 1745 nt, Artificial Sequence
  mRNA product Design a-1 (hSL-A100) comprising derived and/or modified sequence from LASV(LASV254-NIG-2011;Clade II)__AIT17674__GPCmut9 (opt1)
aggagagucccgcagucggcguccagcggcucugcuuguucgugugugugucguugcaggccuuauucaagcuuaccaugggccagaucaucaccuucuuccaggaggugccccacgucaucgaggaggugaugaacaucgugcugaucgcccucagccugcuggccauccucaaggggaucuacaacgucgcgaccugcggccuguucgggcugguguccuuccuccugcugugcggccgcagcugcuccacgaccuacaaggggguguacgagcuccagacccuggagcuggacaugaccaaccucaacaugacgaugccgcugagcugcaccaagaacaacucccaccacuacaucauggucggcaacgagaccggccuggagcucacccugacgaacaccagcaucaucaaccacaaguucugcaaccuguccgacgcccacaagaagaaccucuacaaccacgcccugaugagcaucaucuccaccuuccaccugagcauccccaacuucaaccaguacgaggccauguccugcgacuucaacgggggcaagaucagcgugcaguacaaccucucccacagcuacgccguggacgcggccaaccacugcgggaccaucgccaacggcguccugcagacguucaugcggauggccuggggcggguccuacaucgcgcuggacagcggcugcgggaacugggacugcaucaugaccuccuaccaguaccucaucauccagaacaccaccugggaggaccacugccaguucagccgccccucccccaucggcuaccuggggcugcucagccagcggacgcgcgacaucuacaucagccggcgccugcugggcaccuucaccuggacccucuccgacagcgagggcaacgagacgcccgggggcuacugccugacccgguggaugcugaucgaggccgagcucaagugcuucgggaacaccgccguggccaagugcaacgagaagcacgacgaggaguucugcgacaugcugcgccuguucgacuucaacaagcaggccauccggcgccucaagaccgaggcgcaggccaacauccagcugaucaacaaggccgugaacgcccugaucaacgaccagcucaucaugaagaaccaccuccgggacaucaugugcauccccuacugcaacuacuccaaguacugguaccugaaccacacggucaccgggaagaccagccugccccgcugcuggcugguguccaacggcagcuaccugaacgagacccacuucuccgacgacaucgagcagcaggccgacaacaugaucacggagcuccugcagaaggaguacauggaccggcagggcaagaccccgcuggggcucguggaccuguucgucuucagcaccuccuucuaccugaucagcaucuuccugcaccucgugaagaucccgacccaccgccacgugaucggcaagcccugccccaagccccaccggcugaaccacauggggaucugcuccugcggccuguacaagcacccggggguccccgugaaguggaagcgcugaggacuagucccuguucccagagcccacuuuuuuuucuuuuuuugaaauaaaauagccugucuuucagaucucaaaggcucuuuucagagccaccaaaaaaaaaaaaaaaaaaaaaaaaaaaaaaaaaaaaaaaaaaaaaaaaaaaaaaaaaaaaaaaaaaaaaaaaaaaaaaaaaaaaaaaaaaaaaaaaaaaaa

SEQ ID NO: 35130 - RNA, 1745 nt, Artificial Sequence
  mRNA product Design a-1 (hSL-A100) comprising derived and/or modified sequence from LASV(Nig08-A19;Clade III)__ADU56618__GPCmut9 (opt1)
aggagagucccgcagucggcguccagcggcucugcuuguucgugugugugucguugcaggccuuauucaagcuuaccaugggccagaucgugaccuucuuccaggaggucccccacgugaucgaggaggugaugaacaucguccugaucgcccucagcauccuggccauccugaaggggcucuacaacaucgcgaccugcggccugaucgggcuggugacguuccuccugcuguccggccgcagcugcuccaugaccuacaaggggguguacgagcuccagacccuggagcugaacaugaacacccucaacaugacgaugccgcugagcugcaccaagaacaacucccaccacuacaucauggucggcaacgagaccggccuggagcucacccugacgaacaccagccugcuccaccacaaguucugcaaccuguccgacgcccacaagaagaaccuguacgaccacacccucaugagcaucaucuccaccuuccaccugagcauccccaacuucaaccaguacgaggccauguccugcgacuucaacgggggcaagaucacggugcaguacaaccugagccacuccuacgccaucgacgccgcgaaccacugcgggaccguggccaacggcguccuccagaccuucaugcggauggccuggggcgggagcuacaucgcccuggacuccggcugcgggaagugggacugcaucaugaccagcuaccaguaccugaucauccagaacacgaccugggaggaccacugccaguucucccggcccagccccaucggcuaccucgggcugcugucccagcgcacccgggacaucuacaucagccgccggcuccugggcaccuucacguggacccugagcgacuccgagggcaacgagacccccgggggcuacugccucacccgcuggaugcugaucgaggcggagcugaagugcuucgggaacacggccguggccaagugcaacgagaagcacgacgaggaguucugcgacaugcuccggcuguucgacuucaacaagcaggccauccgccggcugaaggccgaggcgcagaugagcauccagcucaucaacaaggccgugaacgcccugaucaacgaccagcugaucaugaagaaccaccuccgcgacaucaugugcauccccuacugcaacuacuccaaguacugguaccugaaccacaccagcaccgggcggaccucccugccccgcugcuggcucgucagcaacggcuccuaccugaacgagacgcacuucagcgacgacaucgagcagcaggccgacaacaugaucaccgagaugcugcagaaggaguaccucgaccggcagggcaagaccccgcuggggcugguggaccuguucguguucuccaccagcuucuaccucaucuccaucuuccugcaccuggucaagaucccgacgcaccgccacaucgugggcaagcccugccccaagccccaccggcucaaccacauggggaucugcagcugcggccuguacaagcagccgggggugcccguccgcuggaagcggugaggacuagucccuguucccagagcccacuuuuuuuucuuuuuuugaaauaaaauagccugucuuucagaucucaaaggcucuuuucagagccaccaaaaaaaaaaaaaaaaaaaaaaaaaaaaaaaaaaaaaaaaaaaaaaaaaaaaaaaaaaaaaaaaaaaaaaaaaaaaaaaaaaaaaaaaaaaaaaaaaaaaa

SEQ ID NO: 35131 - RNA, 1748 nt, Artificial Sequence
  mRNA product Design a-1 (hSL-A100) comprising derived and/or modified sequence from LASV(G1180-SLE-2010;Clade IV)__AIT17168__GPCmut9 (opt1)
aggagagucccgcagucggcguccagcggcucugcuuguucgugugugugucguugcaggccuuauucaagcuuaccaugggccagaucgugaccuucuuccaggaggucccccacgugaucgaggaggugaugaacaucguccugaucgcccucagcauccuggccgugcugaaggggcucuacaacuucgcgaccugcggccugguggggcugcucaccuuccugcugcucugcggccgcuccugcaccgccagccgguacaagggggucuacgagcugcagacccuggagcucaacauggagacccugaacaugacgaugccgcuguccugcaccaagaacaacagccaccacuacaucauggugggcaacgagaccggccucgagcugacccugacgaacaccuccaucaucaaccacaaguucugcaaccucagcgacgcccacaagaagaaccuguacgaccacgcccugauguccaucaucagcaccuuccaccucuccauccccaacuucaaccaguacgaggccaugagcugcgacuucaacgggggcaagaucuccgugcaguacaaccugagccacuccuacgcgggggacgccgccaaccacugcggcaccgucgccaacggggugcugcagacguucaugcgcauggcguggggcggcagcuacaucgcccucgacuccgggugcggcagcugggacugcaucaugaccuccuaccaguaccugaucauccagaacaccaccugggaggaccacugccaguucagccggcccucccccaucggguaccugggccuccugagccagcgcacgcgggacaucuacaucagccgccggcugcucggcaccuucaccuggacccuguccgacagcgaggggaaggacacgccgggcggguacugccugacccgcuggaugcucaucgaggccgagcugaagugcuucggcaacaccgccguggccaagugcaacgagaagcacgacgaggaguucugcgacaugcugcggcuguucgacuucaacaagcaggcgauccagcgccugaaggccgaggcccagauguccauccagcugaucaacaaggccgucaacgcccucaucaacgaccagcugaucaugaagaaccaccuccgggacaucaugugcauccccuacugcaacuacagcaaguacugguaccucaaccacaccacgaccggcaagaccucccugcccaagugcuggcuggugagcaacggcuccuaccucaacgagacccacuucagcgacgacaucgagcagcaggcggacaacaugaucacggagaugcugcagaaggaguacauggagcgccaggggaagacgccccugggccucguggaccuguucgucuucuccaccagcuucuaccugaucuccaucuuccugcaccucgugaagaucccgacccaccggcacaucgugggcaagagcugccccaagccccaccgccugaaccacauggggaucugcuccugcgggcuguacaagcagcccggcgucccggugaaguggaagcggugaggacuagucccuguucccagagcccacuuuuuuuucuuuuuuugaaauaaaauagccugucuuucagaucucaaaggcucuuuucagagccaccaaaaaaaaaaaaaaaaaaaaaaaaaaaaaaaaaaaaaaaaaaaaaaaaaaaaaaaaaaaaaaaaaaaaaaaaaaaaaaaaaaaaaaaaaaaaaaaaaaaaa

SEQ ID NO: 35132 - RNA, 1748 nt, Artificial Sequence
  mRNA product Design a-1 (hSL-A100) comprising derived and/or modified sequence from LASV(G1442-SLE-2011;Clade IV)__AIT17180__GPCmut9 (opt1)
aggagagucccgcagucggcguccagcggcucugcuuguucgugugugugucguugcaggccuuauucaagcuuaccaugggccagaucgugaccuucuuccaggaggucccccacgugaucgaggaggugaugaacaucguccugaucgcccucagcauccuggccgugcugaaggggcucuacaacguggcgaccugcggccugaucgggcuggucacguuccuccugcugugcggccgcuccugcaccaccacccucuacaaggggguguacgagcugcagacgcuggagcucaacauggagacccugaacaugaccaugccgcugagcugcaccaagaacaacucccaccacuacauccgggugggcaacgagacgggccucgagcugacccugaccaacaccagcaucaucaaccacaaguucugcaaccucuccgacgcccacaagaagaaccuguacgaccacgcccugaugagcaucaucuccacguuccaccucagcauccccaacuucaaccaguacgaggccauguccugcgacuucaacgggggcaagaucagcguccaguacaaccugucccacagcuacgccggggacgcggccaaccacugcggcaccguggccaacggggugcugcagaccuucaugcgcauggccuggggcggcuccuacaucgcgcucgacagcgggugcggcaacugggacugcaucaugaccuccuaccaguaccugaucauccagaacacgaccugggacgaccacugccaguucagccgccccucccccaucggguaccugggccuccugagccagcggacccgcgacgucuacaucucccggcgccugcucggcaccuucacguggacccugagcgacagcgaggggaaggacaccccgggcggguacugccugacccgguggaugcucaucgaggccgagcugaagugcuucggcaacacggccguggccaagugcaacgagaagcacgacgaggaguucugcgacaugcugcgccucuucgacuucaacaagcaggccauccagcggcugaaggcggaggcccagauguccauccagcugaucaacaaggccgugaacgcccucaucaacgaccagcugaucaugaagaaccaccuccgcgacaucaugugcauccccuacugcaacuacagcaaguacugguaccugaacaacaccgccaccggcaagaccucccugcccaagugcuggcugaucagcaacggcuccuaccucaacgagacgcacuucagcgacgacaucgagcaggaggcggacaacaugaucaccgagaugcugcagaaggaguacauggagcggcaggggaagacgccccugggccucgucgaccuguucguguucuccaccagcuucuaccugaucuccaucuuccugcaccucgugaagaucccgacccaccgccacaucgucggcaagagcugccccaagccccaccggcugaaccacauggggaucugcuccugcgggcuguacaagcagcccggcgugccggugcgcuggaagcggugaggacuagucccuguucccagagcccacuuuuuuuucuuuuuuugaaauaaaauagccugucuuucagaucucaaaggcucuuuucagagccaccaaaaaaaaaaaaaaaaaaaaaaaaaaaaaaaaaaaaaaaaaaaaaaaaaaaaaaaaaaaaaaaaaaaaaaaaaaaaaaaaaaaaaaaaaaaaaaaaaaaaa

SEQ ID NO: 35133 - RNA, 1748 nt, Artificial Sequence
  mRNA product Design a-1 (hSL-A100) comprising derived and/or modified sequence from LASV(G3010-SLE-2013;Clade IV)__AIT17344__GPCmut9 (opt1)
aggagagucccgcagucggcguccagcggcucugcuuguucgugugugugucguugcaggccuuauucaagcuuaccaugggccagaucgugaccuucuuccaggaggucccccacgugaucgaggaggugaugaacaucguccugaucgcccucagcauccuggccgugcugaaggggcucuacaacuucgcgaccugcggccugguggggcuggucacguuccuccugcugugcggccgcuccugcaccaccagccucuacaaggggguguacgagcugcagacccuggagcucaacauggagacgcugaacaugaccaugccgcuguccugcaccaagaacaacagccaccacuacaucauggugggcaacgagaccggccucgagcugacgcugaccaacaccuccaucaucaaccacaaguucugcaaccucagcgacgcccacaagaagaaccuguacaaccacgcccugauguccaucaucagcaccuuccaccucuccauccccaacuucaaccaguacgaggccaugagcugcgacuucaacgggggcaagaucuccguccaguacaaccugagccacuccuacgccggggacgcggccagccacugcggcacgguggccaacggggugcugcagaccuucaugcggauggccuggggcggcuccuacaucgcgcucgacagcgggugcggcaagugggacugcaucaugaccuccuaccaguaccugaucauccagaacaccacgugggaggaccacugccaguucagccgccccucccccaucggguaccugggccuccugagccagcggacccgcgacaucuacaucagccggcgccugcucggcaccuucaccuggacgcuguccgacagcgaggggaaggacaccccgggcggguacugccugacccgguggaugcucaucgaggccgagcugaagugcuucggcaacaccgccgucgccaagugcaacgagaagcacgacgaggaguucugcgacaugcugcgccucuucgacuucaacaagcaggccauccagcggcugaagacggaggcgcagauguccauccagcugaucaacaaggccgugaacgcccucaucaacgaccagcugaucaugaagaaccaccuccgcgacaucaugugcauccccuacugcaacuacagcaaguacugguaccugaaccacaccaccaccggcaagacgucccugcccaagugcuggcuggugagcaacggcuccuaccucaacgagacccacuucagcgacgacaucgagcagcaggccgacaacaugaucaccgagaugcugcagaaggaguacauggagcggcaggggaagacgccccugggccucgucgaccuguucguguucuccaccagcuucuaccugaucuccaucuuccugcaccucgugaagaucccgacccaccgccacaucgucggcaagagcugccccaagccccaccggcugaaccacauggggaucugcuccugcgggcuguacaagcagcccggcgugccggugcgcuggaagcggugaggacuagucccuguucccagagcccacuuuuuuuucuuuuuuugaaauaaaauagccugucuuucagaucucaaaggcucuuuucagagccaccaaaaaaaaaaaaaaaaaaaaaaaaaaaaaaaaaaaaaaaaaaaaaaaaaaaaaaaaaaaaaaaaaaaaaaaaaaaaaaaaaaaaaaaaaaaaaaaaaaaaa

SEQ ID NO: 35134 - RNA, 1748 nt, Artificial Sequence
  mRNA product Design a-1 (hSL-A100) comprising derived and/or modified sequence from LASV(G502-SLE-2009;Clade IV)__AIT17126__GPCmut9 (opt1)
aggagagucccgcagucggcguccagcggcucugcuuguucgugugugugucguugcaggccuuauucaagcuuaccaugggccagaucgugaccuucuuccaggaggucccccacgugaucgaggaggugaugaacaucguccugaucgcccucagcauccuggccgugcugaaggggcucuacaacuucgcgaccugcggccugguggggcugcucacguuccugcugcucugcggccgcuccugcaccaccgggcuguacaagggcgucuacgagcugcagacccucgagcugaacauggagacgcugaacaugaccaugccgcucagcugcaccaagaacaacucccaccacuacaucauggugggcaacgagaccgggcuggagcugacgcucaccaacaccagcaucaucaaccacaaguucugcaaccuguccgacgcccacaagaagaaccuguacgaccacgcccucaugagcaucaucuccaccuuccaccugagcauccccaacuucaaccaguacgaggccauguccugcgacuucaacggcgggaagaucagcgugcaguacaaccugucccacagcuacgccggcgacgcggccgaccacugcgggacggucgccaacggcgugcuccagaccuucaugcggauggccuggggcggguccuacaucgcgcuggacagcggcugcgggcggugggacugcaucaugaccuccuaccaguaccugaucauccagaacaccacgugggaggaccacugccaguucagccgccccucccccaucggcuaccucggccugcugagccagcggacccgcgacaucuacaucucccggcgccuccuggggaccuucaccuggacgcugagcgacagcgagggcaaggacacccccgggggcuacugccucacccgguggaugcugaucgaggccgagcugaagugcuucgggaacaccgccguggccaagugcaacgagaagcacgacgaggaguucugcgacaugcuccgccuguucgacuucaacaagcaggccauccagcggcugaaggcggaggcccagauguccauccagcucaucaacaaggccgucaacgcccugaucaacgaccagcuggugaugaagaaccaccuccgcgacaucaugugcauccccuacugcaacuacagccgguacugguaccugaaccacacgaccaccggccgcaccucccugcccaagugcuggcucgugagcaacggguccuaccugaacgagacgcacuucagcgacgacaucgagcagcaggccgacaacaugaucaccgagaugcugcagaaggaguacauggagcggcagggcaagaccccgcucgggcuggucgaccuguucguguucuccaccagcuucuaccugaucuccaucuuccuccaccuggugaagaucccgacgcaccgccacaucgucggcaagagcugccccaagccccaccggcugaaccacauggggaucugcuccugcggccucuacaagcagcccggcgugccggugaaguggaagcgcugaggacuagucccuguucccagagcccacuuuuuuuucuuuuuuugaaauaaaauagccugucuuucagaucucaaaggcucuuuucagagccaccaaaaaaaaaaaaaaaaaaaaaaaaaaaaaaaaaaaaaaaaaaaaaaaaaaaaaaaaaaaaaaaaaaaaaaaaaaaaaaaaaaaaaaaaaaaaaaaaaaaaa

SEQ ID NO: 35135 - RNA, 1748 nt, Artificial Sequence
  mRNA product Design a-1 (hSL-A100) comprising derived and/or modified sequence from LASV(G733-SLE-2010;Clade IV)__AIT17154__GPCmut9 (opt1)
aggagagucccgcagucggcguccagcggcucugcuuguucgugugugugucguugcaggccuuauucaagcuuaccaugggccagaucgugaccuucuuccaggaggucccccacgugaucgaggaggugaugaacaucguccugaucgcccucagcauccuggccgugcugaaggggcucuacaacuucgcgaccugcggcaucguggggcuggucuccuuccugcuccugugcggccgcagcugcacgaccucccuguacaaggggguguacgagcuccagacccuggagcugaacauggagacccucaacaugacgaugccgcugagcugcaccaagaacaacucccaccacuacaucauggugggcaacgagaccggccuggagcucacccugacgaacaccagcaucaucaaccacaaguucugcaaccuguccgacgcccacaagaagaaccucuacgaccacgcccugaugagcaucaucuccaccuuccaccugagcauccccaacuucaaccaguacgaggccauguccugcgacuucaacgggggcaagaucagcguccaguacaaccucucccacagcuacgccggggacgcggccaaccacugcggcaccaucgccaacggggugcugcagacguucaugcggauggccuggggcggcuccuacaucgcgcuggacagcgggugcgaccggugggacugcaucaugaccuccuaccaguaccucaucauccagaacaccaccugggaggaccacugccaguucagccgccccucccccaucggcuaccuggggcugcucagccagcggacgcgcgacaucuacaucagccggcgccugcugggcaccuucaccuggacccucuccgacagcgagggcaaggacacgcccgggggcuacugccugacccgguggaugcugaucgaggccgagcucaagugcuucgggaacaccgccguggccaagugcaacgagaagcacgacgaggaguucugcgacaugcugcgccuguucgacuucaacaagcaggccauccagcggcucaaggcggaggcccagauguccauccagcugaucaacaaggccgucaacgcccugaucaacgaccagcucaucaugaagaaccaccuccgcgacaucaugugcauccccuacugcaacuacagcaaguacugguaccugaaccacaccacgaccgggaagaccucccugcccaagugcuggcuggugagcaacggcuccuaccugaacgagacccacuucagcgacgacaucgagcagcaggccgacaacaugaucacggagaugcuccagaaggaguacauggagcggcagggcaagaccccgcuggggcugguggaccucuucgucuucuccaccagcuucuaccugaucuccaucuuccugcaccuggugaagaucccgacccaccgccacguggucggcaagagcugccccaagccccaccggcucaaccacauggggaucugcuccugcggccuguacgggcagcccggcgugccggugaaguggaagcgcugaggacuagucccuguucccagagcccacuuuuuuuucuuuuuuugaaauaaaauagccugucuuucagaucucaaaggcucuuuucagagccaccaaaaaaaaaaaaaaaaaaaaaaaaaaaaaaaaaaaaaaaaaaaaaaaaaaaaaaaaaaaaaaaaaaaaaaaaaaaaaaaaaaaaaaaaaaaaaaaaaaaaa

SEQ ID NO: 35136 - RNA, 1748 nt, Artificial Sequence
  mRNA product Design a-1 (hSL-A100) comprising derived and/or modified sequence from MOPV/LASV reassortant(IGS-1;Clade IV)__AFY05576__GPCmut9 (opt1)
aggagagucccgcagucggcguccagcggcucugcuuguucgugugugugucguugcaggccuuauucaagcuuaccaugggccagaucgugaccuucuuccaggaggucccccacgugaucgaggaggugaugaacaucguccugaucgcccucagcgugcuggccgugcugaaggggcucuacaacuucgcgaccugcggccuggucgggcuggugacguuccuccugcugugcggccgcuccugcaccaccagccucuacaaggggguguacgagcugcagacccuggagcucaacauggagacgcugaacaugaccaugccgcuguccugcaccaagaacaacagccaccacuacaucauggucggcaacgagaccggccucgagcugacgcugaccaacaccuccaucaucaaccacaaguucugcaaccucagcgacgcccacaagaagaaccuguacgaccacgcccugauguccaucaucagcaccuuccaccucuccauccccaacuucaaccaguacgaggccaugagcugcgacuucaacgggggcaagaucuccgugcaguacaaccugagccacuccuacgccggggacgcggccaaccacugcggcacgguggccaacgggguccugcagaccuucaugcggauggccuggggcggcagcuacaucgcgcucgacuccgggugcggcaacugggacugcaucaugaccagcuaccaguaccugaucauccagaacaccacgugggaggaccacugccaguucucccggcccagccccaucggguaccugggccuccugucccagcgcacccgggacaucuacaucagccgccggcugcucggcaccuucaccuggacgcugagcgacuccgagggggaggacaccccgggcggguacugccugacccgcuggaugcucaucgaggccgagcugaagugcuucggcaacaccgccguggccaagugcaacgagaagcacgacgaggaguucugcgacaugcugcggcuguucgacuucaacaagcaggccauccagcgccugaaggcggaggcccagaugagcauccagcugaucaacaaggccgugaacgcccucaucaacgaccagcugaucaugaagaaccaccuccgggacaucaugugcauccccuacugcaacuacuccaaguacugguaccucaaccacacgaccaccggccgcaccagccugcccaagugcuggcuggucuccaacggcagcuaccucaacgagacgcacuucuccgacgacaucgagcagcaggccgacaacaugaucaccgagaugcugcagaaggaguacauggagcggcaggggaagacgccccugggccucguggaccuguucguguucagcaccuccuucuaccugaucagcaucuuccugcaccucgucaagaucccgacccaccgccacaucguggggaaguccugccccaagccccaccggcugaaccacaugggcaucugcagcugcgggcuguacaagcagcccggcgugccggucaaguggaagcgcugaggacuagucccuguucccagagcccacuuuuuuuucuuuuuuugaaauaaaauagccugucuuucagaucucaaaggcucuuuucagagccaccaaaaaaaaaaaaaaaaaaaaaaaaaaaaaaaaaaaaaaaaaaaaaaaaaaaaaaaaaaaaaaaaaaaaaaaaaaaaaaaaaaaaaaaaaaaaaaaaaaaaa

SEQ ID NO: 35137 - RNA, 1748 nt, Artificial Sequence
  mRNA product Design a-1 (hSL-A100) comprising derived and/or modified sequence from LASV(LM765-SLE-2012;Clade IV)__AIT17814__GPCmut9 (opt1)
aggagagucccgcagucggcguccagcggcucugcuuguucgugugugugucguugcaggccuuauucaagcuuaccaugggccagaucgugaccuucuuccaggaggucccccacgugaucgaggaggugaugaacaucguccugaucgcccucagcauccuggccgugcugaaggggcucuacaacuucgcgaccugcggccugguggggcuggucacguuccuccugcugugcggccgcuccugcaccaccagccucuacaaggggguguacgagcugcagacccuggagcucaacauggagacgcugaacaugaccaugccgcuguccugcaccaagaacaacagccaccacuacaucauggugggcaacgagaccggccucgagcugacgcugaccaacaccuccaucaucgaccacaaguucugcaaccucagcgacgcccaccggaagaaccuguacgaccacgcccugauguccaucaucagcaccuuccaccucuccauccccaacuucaaccaguacgaggccaugagcugcgacuucaacgggggcaagaucuccguccaguacaaccugagccacuccuacgccaaggacgcggccgaccacugcgggacgguggccaacggcgugcugcagaccuucaugcgcauggccuggggcgggagcuacaucgcgcucgacuccggcugcgggcgcugggacugcaucaugaccagcuaccaguaccugaucauccagaacaccacgugggaggaccacugccaguucucccggcccagccccaucggcuaccuggggcuccugucccagcgcacccgggacaucuacaucagccgccggcugcucggcaccuucaccuggacgcugagcgacuccgagggcaaggacacccccgggggcuacugccugacccgcuggaugcucaucgaggccgagcugaagugcuucgggaacaccgccgucgccaagugcaacgagaagcacgacgaggaguucugcgacaugcugcggcuguucgacuucaacaagcaggccauccagcgccugaaggcggaggcccagaugagcauccagcugaucaacaaggccgugaacgcccucaucaacgaccagcugaucaugaagaaccaccuccgggacaucaugugcauccccuacugcaacuacuccaaguacugguaccucaaccacacgaccaccgggaagaccagccugcccaagugcuggcugguguccaacggcagcuaccucaacgagacgcacuucuccgacgacaucgagcagcaggccgacaacaugaucaccgagaugcugcagaaggaguacauggagcgccagggcaagaccccgcuggggcucgucgaccuguucguguucagcaccuccuucuaccugaucagcaucuuccugcaccucgugaagaucccgacgcaccggcacaucgucggcaagcccugccccaagccccaccgccugaaccacauggggaucugcuccugcggccuguacaagcagccgggggugcccgugaaguggaagcggugaggacuagucccuguucccagagcccacuuuuuuuucuuuuuuugaaauaaaauagccugucuuucagaucucaaaggcucuuuucagagccaccaaaaaaaaaaaaaaaaaaaaaaaaaaaaaaaaaaaaaaaaaaaaaaaaaaaaaaaaaaaaaaaaaaaaaaaaaaaaaaaaaaaaaaaaaaaaaaaaaaaaa

SEQ ID NO: 35138 - RNA, 1748 nt, Artificial Sequence
  mRNA product Design a-1 (hSL-A100) comprising derived and/or modified sequence from LASV(LM776-SLE-2012;Clade IV)__AIT17824__GPCmut9 (opt1)
aggagagucccgcagucggcguccagcggcucugcuuguucgugugugugucguugcaggccuuauucaagcuuaccaugggccagaucgugaccuucuuccaggaggucccccacgugaucgaggaggugaugaacaucguccugaucgcccucagcauccuggccgugcugaaggggcucuacaacuucgcgaccugcggccugguggggcuggucacguuccuccugcugugcggccgcuccugcaccaccagcguguacaaggggguguacgagcuccagacccuggagcugaacauggagacgcucaacaugaccaugccgcuguccugcaccaagaacaacagccaccacuacaucauggucggcaacgagaccggccuggagcucacgcugaccaacaccuccaucaucaaccacaaguucugcaaccugagcgacgcccacaagaagaaccucuacgaccacgcccugauguccaucaucagcaccuuccaccuguccauccccaacuucaaccaguacgaggccaugagcugcgacuucaacgggggcaagaucuccgugcaguacaaccucagccacuccuacgccggggacgcggccaaccacugcggcacgguggccaacgggguccugcagaccuucaugcggauggccuggggcggcagcuacaucgcgcuggacuccgggugcggcaagugggacugcaucaugaccagcuaccaguaccucaucauccagaacaccacgugggaggaccacugccaguucucccgccccagccccaucggguaccugggccugcucucccagcggacccgcgacaucuacaucagccggcgccugcugggcaccuucaccuggacgcucagcgacuccgaggggaaggacaccccgggcggguacugccugacccgguggaugcugaucgaggccgagcucaagugcuucggcaacaccgccguggccaagugcaacgagaagcacgacgaggaguucugcgacaugcugcgccuguucgacuucaacaagcaggccauccagcggcucaaggcggaggcccagaugagcauccagcugaucaacaaggccgugaacgcccugaucaacgaccagcucaucaugaagaaccaccuccgcgacaucaugugcauccccuacugcaacuacuccaaguacugguaccugaaccacacgaccaccggcaagaccagccugcccaagugcuggcuggucuccaacggcagcuaccugaacgagacgcacuucuccgacgacaucgagcagcaggccgacaacaugaucaccgagaugcuccagaaggaguacauggagcggcaggggaagacgccccugggccugguggaccucuucguguucagcaccuccuucuaccugaucagcaucuuccugcaccuggucaagaucccgacccaccgccacaucguggggaaguccugccccaagccccaccggcucaaccacaugggcaucugcagcugcgggcuguacaagcagcccggcgugccgguccgcuggaagcggugaggacuagucccuguucccagagcccacuuuuuuuucuuuuuuugaaauaaaauagccugucuuucagaucucaaaggcucuuuucagagccaccaaaaaaaaaaaaaaaaaaaaaaaaaaaaaaaaaaaaaaaaaaaaaaaaaaaaaaaaaaaaaaaaaaaaaaaaaaaaaaaaaaaaaaaaaaaaaaaaaaaaa

SEQ ID NO: 35139 - RNA, 1748 nt, Artificial Sequence
  mRNA product Design a-1 (hSL-A100) comprising derived and/or modified sequence from LASV(Mad39;Clade IV)__ANH09722__GPCmut9 (opt1)
aggagagucccgcagucggcguccagcggcucugcuuguucgugugugugucguugcaggccuuauucaagcuuaccaugggccagaucgugaccuucuuccaggaggucccccacgugaucgaggaggugaugaacaucguccugaucgcccucagcauccuggccgugcugaaggggcucuacaacguggcgaccugcggccugaucgggcuggucacguuccuccugcugugcggccgcuccugcaccaccacccucuacaaggggguguacgagcugcaggcccuggagcucaacauggagacgcugaacaugaccaugccgcugagcugcaccaagaacaacucccaccacuacauccgggugggcaacgagaccggccucgagcugacgcugaccaacaccagccucaucaaccacaaguucugcaaccuguccgacgcccacaagaagaaccuguacgaccacgcccucaugagcaucaucuccaccuuccaccugagcauccccaacuucaaccaguacgaggccauguccugcgacuucaacgacgggaagaucagcguccaguacaaccugucccacacguacgcgggcgacaccgccaaccacugcgggaccguggccaacggcgugcuccagaccuucaugcgcauggccuggggcgggagcuacaucgcgcuggacuccggcugcgggggcugggacugcaucaugacgagcuaccaguaccugaucauccagaacaccaccugggaggaccacugccaguucucccggcccagccccaucggguaccucggccugcugucccagcggacccgcgacaucuacaucagccggcgccuccugggcacguucaccuggacccuguccgacagcgaggggaaggacaccccgggcggguacugccucacgcgguggaugcugaucgaggccgagcugaagugcuucggcaacaccgccgucgccaagugcaacgagaagcacgacgaggaguucugcgacaugcuccgccuguucgacuucaacaagcaggccauccagcggcugaaggcggaggcccagaugagcauccagcucaucaacaaggccgugaacgcccugaucaacgaccagcugaucaugaagaaccaccuccgcgacaucaugugcauccccuacugcaacuacuccaaguacugguaccugaaccacaccgugaccggcaagacgagccugcccaagugcuggcucgucuccaacggcagcuaccugaacgagacccacuucuccgacgacaucgagcagcaggccgacaacaugaucaccgagaugcugcagaaggaguacauggagcggcaggggaagacgccccucggccugguggaccuguucguguucagcaccuccuucuaccugaucagcaucuuccuccaccuggucaagaucccgacccaccgccacgugguggggaagcccugccccaagccccaccggcugaaccacaugggcaucugcuccugcggguucuacaagcagccgggcguccccgugcgcuggaagcggugaggacuagucccuguucccagagcccacuuuuuuuucuuuuuuugaaauaaaauagccugucuuucagaucucaaaggcucuuuucagagccaccaaaaaaaaaaaaaaaaaaaaaaaaaaaaaaaaaaaaaaaaaaaaaaaaaaaaaaaaaaaaaaaaaaaaaaaaaaaaaaaaaaaaaaaaaaaaaaaaaaaaa

SEQ ID NO: 35140 - RNA, 1748 nt, Artificial Sequence
  mRNA product Design a-1 (hSL-A100) comprising derived and/or modified sequence from LASV(Z0947-SLE-2011;Clade IV)__AIT17840__GPCmut9 (opt1)
aggagagucccgcagucggcguccagcggcucugcuuguucgugugugugucguugcaggccuuauucaagcuuaccaugggccagaucgugaccuucuuccaggaggucccccacgugaucgaggaggugaugaacaucguccugaucgcccucagcauccuggccgugcugaaggggcucuacaacuucgcgaccugcggccugguggggcuggucacguuccuccugcugugcggccgcuccugcaccaucagccucuacaaggggguguacgagcugcagacccuggagcucaacauggagacccugaacaugacgaugccgcuguccugcaccaagaacaacagccaccacuacaucauggugggcaacgagaccggccucgagcugacccugacgaacaccuccaucaucaaccacaaguucugcaaccucagcgacgcccacaagaagaaccuguacgaccacgcccugauguccaucaucagcaccuuccaccucuccauccccaacuucaaccaguacgaggccaugagcugcgacuucaacgggggcaagaucuccguccaguacaaccugagccacuccuacgccggggacgcggccaaccacugcggcaccguggccaacggggugcugcagacguucaugcggauggccuggggcggcagcuacaucgcgcucgacuccgggugcgaccggugggacugcaucaugaccagcuaccaguaccugaucauccagaacaccaccugggaggaccacugccaguucucccgccccagccccaucggcuaccuggggcuccugucccagcggacgcgcgacaucuacaucagccggcgccugcucggcaccuucaccuggacccugagcgacuccgagggcaaggacacgcccgggggcuacugccugacccgguggaugcucaucgaggccgagcugaagugcuucgggaacaccgccgucgccaagugcaacgagaagcacgacgaggaguucugcgacaugcugcgccucuucgacuucaacaagcaggccauccagcggcugaaggcggaggcccagaugagcauccagcugaucaacaaggccgugaacgcccucaucaacgaccagcugaucaugaagaaccaccuccgcgacaucaugugcauccccuacugcaacuacuccaaguacugguaccugaaccacaccacgaccgggaagaccagccugcccaagugcuggcugguguccaacggcagcuaccucaacgagacccacuucuccgacgacaucgagcagcaggccgacaacaugaucacggagaugcugcagaaggaguacauggagcggcagggcaagaccccgcuggggcucgucgaccuguucguguucagcaccuccuucuaccugaucagcaucuuccugcaccucgugaagaucccgacccaccgccacaucgucggcaagcccugccccaagccccaccggcugaaccacauggggaucugcuccugcggccuguacaagcagccgggggugcccgugaaguggaagcgcugaggacuagucccuguucccagagcccacuuuuuuuucuuuuuuugaaauaaaauagccugucuuucagaucucaaaggcucuuuucagagccaccaaaaaaaaaaaaaaaaaaaaaaaaaaaaaaaaaaaaaaaaaaaaaaaaaaaaaaaaaaaaaaaaaaaaaaaaaaaaaaaaaaaaaaaaaaaaaaaaaaaaa

SEQ ID NO: 35141 - RNA, 1748 nt, Artificial Sequence
  mRNA product Design a-1 (hSL-A100) comprising derived and/or modified sequence from LASV(Josiah;Clade IV)__NP_694870__GPCmut9 (opt1)
aggagagucccgcagucggcguccagcggcucugcuuguucgugugugugucguugcaggccuuauucaagcuuaccaugggccagaucgugaccuucuuccaggaggucccccacgugaucgaggaggugaugaacaucguccugaucgcccucagcgugcuggccgugcugaaggggcucuacaacuucgcgaccugcggccuggucgggcuggugacguuccuccugcugugcggccgcuccugcaccaccagccucuacaaggggguguacgagcugcagacccuggagcucaacauggagacgcugaacaugaccaugccgcuguccugcaccaagaacaacagccaccacuacaucauggucggcaacgagaccggccucgagcugacgcugaccaacaccuccaucaucaaccacaaguucugcaaccucagcgacgcccacaagaagaaccuguacgaccacgcccugauguccaucaucagcaccuuccaccucuccauccccaacuucaaccaguacgaggccaugagcugcgacuucaacgggggcaagaucuccgugcaguacaaccugagccacuccuacgccggggacgcggccaaccacugcggcacgguggccaacgggguccugcagaccuucaugcggauggccuggggcggcagcuacaucgcgcucgacuccgggugcggcaacugggacugcaucaugaccagcuaccaguaccugaucauccagaacaccacgugggaggaccacugccaguucucccgccccagccccaucggguaccugggccuccugucccagcggacccgcgacaucuacaucagccggcgccugcucggcaccuucaccuggacgcugagcgacuccgaggggaaggacaccccgggcggguacugccugacccgguggaugcucaucgaggccgagcugaagugcuucggcaacaccgccguggccaagugcaacgagaagcacgacgaggaguucugcgacaugcugcgccucuucgacuucaacaagcaggccauccagcggcugaaggcggaggcccagaugagcauccagcugaucaacaaggccgugaacgcccucaucaacgaccagcugaucaugaagaaccaccuccgcgacaucaugugcauccccuacugcaacuacuccaaguacugguaccugaaccacacgaccaccgggcggaccagccugcccaagugcuggcuggucuccaacggcagcuaccucaacgagacgcacuucuccgacgacaucgagcagcaggccgacaacaugaucaccgagaugcugcagaaggaguacauggagcgccagggcaagacgccccuggggcugguggaccucuucguguucagcaccuccuucuaccugaucagcaucuuccugcaccucgucaagaucccgacccaccggcacaucgugggcaaguccugccccaagccccaccgccugaaccacauggggaucugcagcugcggccuguacaagcagcccggggugccggucaaguggaagcggugaggacuagucccuguucccagagcccacuuuuuuuucuuuuuuugaaauaaaauagccugucuuucagaucucaaaggcucuuuucagagccaccaaaaaaaaaaaaaaaaaaaaaaaaaaaaaaaaaaaaaaaaaaaaaaaaaaaaaaaaaaaaaaaaaaaaaaaaaaaaaaaaaaaaaaaaaaaaaaaaaaaaa

SEQ ID NO: 35142 - RNA, 1745 nt, Artificial Sequence
  mRNA product Design a-1 (hSL-A100) comprising derived and/or modified sequence from LASV(LP;Clade I)__AAF86701__GPCmut9 (opt1)
aggagagucccgcagucggcguccagcggcucugcuuguucgugugugugucguugcaggccuuauucaagcuuaccaugggccagaucaucaccuucuuccaggaggugccccacgucaucgaggaggugaugaacaucgugcugaucgcccucagccugcuggccauccucaaggggcuguacaacaucgcgaccugcggcaucaucgggcuggucgccuuccucuuccugugcggcaaguccugcagccugacgcucaagggcggguacgagcugcagacccuggagcucaacauggagacccugaacaugaccaugccgcuguccugcacgaagaacagcucccaccacuacauccgcgugggcaacgagaccgggcucgagcugacccugaccaacacgagcaucaucaaccacaaguucugcaaccucuccgacgcccacaagaagaaccuguacgaccacgcccugaugagcaucaucuccaccuuccaccucagcauccccaacuucaaccaguacgaggccauguccugcgacuucaacggcgggaagaucagcgugcaguacaaccugucccacagcuacgcgggcgacgccgccgagcacugcgggaccgucgccaacggcgugcugcagaccuucaugcggauggcguggggcgggcgcuacaucgcccucgacuccggcugcgggaacugggacugcaucaugacgagcuaccaguaccugaucauccagaacaccaccugggaggaccacugccaguucucccggcccagccccaucggcuaccugggccuccugucccagcgcacccgggacaucuacaucagccgccggcugcucgggacguucaccuggacccugagcgacuccgagggcaacgagacccccgggggcuacugccugacgcgcuggaugcucaucgaggccgagcugaagugcuucgggaacaccgccguggccaagugcaacgagaagcacgacgaggaguucugcgacaugcugcggcuguucgacuucaacaagcaggcgauccgccggcugaaggccgaggcccagaugagcauccagcugaucaacaaggccgucaacgcccucaucaacgaccagcugaucaugaagaaccaccuccgcgacaucaugugcauccccuacugcaacuacuccaaguacugguaccucaaccacaccagcuccggccggaccagccugcccaagugcuggcugaucuccaacggcagcuaccucaacgagacgcaguucuccgacgacaucgagcagcaggcggacaacaugaucaccgagaugcugcagaaggaguacaucgagcgccaggggaagaccccgcugggccugguggacaucuucaucuucagcaccuccuucuaccucaucagcaucuuccugcaccugaucaagaucccgacgcaccggcacaucguggggaagcccugccccaagccccaccgccucaaccacaugggcgucugcuccugcgggcuguacaagcacccgggcgugcccaccaaguggaagcggugaggacuagucccuguucccagagcccacuuuuuuuucuuuuuuugaaauaaaauagccugucuuucagaucucaaaggcucuuuucagagccaccaaaaaaaaaaaaaaaaaaaaaaaaaaaaaaaaaaaaaaaaaaaaaaaaaaaaaaaaaaaaaaaaaaaaaaaaaaaaaaaaaaaaaaaaaaaaaaaaaaaaa

SEQ ID NO: 35143 - RNA, 1745 nt, Artificial Sequence
  mRNA product Design a-1 (hSL-A100) comprising derived and/or modified sequence from LASV(803213;Clade II)__AAF86703__GPCmut9 (opt1)
aggagagucccgcagucggcguccagcggcucugcuuguucgugugugugucguugcaggccuuauucaagcuuaccaugggccagaucaucaccuucuuccaggaggugccccacgucaucgaggaggugaugaacaucgugcugaucgcccucagccugcuggccauccucaaggggaucuacaacgucgcgaccugcggccuguucgggcugaucuccuuccuccugcugugcggccgcagcugcuccgugacguacaaggggguguacgagcuccagacccuggagcugaacauggccaaccucaacaugaccaugccgcugagcugcaccaagaacaacucccaccacuacaucauggucggcaacgagacgggccuggagcucacccugaccaacaccagcaucaucaaccacaaguucugcaaccuguccgacgcccacaagaagaaccucuacgaccacgcccugaugagcaucaucuccacguuccaccugagcauccccaacuucaaccaguacgaggccauguccugcgacuucaacgggggcaagaucagcgugcaguacaaccucucccacagcuucgcgguggacgccgccaaccacugcgggaccaucgccaacggcguccugcagaccuucaugcggauggcguggggcggguccuacaucgcccuggacagcggcugcgggaacugggacugcaucaugaccuccuaccaguaccucaucauccagaacacgaccugggaggaccacugccaguucagccgccccucccccaucggcuaccuggggcugcucagccagcggacccgcgacaucuacaucagccggcgccugcugggcaccuucacguggacccucuccgacagcgagggcaacgaggcccccgggggcuacugccugacccgguggaugcugaucgaggccgagcucaagugcuucgggaacaccgccguggcgaagugcaacgagaagcacgacgaggaguucugcgacaugcugcgccuguucgacuucaacaagcaggccaucaagcggcucaagacggaggcccagauguccauccagcugaucaacaaggccgugaacgcccugaucaacgaccagcucaucaugaagaaccaccuccgcgacaucaugugcauccccuacugcaacuacagccgguacugguaccugaaccacaccgucaccggcaagaccucccugccccgcugcuggcuggugagcaacggguccuaccugaacgagacgcacuucagcgacgacaucgagcagcaggcggacaacaugaucaccgagaugcuccagaaggaguacauggaccggcagggcaagaccccgcugggccugguggaccuguucgucuucuccaccagcuucuaccucaucuccaucuuccugcaccuggugaagaucccgacgcaccgccacaucguggggaagcccugccccaagccccaccggcucaaccacaugggcaucugcagcugcgggcuguacaagcacccgggcguccccgugaaguggaagcgcugaggacuagucccuguucccagagcccacuuuuuuuucuuuuuuugaaauaaaauagccugucuuucagaucucaaaggcucuuuucagagccaccaaaaaaaaaaaaaaaaaaaaaaaaaaaaaaaaaaaaaaaaaaaaaaaaaaaaaaaaaaaaaaaaaaaaaaaaaaaaaaaaaaaaaaaaaaaaaaaaaaaaa

SEQ ID NO: 35144 - RNA, 1745 nt, Artificial Sequence
  mRNA product Design a-1 (hSL-A100) comprising derived and/or modified sequence from LASV(GA391;Clade III)__CAA36645__GPCmut9 (opt1)
aggagagucccgcagucggcguccagcggcucugcuuguucgugugugugucguugcaggccuuauucaagcuuaccaugggccagaucgugaccuucuuccaggaggucccccacgugaucgaggaggugaugaacaucguccugaucgcccucagcauccuggccauccugaaggggcucuacaacguggcgaccugcggccugaucgggcuggugacguuccuccugcuguccggccgcagcugcucccucaucuacaaggggaccuacgagcugcagacccuggagcucaacauggagacccugaacaugacgaugccgcugagcugcaccaagaacaacucccaccacuacauccgggucggcaacgagaccggccucgagcugacccugacgaacaccagcauccucaaccacaaguucugcaaccuguccgacgcccacaagcgcaaccuguacgaccacagccucauguccaucaucagcaccuuccaccuguccauccccaacuucaaccaguacgaggccaugagcugcgacuucaacgggggcaagaucaccgugcaguacaaccugucccacagcuucgccguggacgccgcggggcacugcggcacgcucgccaacgggguccugcagaccuucaugcggauggccuggggcggcuccuacaucgcccuggacagcgggugcggcaacugggacugcaucaugaccuccuaccaguaccucaucauccagaacaccacgugggacgaccacugccaguucagccgccccucccccaucggguaccugggccugcucagccagcggacccgcgacaucuacaucagccggcgccugcugggcaccuucaccuggacgcucuccgacagcgaggggaacgagaccccgggcggguacugccugacccgguggaugcugaucgaggcggagcucaagugcuucggcaacaccgccguggccaagugcaacgagaagcacgacgaggaguucugcgacaugcugcgccuguucgacuucaacaagcaggccauccggcgccucaagacggaggcccagauguccauccagcugaucaacaaggcggugaacgcccugaucaacgaccagcucaucaugaagaaccaccuccgggacaucaugugcauccccuacugcaacuacagccgcuacugguaccugaaccacaccuccaccgggaagaccagccugccccggugcuggcugaucuccaacggcagcuaccugaacgagacgaaguucuccgacgacaucgagcagcaggccgacaacaugaucaccgagaugcugcagaaggaguacaucgaccgccagggcaagacgccccucgggcuggucgaccuguucguguucagcaccuccuucuaccucaucagcaucuuccugcaccuggugaagaucccgacccaccggcacaucgucggcaagcccugccccaagccccaccgccucaaccacauggggaucugcuccugcggccuguacaagcagccgggggugcccgugcgguggaagcgcugaggacuagucccuguucccagagcccacuuuuuuuucuuuuuuugaaauaaaauagccugucuuucagaucucaaaggcucuuuucagagccaccaaaaaaaaaaaaaaaaaaaaaaaaaaaaaaaaaaaaaaaaaaaaaaaaaaaaaaaaaaaaaaaaaaaaaaaaaaaaaaaaaaaaaaaaaaaaaaaaaaaaa

SEQ ID NO: 35145 - RNA, 1748 nt, Artificial Sequence
  mRNA product Design a-1 (hSL-A100) comprising derived and/or modified sequence from LASV(AV;Clade V)__CCA30314__GPCmut9 (opt1)
aggagagucccgcagucggcguccagcggcucugcuuguucgugugugugucguugcaggccuuauucaagcuuaccaugggccagaucgugaccuucuuccaggaggucccccacgugaucgaggaggugaugaacaucguccugaucgcccucagcauccuggccgugcugaaggggcucuacaacaucgcgaccugcggccugaucgggcugaucacguuccuccugcugugcggccgcuccugcagcuccaaccucuacaaggggguguacgagcugcagagccuggaccucaacauggagacccugaacaugaccaugccgcuguccugcaccaagaacaacagccaccacuacauccgggucggcaacgacacgggccucgagcugacccugaccaacaccuccauccucaaccacaaguucugcaaccugagcgacgcccacaagaaggaccuguacgaccacgcccucauguccaucaucagcacguuccaccuguccauccccaacuucaaccaguacgaggccaugagcugcgacuucaacgggggcaagaucuccgugcaguacaaccugagccacuccuacgccaucgacgcggccaaccacugcgggaccguggccaacggcauccuccagaccuucaugcgcauggccuggggcgggagcuacaucgcgcuggacuccggcugcgggaacugggacugcaucaugaccagcuaccaguaccugaucauccagaacacgaccugggagaaccacugccaguucucccggcccagccccaucggcuaccucgggcugcugagccagcgcacccgggacaucuacaucucccgccggcuccugggcaccuucacguggacccugagcgacuccgagggcaacgccacccccgggggcuacugccucacccgcuggaugcugaucgaggccgagcugaagugcuucgggaacacggccgucgccaagugcaacgagaagcacgacgaggaguucugcgacaugcuccggcuguucgacuucaacaagcaggcgaucagccgccugaaguccgaggcccagaugagcauccagcucaucaacaaggccgugaacgcccugaucaacgaccagcugaucaugaagaaccaccuccgggacaucaugugcauccccuacugcaacuacuccaaguacugguaccugaaccacaccaucaccggcaagaccagccugcccaagugcuggcucguguccaacgggagcuaccugaacgagacgcacuucuccgacgacaucgagcagcaggccgacaacaugaucaccgagaugcugcagaaggaguacauggagcgccagggcaagaccccgcugggccucgucgaccuguucguguucagcaccuccuucuaccugaucagcaucuuccuccggcuggugaagaucccgacgcaccgccacaucgucgggaagcccugccccaagccccaccggcugaaccacaugggcaucugcuccugcgggcucuacaagcagccgggcgugcccgugcgcuggaagcggugaggacuagucccuguucccagagcccacuuuuuuuucuuuuuuugaaauaaaauagccugucuuucagaucucaaaggcucuuuucagagccaccaaaaaaaaaaaaaaaaaaaaaaaaaaaaaaaaaaaaaaaaaaaaaaaaaaaaaaaaaaaaaaaaaaaaaaaaaaaaaaaaaaaaaaaaaaaaaaaaaaaaa

SEQ ID NO: 35146 - RNA, 1745 nt, Artificial Sequence
  mRNA product Design a-1 (hSL-A100) comprising derived and/or modified sequence from LASV(Togo/2016/7082;Clade VI)__AMR44577__GPCmut9 (opt1)
aggagagucccgcagucggcguccagcggcucugcuuguucgugugugugucguugcaggccuuauucaagcuuaccaugggccagaucaucaccuucuuccaggaggugccccacgucaucgaggaggugaugaacaucgugcugaucgcccucagccugcuggccauccucaagggggucuacaacguggcgaccugcggcaucaucgggcuggugacguuccuguuccucugcggccgcuccugcagccugaucuacaagggguccuacgagcugcagacccucgagcugaacauggagacccugaacaugaccaugccgcucagcugcacgaagaacuccagccaccacuacauccgggucggcaacgagaccggccuggagcugacccucaccaacacguccaucaucaaccacaaguucugcaaccugagcgacgcccacaagcgcaaccuguacgaccacgcccucauguccauccugagcaccuuccaccuguccauccccaacuucaaccaguacgaggccaugagcugcgacuucaacgggggcaagaucuccgugcaguacaaccucagccacgccuacgcgguggacgccgccgagcacugcgggaccgucgccaacggcgugcugcagaccuucaugcggauggcguggggcggguccuacaucgcccuggacagcggcugcgggaacugggacugcaucaugacguccuaccaguaccucaucauccagaacaccaccugggaggaccacugccaguucagccgccccucccccaucggcuaccuggggcugcucagccagcggacccgcgacaucuacaucagccggcgccugcugggcacguucaccuggacccucuccgacagcgagggcaacgagacccccgggggcuacugccugacgcgguggaugcugaucgaggccgagcucaagugcuucgggaacaccgccguggccaagugcaacgagaagcacgacgaggaguucugcgacaugcugcgccuguucgacuucaacaagcaggcgauccagcggcucaaguccgaggcccagaugagcauccagcugaucaacaaggccgucaacgcccugaucaacgaccagcucaucaugaagaaccaccuccgcgacaugaugugcauccccuacugcaacuacuccaaguacugguaccugaaccacaccagcuccggccggaccagccugcccaagugcuggcugguguccaacgggagcuaccugaacgagacgcacuucuccgacgacaucgagcagcaggccgacaacaugaucaccgagaugcuccagaaggaguacaucgaccgccagggcaagaccccgcugggccugguggaccuguucgucuucagcaccuccuucuaccucaucagcaucuuccugcaccugaucaagaucccgacgcaccggcacaucguggggaagcccugccccaagccccaccgccucaaccacaugggcaucugcuccugcgggcuguacaagcagccgggcgugcccacccgguggaagcgcugaggacuagucccuguucccagagcccacuuuuuuuucuuuuuuugaaauaaaauagccugucuuucagaucucaaaggcucuuuucagagccaccaaaaaaaaaaaaaaaaaaaaaaaaaaaaaaaaaaaaaaaaaaaaaaaaaaaaaaaaaaaaaaaaaaaaaaaaaaaaaaaaaaaaaaaaaaaaaaaaaaaaa

SEQ ID NO: 35147 - RNA, 1745 nt, Artificial Sequence
  mRNA product Design a-1 (hSL-A100) comprising derived and/or modified sequence from LASV(KAK-428;Clade n.d. (VII))__ANH09740__GPCmut9 (opt1)
aggagagucccgcagucggcguccagcggcucugcuuguucgugugugugucguugcaggccuuauucaagcuuaccaugggccagaucgugaccuucuuccaggaggucccccacgugaucgaggaggugaugaacaucguccugaucgcccucagccugcuggccauccucaaggggcuguacaacuucgcgaccugcggcgugaucgggcugaucacguuccuccugcugugcggccgcuccugcagcgccaccuacaaggggcaguacgagcuccagacccuggagcugaacauggagucccucaacaugaccaugccgcugagcugcacgaagaacaacucccaccacuacauccgggccggcaacaacaccggccuggagcucacccugaccaacacgagcaucaucucccacaaguucugcaaccugagcgacgcccacaagaagaaccucuacgaccacacccugauguccaucaucaccaccuuccaccugagcauccccaacuucaaccaguacgaggccauguccugcgacuucaacgggggcaagaucagcauccaguacaaccucucccacagcuacgcgggggacgccgcccagcacugcggcacgguggccaacgggguccugcagaccuucaugcgcauggcguggggcggcuccuaccuggcccucgacagcgggugccggggcugggacugcaucaucuccagcuaccaguaccugaucauccagaacaccaccugggacgaccacugccaguucucccgccccagccccaucggguaccugggcuucgugagccagaagacgcgggacaucuacaucucccgccggcuccugggcaccuucaccuggacccugagcgacuccgaggggcacgacaugccgggcggguacugccucacgcgcuggaugcugaucgaggccgaccugaagugcuucggcaacaccgccguggccaagugcaacgagaagcacgacgaggaguucugcgacauguggcggcuguucgacuucaacaagcaggcgauccagcgccugaaggccgaggcccagaugaacauccagcugaucaacaaggccgucaacgcccucaucaacgaccagcugaugaugaagaaccaccuccgggacaucaugugcauccccuacugcaacuacagcaaguucugguaccucaacaacaccaccacggggcgcaccucccugccccggugcuggcugaucagcaacggcuccuaccucaacgagacccacuucagcgacgacaucgagcagcaggcggacaacaugaucaccgagaugcugcagaaggaguacauggaccgccagggcaagacgccccuggggcucguggaccuguucguguucuccaccagcuucuaccugaucaccaucuuccugcaccucgucaagaucccgacccaccggcacaucgugggcaagcccugccccaagccccaccgccugaaccacauggggaucugcuccugcggccuguacaagcagccgggggugcccguccgguggaagcgcugaggacuagucccuguucccagagcccacuuuuuuuucuuuuuuugaaauaaaauagccugucuuucagaucucaaaggcucuuuucagagccaccaaaaaaaaaaaaaaaaaaaaaaaaaaaaaaaaaaaaaaaaaaaaaaaaaaaaaaaaaaaaaaaaaaaaaaaaaaaaaaaaaaaaaaaaaaaaaaaaaaaaa

SEQ ID NO: 35148 - RNA, 1745 nt, Artificial Sequence; identical to SEQ ID NO: 35142
  mRNA product Design a-1 (hSL-A100) comprising derived and/or modified sequence from LASV(Pinneo-NIG-1969;Clade I)__AIT17836__GPCmut9 (opt1)

SEQ ID NO: 35149 - RNA, 1745 nt, Artificial Sequence
  mRNA product Design a-1 (hSL-A100) comprising derived and/or modified sequence from LASV(ISTH0009-NIG-2011;Clade II)__AIT17404__GPCmut9 (opt1)
aggagagucccgcagucggcguccagcggcucugcuuguucgugugugugucguugcaggccuuauucaagcuuaccaugggccagaucaucaccuucuuccaggaggugccccacgucaucgaggaggugaugaacaucgugcugaucgcccucagccugcuggccauccucaaggggaucuacaacgucgcgaccugcggccuguucgggcugguguccuuccuccugcugugcggccgcagcugcuccacgaccuacaaggggguguacgagcuccagacccuggagcuggacauggccagccucaacaugaccaugccgcuguccugcacgaagaacaacagccaccacuacaucauggucggcaacgagaccggccuggagcucacccugaccaacacguccaucaucaaccacaaguucugcaaccugagcgacgcccacaagaagaaccucuacgaccacgcccugauguccaucaucagcaccuuccaccuguccauccccaacuucaaccaguacgaggccaugagcugcgacuucaacgggggcaagaucuccgugcaguacaaccucagccacgcguacgccguggacgccgccaaccacugcgggaccaucgcgaacggcguccugcagaccuucaugcggauggccuggggcggguccuacaucgcccuggacagcggcugcggguccugggacugcaucaugacgagcuaccaguaccucaucauccagaacaccaccugggaggaccacugccaguucucccgccccagccccaucggcuaccuggggcugcucagccagcggacccgcgacaucuacaucucccggcgccugcugggcacguucaccuggacccucagcgacuccgagggcaacgagacccccgggggcuacugccugacgcgguggaugcugaucgaggccgagcucaagugcuucgggaacaccgccguggcgaagugcaacgagaagcacgacgaggaguucugcgacaugcugcgccuguucgacuucaacaagcaggccauccggcgccucaagaccgaggcccagaugagcauccagcugaucaacaaggccgugaacgcccugaucaacgaccagcucaucaugaagaaccaccuccgggacaucaugugcaucccguacugcaacuacuccaaguacugguaccugaaccacaccgucacgggcaagaccagccugccccgcugcuggcugguguccaacgggagcuaccugaacgagacccacuucuccgacgacaucgagcagcaggcggacaacaugaucaccgagcuccugcagaaggaguacauggaccggcagggcaagacgccccugggccugguggaccucuucgucuucagcaccuccuucuaccugaucagcaucuuccugcaccucaucaagaucccgacccaccgccacaucaccgggaagcccugccccaagccccaccggcugaaccacaugggcaucugcuccugcgggcuguacaagcacccgggcgugcccgugaaguggaagcgcugaggacuagucccuguucccagagcccacuuuuuuuucuuuuuuugaaauaaaauagccugucuuucagaucucaaaggcucuuuucagagccaccaaaaaaaaaaaaaaaaaaaaaaaaaaaaaaaaaaaaaaaaaaaaaaaaaaaaaaaaaaaaaaaaaaaaaaaaaaaaaaaaaaaaaaaaaaaaaaaaaaaaa

SEQ ID NO: 35150 - RNA, 1745 nt, Artificial Sequence
  mRNA product Design a-1 (hSL-A100) comprising derived and/or modified sequence from LASV(ISTH2010-NIG-2012;Clade II)__AIT17482__GPCmut9 (opt1)
aggagagucccgcagucggcguccagcggcucugcuuguucgugugugugucguugcaggccuuauucaagcuuaccaugggccagaucaucaccuucuuccaggaggugccccacgucaucgaggaggugaugaacaucgugcugaucgcccucagccugcuggccauccucaaggggaucuacaacgucgcgaccugcggccuguucgggcugguguccuuccuccugcugugcggccgcagcugcuccacgaccuacaaggggguguacgagcuccagacccuggagcuggacauggccagccucaacaugaccaugccgcuguccugcacgaagaacaacagccaccacuacaucauggucggcaacgagaccggccuggagcucacccugaccaacacguccaucaucaaccacaaguucugcaaccugagcgacgcccacaagaagaaccucuacgaccacgcccugauguccaucaucagcaccuuccaccuguccauccccaacuucaaccaguacgaggccaugagcugcgacuucaacgggggcaagaucuccgugcaguacaaccucagccacgcguacgccguggacgccgccaaccacugcgggaccaucgcgaacggcguccugcagaccuucaugcggauggccuggggcggguccuacaucgcccuggacagcggcugcggguccugggacugcaucaugacgagcuaccaguaccucaucauccagaacaucaccugggaggaccacugccaguucucccgccccagccccaucggcuaccuggggcugcucagccagcggacccgcgacaucuacaucucccggcgccugcugggcaccuucacguggacccucagcgacuccgagggcaacgagacccccgggggcuacugccugacccgguggaugcugaucgaggccgagcucaagugcuucgggaacacggccguggcgaagugcaacgagaagcacgacgaggaguucugcgacaugcugcgccuguucgacuucaacaagcaggccauccggcgccucaagaccgaggcccagaugagcauccagcugaucaacaaggccgugaacgcccugaucaacgaccagcucaucaugaagaaccaccuccgggacaucaugugcauccccuacugcaacuacuccaaguacugguaccugaaccacaccgucaccggcaagacgagccugccccgcugcuggcugguguccaacgggagcuaccugaacgagacccacuucuccgacgacaucgagcagcaggcggacaacaugaucaccgagcuccugcagaaggaguacaucgaccggcagggcaagaccccgcugggccugguggaccucuucgucuucagcacguccuucuaccugaucagcaucuuccugcaccucgugaagaucccgacccaccgccacguggucgggaagcccugccccaagccccaccggcugaaccacaugggcaucugcuccugcgggcuguacaagcacccgggcgugcccgugaaguggaagcgcugaggacuagucccuguucccagagcccacuuuuuuuucuuuuuuugaaauaaaauagccugucuuucagaucucaaaggcucuuuucagagccaccaaaaaaaaaaaaaaaaaaaaaaaaaaaaaaaaaaaaaaaaaaaaaaaaaaaaaaaaaaaaaaaaaaaaaaaaaaaaaaaaaaaaaaaaaaaaaaaaaaaaa

SEQ ID NO: 35151 - RNA, 1745 nt, Artificial Sequence
  mRNA product Design a-1 (hSL-A100) comprising derived and/or modified sequence from LASV(Lassa virus/H.sapiens-wt/NGA/2015/ISTH_0543;Clade II)__AVO03639__GPCmut9 (opt1)
aggagagucccgcagucggcguccagcggcucugcuuguucgugugugugucguugcaggccuuauucaagcuuaccaugggccagaucaucaccuucuuccaggaggugccccacgucaucgaggaggugaugaacaucgugcugaucgcccucagccugcuggccauccucaaggggaucuacaacgucgcgaccugcggccuguucgggcugguguccuuccuccugcugugcggccgcagcugcuccacgaccuacaaggggguguacgagcuccagacccuggagcuggacauggccaaccucaacaugaccaugccgcugagcugcacgaagaacaacucccaccacuacaucauggucggcaacgagaccggccuggagcucacccugaccaacacgagcaucaucaaccacaaguucugcaaccuguccgacgcccacaagaagaaccucuacgaccacgcccugaugagcaucaucuccaccuuccaccugagcauccccaacuucaaccaguacgaggccauguccugcgacuucaacgggggcaagaucagcgugcaguacaaccucucccacaccuacgcgguggacgccgccaaccacugcgggaccaucgccaacggcguccugcagacguucaugcggauggcguggggcgggagcuacaucgcccuggacuccggcugcgggagcugggacugcaucaugaccuccuaccaguaccucgugauccagaacaccaccugggaggaccacugccaguucagccgccccucccccaucggcuaccuggggcugcucagccagcggacgcgcgacaucuacaucagccggcgccugcugggcaccuucaccuggacccucuccgacagcgagggcaacgagacgcccgggggcuacugccugacccgguggaugcugaucgaggccgagcucaagugcuucgggaacaccgccguggccaagugcaacgagaagcacgacgaggaguucugcgacaugcugcgccuguucgacuucaacaagcaggcgauccggcgccucaagaccgaggcccagauguccauccagcugaucaacaaggccgucaacgcccugaucaacgaccagcucaucaugaagaaccaccuccgggacaucaugugcauccccuacugcaacuacagcaaguacugguaccugaaccacacggugaccggcaagaccucccugccccgcugcuggcuggugagcaacggguccuaccugaacgagacccacuucagcgacgacaucgagcagcaggccgacaacaugaucacggagcuccugcagaaggaguacaucgaccggcagggcaagaccccgcugggccuggucgaccucuucguguucuccaccagcuucuaccugaucuccaucuuccugcaccucgugaagaucccgacccaccgccacaucacggggaagcccugccccaagccccaccggcugaaccacaugggcaucugcagcugcgggcuguacaagcacccgggcguccccgugaaguggaagcgcugaggacuagucccuguucccagagcccacuuuuuuuucuuuuuuugaaauaaaauagccugucuuucagaucucaaaggcucuuuucagagccaccaaaaaaaaaaaaaaaaaaaaaaaaaaaaaaaaaaaaaaaaaaaaaaaaaaaaaaaaaaaaaaaaaaaaaaaaaaaaaaaaaaaaaaaaaaaaaaaaaaaaa

SEQ ID NO: 35152 - RNA, 1745 nt, Artificial Sequence
  mRNA product Design a-1 (hSL-A100) comprising derived and/or modified sequence from LASV(Lassa virus/H.sapiens-wt/NGA/2016/ISTH_0009;Clade II)__AVO03571__GPCmut9 (opt1)
aggagagucccgcagucggcguccagcggcucugcuuguucgugugugugucguugcaggccuuauucaagcuuaccaugggccagaucaucaccuucuuccaggaggugccccacgucaucgaggaggugaugaacaucgugcugaucgcccucagccugcuggccauccucaaggggaucuacaacgucgcgaccugcggccugcuggggcucguguccuuccugcugcucugcggccgcagcugcuccacgaccuacaaggggguguacgagcugcagacccuggagcucgacauggccagccugaacaugaccaugccgcuguccugcacgaagaacaacagccaccacuacaucauggucggcaacgagaccggccucgagcugacccugaccaacacguccaucaucaaccacaaguucugcaaccucagcgacgcccacaagaagaaccuguacgaccacgcccugauguccaucaucagcaccuuccaccucuccauccccaacuucaaccaguacgaggccaugagcugcgacuucaacgggggccggaucuccgugcaguacaaccugagccacuccuacgcgguggacgccgccaaccacugcgggaccaucgccaacggcguccugcagaccuucaugcgcauggcguggggcgggagcuacaucgcccucgacuccggcugcgggagcugggacugcaucaugacguccuaccaguaccugaucauccagaacaccaccugggaggaccacugccaguucagccggcccagccccaucggcuaccuggggcuccugucccagcgcacccgggacaucuacaucagccgccggcugcucggcacguucaccuggacccuguccgacagcgagggcaacgagacccccgggggcuacugccugacgcgcuggaugcucaucgaggccgagcugaagugcuucgggaacaccgccguggccaagugcaacgagaagcacgacgaggaguucugcgacaugcugcggcuguucgacuucaacaagcaggcgauccgccggcugaagaccgaggcccagauguccauccagcugaucaacaaggccgugaacgcccucaucaacgaccagcugaucaugaagaaccaccuccgcgacaucaugugcaucccguacugcaacuacagcaaguacugguaccucaaccacaccgucacgggcaagaccucccugccccggugcuggcuggugagcaacggguccuaccucaacgagacccacuucagcgacgacaucgagcagcaggccgacaacaugaucaccgagcugcugcagaaggaguacaucgaccgccagggcaagacgccccugggccucguggaccuguucgucuucuccaccagcuucuaccugaucuccaucuuccuccaccuggugaagaucccgacccaccggcacaucaccgggaagcccugccccaagccccaccgccugaaccacaugggcaucugcagcugcgggcucuacaaccacccgggcgugcccgucaaguggaagcggugaggacuagucccuguucccagagcccacuuuuuuuucuuuuuuugaaauaaaauagccugucuuucagaucucaaaggcucuuuucagagccaccaaaaaaaaaaaaaaaaaaaaaaaaaaaaaaaaaaaaaaaaaaaaaaaaaaaaaaaaaaaaaaaaaaaaaaaaaaaaaaaaaaaaaaaaaaaaaaaaaaaaa

SEQ ID NO: 35153 - RNA, 1745 nt, Artificial Sequence
  mRNA product Design a-1 (hSL-A100) comprising derived and/or modified sequence from LASV(Lassa virus/H.sapiens-wt/NGA/2016/ISTH_0017;Clade II)__AVO03567__GPCmut9 (opt1)
aggagagucccgcagucggcguccagcggcucugcuuguucgugugugugucguugcaggccuuauucaagcuuaccaugggccagaucaucaccuucuuccaggaggugccccacgucaucgaggaggugaugaacaucgugcugaucgcccucagccugcuggccauccucaaggggaucuacaacgucgcgaccugcggccuguucgggcugguguccuuccuccugcugugcggccgcagcugcuccacgaccuacaaggggguguacgagcuccagacccuggagcuggacauggccagccucaacaugaccaugccgcuguccugcacgaagaacaacagccaccacuacaucauggucggcaacgagaccggccuggagcucacccugaccaacacguccaucaucaaccacaaguucugcaaccugagcgacgcccacaagaagaaccucuacgaccacgcccugauguccaucaucagcaccuuccaccuguccauccccaacuucaaccaguacgaggccaugagcugcgacuucaacgggggcaagaucuccgugcaguacaaccucagccacaccuacgcgaucgacgccgccaaccacugcgggaccaucgccaacggcgugcugcagacguucaugcggauggcguggggcggguccuacaucgcccuggacagcggcugcggguccugggacugcaucaugaccagcuaccaguaccucaucauccagaacaccaccugggaggaccacugccaguucucccgccccagccccaucggcuaccuggggcugcucagccagcggacgcgcgacaucuacaucucccggcgccugcugggcaccuucaccuggacccucagcgacuccgagggcaacgagacgcccgggggcuacugccugacccgguggaugcugaucgaggccgagcucaagugcuucgggaacaccgccgucgccaagugcaacgagaagcacgacgaggaguucugcgacaugcugcgccuguucgacuucaacaagcaggcgauccggcgccucaagaccgaggcccagaugagcauccagcugaucaacaaggccgugaacgcccugaucaacgaccagcucaucaugaagaaccaccuccgggacaucaugugcauccccuacugcaacuacuccaaguacugguaccugaaccacacggugaccggcaagaccagccugccccgcugcuggcuggucuccaacgggagcuaccugaacgagacccacuucuccgacgacaucgagcagcaggccgacaacaugaucacggagcuccugcagaaggaguacauggaccggcagggcaagaccccgcugggccugguggaccucuucguguucagcaccuccuucuaccugaucagcaucuuccugcaccucguccgcaucccgacccaccggcacgugaucgggaagcccugccccaagccccaccgccugaaccacaugggcaucugcuccugcgggcuguacaagcacccgggcgugcccgucaaguggaagcggugaggacuagucccuguucccagagcccacuuuuuuuucuuuuuuugaaauaaaauagccugucuuucagaucucaaaggcucuuuucagagccaccaaaaaaaaaaaaaaaaaaaaaaaaaaaaaaaaaaaaaaaaaaaaaaaaaaaaaaaaaaaaaaaaaaaaaaaaaaaaaaaaaaaaaaaaaaaaaaaaaaaaa

SEQ ID NO: 35154 - RNA, 1745 nt, Artificial Sequence
  mRNA product Design a-1 (hSL-A100) comprising derived and/or modified sequence from LASV(Lassa virus/H.sapiens-wt/NGA/2018/ISTH_0959;Clade II)__AVV65099__GPCmut9 (opt1)
aggagagucccgcagucggcguccagcggcucugcuuguucgugugugugucguugcaggccuuauucaagcuuaccaugggccagaucaucaccuucuuccaggaggugccccacgucaucgaggaggugaugaacaucgugcugaucgcccucagccugcuggccauccucaaggggaucuacaacgucgugaccugcggccuguucgggcugguguccuuccuccugcugugcggccgcagcugcuccacgaccuacaagggggucuacgagcuccagacccuggagcuggacauggcgagccucaacaugaccaugccgcuguccugcacgaagaacaacagccaccacuacaucauggugggcaacgagaccggccuggagcucacccugaccaacacguccaucaucaaccacaaguucugcaaccugagcgacgcccacaagaagaaccucuacgaccacgcccugauguccaucaucagcaccuuccaccuguccauccccaacuucaaccaguacgaggccaugagcugcgacuucaacgggggcaagaucuccgugcaguacaaccucagccacgccuacgcgaucgacgccgccaaccacugcgggaccaucgccaacggcguccugcagaccuucaugcggauggcguggggcggguccuacaucgcccuggacagcggcugcggguccugggacugcaucaugacgagcuaccaguaccucaucauccagaacaccaccugggaggaccacugccaguucucccgccccagccccaucggcuaccuggggcugcucagccagcggacccgcgacaucuacaucucccggcgccugcugggcacguucaccuggacccucagcgacuccgagggcaacgagacccccgggggcuacugccugacgcgguggaugcugaucgaggccgagcucaagugcuucgggaacaccgccguggccaagugcaacgagaagcacgacgaggaguucugcgacaugcugcgccuguucgacuucaacaagcaggcgauccggcgccucaagaccgaggcccagaugagcauccagcugaucaacaaggccgugaacgcccugaucaacgaccagcucaucaugaagaaccaccuccgggacaucaugugcaucccguacugcaacuacuccaaguacugguaccugaaccacaccgucacgggcaagaccagccugccccgcugcuggcugguguccaacgggagcuaccugaacgagacccacuucuccgacgacaucgagcagcaggccgacaacaugaucaccgagcuccugcagaaggaguacaucgaccggcagggcaagacgccccugggccugguggaccucuucgucuucagcaccuccuucuaccugaucagcaucuuccugcaccucgugaagaucccgacccaccgccacgugaucgggaagcccugccccaagccccaccggcugaaccacaugggcaucugcuccugcgggcuguacaagcacccgggcguccccgugaaguggaagcgcugaggacuagucccuguucccagagcccacuuuuuuuucuuuuuuugaaauaaaauagccugucuuucagaucucaaaggcucuuuucagagccaccaaaaaaaaaaaaaaaaaaaaaaaaaaaaaaaaaaaaaaaaaaaaaaaaaaaaaaaaaaaaaaaaaaaaaaaaaaaaaaaaaaaaaaaaaaaaaaaaaaaaa

SEQ ID NO: 35155 - RNA, 1745 nt, Artificial Sequence
  mRNA product Design a-1 (hSL-A100) comprising derived and/or modified sequence from LASV(LASV003-NIG-2008;Clade II)__AIT17580__GPCmut9 (opt1)
aggagagucccgcagucggcguccagcggcucugcuuguucgugugugugucguugcaggccuuauucaagcuuaccaugggccagaucaucaccuucuuccaggaggugccccacgucaucgaggaggugaugaacaucgugcugaucgcccucagccugcuggccauccucaaggggaucuacaacgucgcgaccugcggccuguucgggcugguguccuuccuccugcugugcggccgcagcugcuccacgaccuacaaggggguguacgagcuccagacccuggagcuggacauggccagccucaacaugaccaugccgcuguccugcacgaagaacaacagccaccacuacaucauggucggcaacgagaccggccuggagcucacccugaccaacacguccaucaucaaccacaaguucugcaaccugagcgacgcccacaagaagaaccucuacgaccacgcccugauguccaucaucagcaccuuccaccuguccauccccaacuucaaccaguacgaggccaugagcugcgacuucaacgggggcaagaucuccgugcaguacaaccucagccacaccuacgcgguggacgccgccaaccacugcgggaccaucgccaacggcguccugcagacguucaugcggauggcguggggcggguccuacaucgcccuggacagcggcugcggguccugggacugcaucaugaccagcuaccaguaccucaucauccagaacaccaccugggaggaccacugccaguucucccgccccagccccaucggcuaccuggggcugcucagccagcggacgcgcgacaucuacaucucccggcgccugcugggcaccuucaccuggacccucagcgacuccgagagcaacgagacgccgggcggguacugccugacccgguggaugcugaucgaggccgagcucaagugcuucggcaacaccgccguggccaagugcaacgagaagcacgacgaggaguucugcgacaugcugcgccuguucgacuucaacaagcaggcgauccggcgccucaaggccgaggcccagauguccauccagcugaucaacaaggccgugaacgcccugaucaacgaccagcucaucaugaagaaccaccuccgggacaucaugugcauccccuacugcaacuacagcaaguacugguaccugaaccacaccgucacggggcgcaccucccugccccggugcuggcuggugagcaacggcuccuaccugaacgagacccacuucagcgacgacaucgagcagcaggcggacaacaugaucaccgagcuccugcagaaggaguacauggaccgccaggggaagacgccccugggccugguggaccucuucgucuucuccaccagcuucuaccugaucuccaucuuccugcaccucgugaagaucccgacccaccggcacgugaucggcaagcccugccccaagccccaccgccugaaccacauggggaucugcagcugcggccuguacaagcacccggggguccccgugaaguggaagcggugaggacuagucccuguucccagagcccacuuuuuuuucuuuuuuugaaauaaaauagccugucuuucagaucucaaaggcucuuuucagagccaccaaaaaaaaaaaaaaaaaaaaaaaaaaaaaaaaaaaaaaaaaaaaaaaaaaaaaaaaaaaaaaaaaaaaaaaaaaaaaaaaaaaaaaaaaaaaaaaaaaaaa

SEQ ID NO: 35156 - RNA, 1745 nt, Artificial Sequence
  mRNA product Design a-1 (hSL-A100) comprising derived and/or modified sequence from LASV(LASV035-NIG-2009;Clade II)__AIT17588__GPCmut9 (opt1)
aggagagucccgcagucggcguccagcggcucugcuuguucgugugugugucguugcaggccuuauucaagcuuaccaugggccagaucaucaccuucuuccaggaggugccccacgucaucgaggaggugaugaacaucgugcugaucgcccucagccugcuggccauccucaaggggaucuacaacgucgcgaccugcggccuguucgggcugguguccuuccuccugcugugcggccgcagcugcuccacgaccuacaaggggguguacgagcuccagacccuggagcuggacauggccagccucaacaugaccaugccgcuguccugcacgaagaacaacagccaccacuacaucauggucggcaacgagaccggccuggagcucacccugaccaacacguccaucaucaaccacaaguucugcaaccugagcgacgcccacaagaagaaccucuacgaccacgcccugauguccaucaucagcaccuuccaccuguccauccccaacuucaaccaguacgaggccaugagcugcgacuucaacgggggcaagaucuccgugcaguacaaccucagccacgcguacgccguggacgccgccaaccacugcgggaccaucgcgaacggcguccugcagaccuucaugcggauggccuggggcggguccuacaucgcccuggacagcggcugcggguccugggacugcaucaugacgagcuaccaguaccucaucauccagaacaccaccugggaggaccacugccaguucucccgccccagccccaucggcuaccuggggcugcucagccagcggacccgcgacaucuacaucucccggcgccugcugggcacguucaccuggacccucagcgacuccgagggcaacgagacccccgggggcuacugccugacgcgguggaugcugaucgaggccgagcucaagugcuucgggaacaccgccguggcgaagugcaacgagaagcacgacgaggaguucugcgacaugcugcgccuguucgacuucaacaagcaggccauccggcgccucaaggccgaggcccagaugagcauccagcugaucaacaaggccgugaacgcgcugaucaacgaccagcucaucaugaagaaccaccuccgggacaucaugugcauccccuacugcaacuacuccaaguacugguaccugaaccacaccgucaccggcaagacgagccugccccgcugcuggcugguguccaacgggagcuaccugaacgagacccacuucuccgacgacaucgagcagcaggccgacaacaugaucaccgagcuccugcagaaggaguacaucgaccggcagggcaagaccccgcugggccugguggaccucuucgucuucagcacguccuucuaccugaucagcaucuuccugcaccucgugaagaucccgacccaccgccacgugaucgggaagcccugccccaagccccaccggcugaaccacaugggcaucugcuccugcgggcuguacaagcacccgggcguccccgugaaguggaagcgcugaggacuagucccuguucccagagcccacuuuuuuuucuuuuuuugaaauaaaauagccugucuuucagaucucaaaggcucuuuucagagccaccaaaaaaaaaaaaaaaaaaaaaaaaaaaaaaaaaaaaaaaaaaaaaaaaaaaaaaaaaaaaaaaaaaaaaaaaaaaaaaaaaaaaaaaaaaaaaaaaaaaaa

SEQ ID NO: 35157 - RNA, 1745 nt, Artificial Sequence
  mRNA product Design a-1 (hSL-A100) comprising derived and/or modified sequence from LASV(LASV1000-NIG-2009;Clade II)__AIT17782__GPCmut9 (opt1)
aggagagucccgcagucggcguccagcggcucugcuuguucgugugugugucguugcaggccuuauucaagcuuaccaugggccagaucaucaccuucuuccaggaggugccccacgucaucgaggaggugaugaacaucgugcugaucgcccucagccugcuggccauccucaaggggaucuacaacgucgcgaccugcggccuguucgggcugguguccuuccuccugcugugcggccgcagcugcuccacgaccuacaaggggguguacgagcuccagacccuggagcuggacauggccagccucaacaugaccaugccgcuguccugcacgaagaacaacagccaccacuacaucauggucggcaacgagaccggccuggagcucacccugaccaacacguccaucaucaaccacaaguucugcaaccugagcgacgcccacaagaagaaccucuacgaccacgcccugauguccaucaucagcaccuuccaccuguccauccccaacuucaaccaguacgaggccaugagcugcgacuucaacgggggcaagaucuccgugcaguacaaccucagccacaccuacgcgguggacgccgccaaccacugcgggaccaucgccaacggcguccugcagacguucaugcggauggcguggggcggguccuacaucgcccuggacagcggcugcggguccugggacugcaucaugaccagcuaccaguaccucaucauccagaacaccaccugggaggaccacugccaguucucccgccccagccccaucggcuaccuggggcugcucagccagcggacgcgcgacaucuacaucucccggcgccugcugggcaccuucaccuggacccucagcgacuccgagggcaacgagacgcccgggggcuacugccugacccgguggaugcugaucgaggccgagcucaagugcuucgggaacaccgccguggccaagugcaacgagaagcacgacgaggaguucugcgacaugcugcgccuguucgacuucaacaagcaggcgaucaagcggcucaagaccgaggcccagaugagcauccagcugaucaacaaggccgugaacgcccugaucaacgaccagcucaucaugaagaaccaccuccgcgacaucaugugcauccccuacugcaacuacuccaaguacugguaccugaaccacacggucaccggcaagaccagccugccccggugcuggcugguguccaacgggagcuaccugaacgagacccacuucuccgacgacaucgagcagcaggccgacaacaugaucacggagcuccugcagaaggaguacaucgaccgccagggcaagaccccgcugggccugguggaccucuucgucuucagcaccuccuucuaccugaucagcaucuuccugcaccucgugaagaucccgacccaccggcacguggucgggaagcccugccccaagccccaccgccugaaccacaugggcaucugcuccugcgggcuguacaagcacccgggcgugcccgugaaguggaagcggugaggacuagucccuguucccagagcccacuuuuuuuucuuuuuuugaaauaaaauagccugucuuucagaucucaaaggcucuuuucagagccaccaaaaaaaaaaaaaaaaaaaaaaaaaaaaaaaaaaaaaaaaaaaaaaaaaaaaaaaaaaaaaaaaaaaaaaaaaaaaaaaaaaaaaaaaaaaaaaaaaaaaa

SEQ ID NO: 35158 - RNA, 1745 nt, Artificial Sequence
  mRNA product Design a-1 (hSL-A100) comprising derived and/or modified sequence from LASV(LASV221-NIG-2010;Clade II)__AIT17624__GPCmut9 (opt1)
aggagagucccgcagucggcguccagcggcucugcuuguucgugugugugucguugcaggccuuauucaagcuuaccaugggccagaucaucaccuucuuccaggaggugccccacgucaucgaggaggugaugaacaucgugcugaucgcccucagccugcuggccauccucaaggggaucuacaacgucgcgaccugcggccuguucgggcugguguccuuccuccugcugugcggccgcagcugcuccacgaccuacaaggggguguacgagcuccagacccuggagcuggacauggccagccucaacaugaccaugccgcuguccugcacgaagaacaacagccaccacuacaucauggucggcaacgagaccggccuggagcucacccugaccaacacguccaucaucaaccacaaguucugcaaccugagcgacgcccacaagaagaaccucuacgaccacgcccugauguccaucaucagcaccuuccaccuguccauccccaacuucaaccaguacgaggccaugagcugcgacuucaacgggggcaagaucuccgugcaguacaaccucagccacaccuacgcgaucgacgccgccaaccacugcgggaccaucgccaacggcgugcugcagacguucaugcggauggcguggggcggguccuacaucgcccuggacagcggcugcggguccugggacugcaucaugaccagcuaccaguaccucaucauccagaacaccaccugggaggaccacugccaguucucccgccccagccccaucggcuaccuggggcugcucagccagcggacgcgcgacaucuacaucucccggcgccugcugggcaccuucaccuggacccucagcgacuccgagggcaacgagacgcccgggggcuacugccugacccgguggaugcugaucgaggccgagcucaagugcuucgggaacaccgccgucgccaagugcaacgagaagcacgacgaggaguucugcgacaugcugcgccuguucgacuucaacaagcaggcgauccggcgccucaagaccgaggcccagaugagcauccagcugaucaacaaggccgugaacgcccugaucaacgaccagcucaucaugaagaaccaccuccgggacaucaugugcauccccuacugcaacuacuccaaguacugguaccugaaccacacggugaccggcaagaccagccugccccgcugcuggcuggucuccaacgggagcuaccugaacgagacccacuucuccgacgacaucgagcagcaggccgacaacaugaucacggagaugcuccagaaggaguacauggaccggcagggcaagaccccgcugggccugguggaccuguucguguucagcaccuccuucuaccucaucagcaucuuccugcaccuggucaagaucccgacccaccgccacgugaucgggaagcccugccccaagccccaccggcucaaccacaugggcaucugcuccugcgggcuguacaagcacccgggcgugcccgucaaguggaagcgcugaggacuagucccuguucccagagcccacuuuuuuuucuuuuuuugaaauaaaauagccugucuuucagaucucaaaggcucuuuucagagccaccaaaaaaaaaaaaaaaaaaaaaaaaaaaaaaaaaaaaaaaaaaaaaaaaaaaaaaaaaaaaaaaaaaaaaaaaaaaaaaaaaaaaaaaaaaaaaaaaaaaaa

SEQ ID NO: 35159 - RNA, 1745 nt, Artificial Sequence
  mRNA product Design a-1 (hSL-A100) comprising derived and/or modified sequence from LASV(LASV237-NIG-2010;Clade II)__AIT17638__GPCmut9 (opt1)
aggagagucccgcagucggcguccagcggcucugcuuguucgugugugugucguugcaggccuuauucaagcuuaccaugggccagaucaucaccuucuuccaggaggugccccacgucaucgaggaggugaugaacaucgugcugaucgcccucagccugcuggccauccucaaggggaucuacaacgucgcgaccugcggccuguucgggcugguguccuuccuccugcugugcggccgcagcugcuccacgaccuacaaggggguguacgagcuccagacccuggagcuggacauggccagccucaacaugaccaugccgcuguccugcacgaagaacaacagccaccacuacaucauggucggcaacgagaccggccuggagcucacccugaccaacacguccaucaucaaccacaaguucugcaaccugagcgacgcccacaagaaggaccucuacgaccacgcccugauguccaucaucagcaccuuccaccuguccauccccaacuucaaccaguacgaggccaugagcugcgacuucaacgggggcaagaucuccgugcaguacaaccucagccacaccuacgcgguggacgccgccaaccacugcgggaccaucgccaacggcguccugcagacguucaugcggauggcguggggcggguccuacaucgcccuggacagcggcugcggguccugggacugcaucaugaccagcuaccaguaccucaucauccagaacaccaccugggaggaccacugccaguucucccgccccagccccaucggcuaccuggggcugcucagccagcggacgcgcgacaucuacaucucccggcgccugcugggcaccuucaccuggacccucagcgacuccgagggcaacgagacgcccgggggcuacugccugacccgguggaugcugaucgaggccgagcucaagugcuucgggaacaccgccguggccaagugcaacgagaagcacgacgaggaguucugcgacaugcugcgccuguucgacuucaacaagcaggcgauccggcgccucaagaccgaggcccagaugagcauccagcugaucaacaaggccgugaacgcccugaucaacgaccagcucaucaugaagaaccaccuccgggacaucaugugcauccccuacugcaacuacuccaaguacugguaccugaaccacacggucaccggcaagaccagccugccccgcugcuggcugguguccaacgggagcuaccugaacgagacccacuucuccgacgacaucgagcagcaggccgacaacaugaucacggagcuccugcagaaggaguacauggaccggcagggcaagaccccgcugggccugguggaccucuucgucuucagcaccuccuucuaccugaucagcaucuuccugcaccucaucaagaucccgacccaccgccacaucacggggaagcccugccccaagccccaccggcugaaccacaugggcaucugcuccugcgggcuguacaagcacccgggcgugcccgugaaguggaagcgcugaggacuagucccuguucccagagcccacuuuuuuuucuuuuuuugaaauaaaauagccugucuuucagaucucaaaggcucuuuucagagccaccaaaaaaaaaaaaaaaaaaaaaaaaaaaaaaaaaaaaaaaaaaaaaaaaaaaaaaaaaaaaaaaaaaaaaaaaaaaaaaaaaaaaaaaaaaaaaaaaaaaaa

SEQ ID NO: 35160 - RNA, 1745 nt, Artificial Sequence
  mRNA product Design a-1 (hSL-A100) comprising derived and/or modified sequence from LASV(LASV253-NIG-2011;Clade II)__AIT17670__GPCmut9 (opt1)
aggagagucccgcagucggcguccagcggcucugcuuguucgugugugugucguugcaggccuuauucaagcuuaccaugggccagaucaucaccuucuuccaggaggugccccacgucaucgaggaggugaugaacaucgugcugaucgcccucagccugcuggccauccucaaggggaucuacaacgucgcgaccugcggccuguucgggcugguguccuuccuccugcugugcggccgcagcugcuccacgaccuacaaggggguguacgagcuccagacccuggagcuggacauggccagccucaacaugaccaugccgcuguccugcacgaagaacaacagccaccacuacaucauggucggcaacgagaccggccuggagcucacccugaccaacacguccaucaucaaccacaaguucugcaaccugagcgacgcccacaagaagaaccucuacgaccacgcccugauguccaucaucagcaccuuccaccuguccauccccaacuucaaccaguacgaggccaugagcugcgacuucaacgggggcaagaucuccgugcaguacaaccucagccacaccuacgcgguggacgccgccaaccacugcgggaccaucgccaacggcguccugcagacguucaugcggauggcguggggcggguccuacaucgcccuggacagcggcugcggguccugggacugcaucaugaccagcuaccaguaccucaucauccagaacaccaccugggaggaccacugccaguucucccgccccagccccaucggcuaccuggggcugcucagccagcggacgcgcgacaucuacaucucccggcgccugcugggcaccuucaccuggacccucagcgacuccgagggcaacgagacgcccgggggcuacugccugacccgguggaugcugaucgaggccgagcucaagugcuucgggaacaccgccguggccaagugcaacgagaagcacgacgaggaguucugcgacaugcugcgccuguucgacuucaacaagcaggcgauccggcgccucaaggccgaggcccagaugagcauccagcugaucaacaaggccgugaacgcccugaucaacgaccagcucaucaugaagaaccaccuccgggacaucaugugcaucccguacugcaacuacuccaaguacugguaccugaaccacaccgucacgggccgcaccagccugccccggugcuggcugguguccaacgggagcuaccugaacgagacccacuucuccgacgacaucgagcagcaggcggacaacaugaucaccgagcuccugcagaaggaguacaucgaccgccagggcaagacgccccugggccugguggaccucuucgucuucagcaccuccuucuaccugaucagcaucuuccugcaccucgugaagaucccgacccaccggcacaucaucgggaagcccugccccaagccccaccgccugaaccacaugggcaucugcuccugcgggcuguacaagcacccgggcgugcccgucaaguggaagcggugaggacuagucccuguucccagagcccacuuuuuuuucuuuuuuugaaauaaaauagccugucuuucagaucucaaaggcucuuuucagagccaccaaaaaaaaaaaaaaaaaaaaaaaaaaaaaaaaaaaaaaaaaaaaaaaaaaaaaaaaaaaaaaaaaaaaaaaaaaaaaaaaaaaaaaaaaaaaaaaaaaaaa

SEQ ID NO: 35161 - RNA, 1745 nt, Artificial Sequence
  mRNA product Design a-1 (hSL-A100) comprising derived and/or modified sequence from LASV(LASV254-NIG-2011;Clade II)__AIT17674__GPCmut9 (opt1)
aggagagucccgcagucggcguccagcggcucugcuuguucgugugugugucguugcaggccuuauucaagcuuaccaugggccagaucaucaccuucuuccaggaggugccccacgucaucgaggaggugaugaacaucgugcugaucgcccucagccugcuggccauccucaaggggaucuacaacgucgcgaccugcggccuguucgggcugguguccuuccuccugcugugcggccgcagcugcuccacgaccuacaaggggguguacgagcuccagacccuggagcuggacaugaccaaccucaacaugacgaugccgcugagcugcaccaagaacaacucccaccacuacaucauggucggcaacgagaccggccuggagcucacccugacgaacaccagcaucaucaaccacaaguucugcaaccuguccgacgcccacaagaagaaccucuacaaccacgcccugaugagcaucaucuccaccuuccaccugagcauccccaacuucaaccaguacgaggccauguccugcgacuucaacgggggcaagaucagcgugcaguacaaccucucccacagcuacgccguggacgcggccaaccacugcgggaccaucgccaacggcguccugcagacguucaugcggauggccuggggcggguccuacaucgcgcuggacagcggcugcgggaacugggacugcaucaugaccuccuaccaguaccucaucauccagaacaccaccugggaggaccacugccaguucagccgccccucccccaucggcuaccuggggcugcucagccagcggacgcgcgacaucuacaucagccggcgccugcugggcaccuucaccuggacccucuccgacagcgagggcaacgagacgcccgggggcuacugccugacccgguggaugcugaucgaggccgagcucaagugcuucgggaacaccgccguggccaagugcaacgagaagcacgacgaggaguucugcgacaugcugcgccuguucgacuucaacaagcaggccauccggcgccucaagaccgaggcgcaggccaacauccagcugaucaacaaggccgugaacgcccugaucaacgaccagcucaucaugaagaaccaccuccgggacaucaugugcauccccuacugcaacuacuccaaguacugguaccugaaccacacggucaccggcaagaccagccugccccgcugcuggcugguguccaacgggagcuaccugaacgagacccacuucuccgacgacaucgagcagcaggccgacaacaugaucacggagcuccugcagaaggaguacauggaccggcagggcaagaccccgcugggccugguggaccucuucgucuucagcaccuccuucuaccugaucagcaucuuccugcaccucgugaagaucccgacccaccgccacgugaucgggaagcccugccccaagccccaccggcugaaccacaugggcaucugcuccugcgggcuguacaagcacccgggcguccccgugaaguggaagcgcugaggacuagucccuguucccagagcccacuuuuuuuucuuuuuuugaaauaaaauagccugucuuucagaucucaaaggcucuuuucagagccaccaaaaaaaaaaaaaaaaaaaaaaaaaaaaaaaaaaaaaaaaaaaaaaaaaaaaaaaaaaaaaaaaaaaaaaaaaaaaaaaaaaaaaaaaaaaaaaaaaaaaa

SEQ ID NO: 35162 - RNA, 1745 nt, Artificial Sequence
  mRNA product Design a-1 (hSL-A100) comprising derived and/or modified sequence from LASV(Nig08-A19;Clade III)__ADU56618__GPCmut9 (opt1)
aggagagucccgcagucggcguccagcggcucugcuuguucgugugugugucguugcaggccuuauucaagcuuaccaugggccagaucgugaccuucuuccaggaggucccccacgugaucgaggaggugaugaacaucguccugaucgcccucagcauccuggccauccugaaggggcucuacaacaucgcgaccugcggccugaucgggcuggugacguuccuccugcuguccggccgcagcugcuccaugaccuacaaggggguguacgagcuccagacccuggagcugaacaugaacacccucaacaugacgaugccgcugagcugcaccaagaacaacucccaccacuacaucauggucggcaacgagaccggccuggagcucacccugacgaacaccagccugcuccaccacaaguucugcaaccuguccgacgcccacaagaagaaccuguacgaccacacccucaugagcaucaucuccaccuuccaccugagcauccccaacuucaaccaguacgaggccauguccugcgacuucaacgggggcaagaucacggugcaguacaaccugagccacuccuacgccaucgacgccgcgaaccacugcgggaccguggccaacggcguccuccagaccuucaugcggauggccuggggcgggagcuacaucgcccuggacuccggcugcgggaagugggacugcaucaugaccagcuaccaguaccugaucauccagaacacgaccugggaggaccacugccaguucucccgccccagccccaucggcuaccucgggcugcugucccagcggacccgcgacaucuacaucagccggcgccuccugggcaccuucacguggacccugagcgacuccgagggcaacgagacccccgggggcuacugccucacccgguggaugcugaucgaggcggagcugaagugcuucgggaacacggccguggccaagugcaacgagaagcacgacgaggaguucugcgacaugcuccgccuguucgacuucaacaagcaggccauccggcgccugaaggccgaggcgcagaugagcauccagcucaucaacaaggccgugaacgcccugaucaacgaccagcugaucaugaagaaccaccuccgggacaucaugugcauccccuacugcaacuacuccaaguacugguaccugaaccacaccagcaccggccgcaccucccugccccggugcuggcucgucagcaacggguccuaccugaacgagacgcacuucagcgacgacaucgagcagcaggccgacaacaugaucaccgagaugcugcagaaggaguaccuggaccgccagggcaagaccccgcucggccugguggaccuguucguguucuccaccagcuucuaccucaucuccaucuuccugcaccuggucaagaucccgacgcaccggcacaucguggggaagcccugccccaagccccaccgccucaaccacaugggcaucugcagcugcgggcuguacaagcagccgggcgugcccguccgguggaagcgcugaggacuagucccuguucccagagcccacuuuuuuuucuuuuuuugaaauaaaauagccugucuuucagaucucaaaggcucuuuucagagccaccaaaaaaaaaaaaaaaaaaaaaaaaaaaaaaaaaaaaaaaaaaaaaaaaaaaaaaaaaaaaaaaaaaaaaaaaaaaaaaaaaaaaaaaaaaaaaaaaaaaaa

SEQ ID NO: 35163 - RNA, 1748 nt, Artificial Sequence
  mRNA product Design a-1 (hSL-A100) comprising derived and/or modified sequence from LASV(G1180-SLE-2010;Clade IV)__AIT17168__GPCmut9 (opt1)
aggagagucccgcagucggcguccagcggcucugcuuguucgugugugugucguugcaggccuuauucaagcuuaccaugggccagaucgugaccuucuuccaggaggucccccacgugaucgaggaggugaugaacaucguccugaucgcccucagcauccuggccgugcugaaggggcucuacaacuucgcgaccugcggccugguggggcugcucaccuuccugcugcucugcggccgcuccugcaccgccagccgguacaagggggucuacgagcugcagacccuggagcucaacauggagacccugaacaugacgaugccgcuguccugcaccaagaacaacagccaccacuacaucauggugggcaacgagaccggccucgagcugacccugacgaacaccuccaucaucaaccacaaguucugcaaccucagcgacgcccacaagaagaaccuguacgaccacgcccugauguccaucaucagcaccuuccaccucuccauccccaacuucaaccaguacgaggccaugagcugcgacuucaacgggggcaagaucuccgugcaguacaaccugagccacuccuacgcgggggacgccgccaaccacugcggcaccgucgccaacggggugcugcagacguucaugcgcauggcguggggcggcagcuacaucgcccucgacuccgggugcggcagcugggacugcaucaugaccuccuaccaguaccugaucauccagaacaccaccugggaggaccacugccaguucagccggcccucccccaucggguaccugggccuccugagccagcgcacgcgggacaucuacaucagccgccggcugcucggcaccuucaccuggacccuguccgacagcgaggggaaggacacgccgggcggguacugccugacccgcuggaugcucaucgaggccgagcugaagugcuucggcaacaccgccguggccaagugcaacgagaagcacgacgaggaguucugcgacaugcugcggcuguucgacuucaacaagcaggcgauccagcgccugaaggccgaggcccagauguccauccagcugaucaacaaggccgucaacgcccucaucaacgaccagcugaucaugaagaaccaccuccgggacaucaugugcauccccuacugcaacuacagcaaguacugguaccucaaccacaccacgaccgggaagaccucccugcccaagugcuggcuggugagcaacggcuccuaccucaacgagacccacuucagcgacgacaucgagcagcaggcggacaacaugaucacggagaugcugcagaaggaguacauggagcgccagggcaagacgccccuggggcugguggaccucuucgucuucuccaccagcuucuaccugaucuccaucuuccugcaccucgugaagaucccgacccaccggcacaucgugggcaagagcugccccaagccccaccgccugaaccacauggggaucugcuccugcggccuguacaagcagcccggggucccggugaaguggaagcggugaggacuagucccuguucccagagcccacuuuuuuuucuuuuuuugaaauaaaauagccugucuuucagaucucaaaggcucuuuucagagccaccaaaaaaaaaaaaaaaaaaaaaaaaaaaaaaaaaaaaaaaaaaaaaaaaaaaaaaaaaaaaaaaaaaaaaaaaaaaaaaaaaaaaaaaaaaaaaaaaaaaaa

SEQ ID NO: 35164 - RNA, 1748 nt, Artificial Sequence
  mRNA product Design a-1 (hSL-A100) comprising derived and/or modified sequence from LASV(G1442-SLE-2011;Clade IV)__AIT17180__GPCmut9 (opt1)
aggagagucccgcagucggcguccagcggcucugcuuguucgugugugugucguugcaggccuuauucaagcuuaccaugggccagaucgugaccuucuuccaggaggucccccacgugaucgaggaggugaugaacaucguccugaucgcccucagcauccuggccgugcugaaggggcucuacaacguggcgaccugcggccugaucgggcuggucacguuccuccugcugugcggccgcuccugcaccaccacccucuacaaggggguguacgagcugcagacgcuggagcucaacauggagacccugaacaugaccaugccgcugagcugcaccaagaacaacucccaccacuacauccgggugggcaacgagacgggccucgagcugacccugaccaacaccagcaucaucaaccacaaguucugcaaccucuccgacgcccacaagaagaaccuguacgaccacgcccugaugagcaucaucuccacguuccaccucagcauccccaacuucaaccaguacgaggccauguccugcgacuucaacgggggcaagaucagcguccaguacaaccugucccacagcuacgccggggacgcggccaaccacugcggcaccguggccaacggggugcugcagaccuucaugcgcauggccuggggcggcuccuacaucgcgcucgacagcgggugcggcaacugggacugcaucaugaccuccuaccaguaccugaucauccagaacacgaccugggacgaccacugccaguucagccggcccucccccaucggguaccugggccuccugagccagcgcacccgggacgucuacaucucccgccggcugcucggcaccuucacguggacccugagcgacagcgaggggaaggacaccccgggcggguacugccugacccgcuggaugcucaucgaggccgagcugaagugcuucggcaacacggccguggccaagugcaacgagaagcacgacgaggaguucugcgacaugcugcggcuguucgacuucaacaagcaggccauccagcgccugaaggcggaggcccagauguccauccagcugaucaacaaggccgugaacgcccucaucaacgaccagcugaucaugaagaaccaccuccgggacaucaugugcauccccuacugcaacuacagcaaguacugguaccucaacaacaccgccaccgggaagaccucccugcccaagugcuggcugaucagcaacggcuccuaccucaacgagacgcacuucagcgacgacaucgagcaggaggcggacaacaugaucaccgagaugcugcagaaggaguacauggagcgccagggcaagacgccccuggggcuggucgaccucuucguguucuccaccagcuucuaccugaucuccaucuuccugcaccucgugaagaucccgacccaccggcacaucgucggcaagagcugccccaagccccaccgccugaaccacauggggaucugcuccugcggccuguacaagcagcccggggugccggugcgguggaagcgcugaggacuagucccuguucccagagcccacuuuuuuuucuuuuuuugaaauaaaauagccugucuuucagaucucaaaggcucuuuucagagccaccaaaaaaaaaaaaaaaaaaaaaaaaaaaaaaaaaaaaaaaaaaaaaaaaaaaaaaaaaaaaaaaaaaaaaaaaaaaaaaaaaaaaaaaaaaaaaaaaaaaaa

SEQ ID NO: 35165 - RNA, 1748 nt, Artificial Sequence
  mRNA product Design a-1 (hSL-A100) comprising derived and/or modified sequence from LASV(G3010-SLE-2013;Clade IV)__AIT17344__GPCmut9 (opt1)
aggagagucccgcagucggcguccagcggcucugcuuguucgugugugugucguugcaggccuuauucaagcuuaccaugggccagaucgugaccuucuuccaggaggucccccacgugaucgaggaggugaugaacaucguccugaucgcccucagcauccuggccgugcugaaggggcucuacaacuucgcgaccugcggccugguggggcuggucacguuccuccugcugugcggccgcuccugcaccaccagccucuacaaggggguguacgagcugcagacccuggagcucaacauggagacgcugaacaugaccaugccgcuguccugcaccaagaacaacagccaccacuacaucauggugggcaacgagaccggccucgagcugacgcugaccaacaccuccaucaucaaccacaaguucugcaaccucagcgacgcccacaagaagaaccuguacaaccacgcccugauguccaucaucagcaccuuccaccucuccauccccaacuucaaccaguacgaggccaugagcugcgacuucaacgggggcaagaucuccguccaguacaaccugagccacuccuacgccggggacgcggccagccacugcggcacgguggccaacggggugcugcagaccuucaugcggauggccuggggcggcuccuacaucgcgcucgacagcgggugcggcaagugggacugcaucaugaccuccuaccaguaccugaucauccagaacaccacgugggaggaccacugccaguucagccgccccucccccaucggguaccugggccuccugagccagcggacccgcgacaucuacaucagccggcgccugcucggcaccuucaccuggacgcuguccgacagcgaggggaaggacaccccgggcggguacugccugacccgguggaugcucaucgaggccgagcugaagugcuucggcaacaccgccgucgccaagugcaacgagaagcacgacgaggaguucugcgacaugcugcgccucuucgacuucaacaagcaggccauccagcggcugaagacggaggcgcagauguccauccagcugaucaacaaggccgugaacgcccucaucaacgaccagcugaucaugaagaaccaccuccgcgacaucaugugcauccccuacugcaacuacagcaaguacugguaccugaaccacaccaccaccgggaagacgucccugcccaagugcuggcuggugagcaacggcuccuaccucaacgagacccacuucagcgacgacaucgagcagcaggccgacaacaugaucaccgagaugcugcagaaggaguacauggagcggcagggcaagacgccccuggggcuggucgaccucuucguguucuccaccagcuucuaccugaucuccaucuuccugcaccucgugaagaucccgacccaccgccacaucgucggcaagagcugccccaagccccaccggcugaaccacauggggaucugcuccugcggccuguacaagcagcccggggugccggugcgcuggaagcggugaggacuagucccuguucccagagcccacuuuuuuuucuuuuuuugaaauaaaauagccugucuuucagaucucaaaggcucuuuucagagccaccaaaaaaaaaaaaaaaaaaaaaaaaaaaaaaaaaaaaaaaaaaaaaaaaaaaaaaaaaaaaaaaaaaaaaaaaaaaaaaaaaaaaaaaaaaaaaaaaaaaaa

SEQ ID NO: 35166 - RNA, 1748 nt, Artificial Sequence
  mRNA product Design a-1 (hSL-A100) comprising derived and/or modified sequence from LASV(G502-SLE-2009;Clade IV)__AIT17126__GPCmut9 (opt1)
aggagagucccgcagucggcguccagcggcucugcuuguucgugugugugucguugcaggccuuauucaagcuuaccaugggccagaucgugaccuucuuccaggaggucccccacgugaucgaggaggugaugaacaucguccugaucgcccucagcauccuggccgugcugaaggggcucuacaacuucgcgaccugcggccugguggggcugcucacguuccugcugcucugcggccgcuccugcaccaccgggcuguacaagggcgucuacgagcugcagacccucgagcugaacauggagacgcugaacaugaccaugccgcucagcugcaccaagaacaacucccaccacuacaucauggugggcaacgagaccgggcuggagcugacgcucaccaacaccagcaucaucaaccacaaguucugcaaccuguccgacgcccacaagaagaaccuguacgaccacgcccucaugagcaucaucuccaccuuccaccugagcauccccaacuucaaccaguacgaggccauguccugcgacuucaacggcgggaagaucagcgugcaguacaaccugucccacagcuacgccggcgacgcggccgaccacugcgggacggucgccaacggcgugcuccagaccuucaugcggauggccuggggcggguccuacaucgcgcuggacagcggcugcgggcgcugggacugcaucaugaccuccuaccaguaccugaucauccagaacaccacgugggaggaccacugccaguucagccggcccucccccaucggcuaccucggccugcugagccagcgcacccgggacaucuacaucucccgccggcuccuggggaccuucaccuggacgcugagcgacagcgagggcaaggacacccccgggggcuacugccucacccgcuggaugcugaucgaggccgagcugaagugcuucgggaacaccgccguggccaagugcaacgagaagcacgacgaggaguucugcgacaugcuccggcuguucgacuucaacaagcaggccauccagcgccugaaggcggaggcccagauguccauccagcucaucaacaaggccgucaacgcccugaucaacgaccagcuggugaugaagaaccaccuccgggacaucaugugcauccccuacugcaacuacagccgcuacugguaccugaaccacacgaccaccggccggaccucccugcccaagugcuggcucgugagcaacggcuccuaccugaacgagacgcacuucagcgacgacaucgagcagcaggccgacaacaugaucaccgagaugcugcagaaggaguacauggagcgccaggggaagaccccgcugggccucgucgaccuguucguguucuccaccagcuucuaccugaucuccaucuuccuccaccuggugaagaucccgacgcaccggcacaucgucggcaagagcugccccaagccccaccgccugaaccacauggggaucugcuccugcgggcucuacaagcagcccggcgugccggugaaguggaagcggugaggacuagucccuguucccagagcccacuuuuuuuucuuuuuuugaaauaaaauagccugucuuucagaucucaaaggcucuuuucagagccaccaaaaaaaaaaaaaaaaaaaaaaaaaaaaaaaaaaaaaaaaaaaaaaaaaaaaaaaaaaaaaaaaaaaaaaaaaaaaaaaaaaaaaaaaaaaaaaaaaaaaa

SEQ ID NO: 35167 - RNA, 1748 nt, Artificial Sequence
  mRNA product Design a-1 (hSL-A100) comprising derived and/or modified sequence from LASV(G733-SLE-2010;Clade IV)__AIT17154__GPCmut9 (opt1)
aggagagucccgcagucggcguccagcggcucugcuuguucgugugugugucguugcaggccuuauucaagcuuaccaugggccagaucgugaccuucuuccaggaggucccccacgugaucgaggaggugaugaacaucguccugaucgcccucagcauccuggccgugcugaaggggcucuacaacuucgcgaccugcggcaucguggggcuggucuccuuccugcuccugugcggccgcagcugcacgaccucccuguacaaggggguguacgagcuccagacccuggagcugaacauggagacccucaacaugacgaugccgcugagcugcaccaagaacaacucccaccacuacaucauggugggcaacgagaccggccuggagcucacccugacgaacaccagcaucaucaaccacaaguucugcaaccuguccgacgcccacaagaagaaccucuacgaccacgcccugaugagcaucaucuccaccuuccaccugagcauccccaacuucaaccaguacgaggccauguccugcgacuucaacgggggcaagaucagcguccaguacaaccucucccacagcuacgccggggacgcggccaaccacugcggcaccaucgccaacggggugcugcagacguucaugcggauggccuggggcggcuccuacaucgcgcuggacagcgggugcgaccgcugggacugcaucaugaccuccuaccaguaccucaucauccagaacaccaccugggaggaccacugccaguucagccggcccucccccaucggcuaccuggggcugcucagccagcgcacgcgggacaucuacaucagccgccggcugcugggcaccuucaccuggacccucuccgacagcgagggcaaggacacgcccgggggcuacugccugacccgcuggaugcugaucgaggccgagcucaagugcuucgggaacaccgccguggccaagugcaacgagaagcacgacgaggaguucugcgacaugcugcggcuguucgacuucaacaagcaggccauccagcgccucaaggcggaggcccagauguccauccagcugaucaacaaggccgucaacgcccugaucaacgaccagcucaucaugaagaaccaccuccgggacaucaugugcauccccuacugcaacuacagcaaguacugguaccugaaccacaccacgaccggcaagaccucccugcccaagugcuggcuggugagcaacggguccuaccugaacgagacccacuucagcgacgacaucgagcagcaggccgacaacaugaucacggagaugcuccagaaggaguacauggagcgccagggcaagaccccgcugggccugguggaccuguucgucuucuccaccagcuucuaccucaucuccaucuuccugcaccuggugaagaucccgacccaccggcacguggucggcaagagcugccccaagccccaccgccucaaccacauggggaucugcuccugcgggcuguacggccagcccggggugccggugaaguggaagcggugaggacuagucccuguucccagagcccacuuuuuuuucuuuuuuugaaauaaaauagccugucuuucagaucucaaaggcucuuuucagagccaccaaaaaaaaaaaaaaaaaaaaaaaaaaaaaaaaaaaaaaaaaaaaaaaaaaaaaaaaaaaaaaaaaaaaaaaaaaaaaaaaaaaaaaaaaaaaaaaaaaaaa

SEQ ID NO: 35168 - RNA, 1748 nt, Artificial Sequence
  mRNA product Design a-1 (hSL-A100) comprising derived and/or modified sequence from MOPV/LASV reassortant(IGS-1;Clade IV)__AFY05576__GPCmut9 (opt1)
aggagagucccgcagucggcguccagcggcucugcuuguucgugugugugucguugcaggccuuauucaagcuuaccaugggccagaucgugaccuucuuccaggaggucccccacgugaucgaggaggugaugaacaucguccugaucgcccucagcgugcuggccgugcugaaggggcucuacaacuucgcgaccugcggccuggucgggcuggugacguuccuccugcugugcggccgcuccugcaccaccagccucuacaaggggguguacgagcugcagacccuggagcucaacauggagacgcugaacaugaccaugccgcuguccugcaccaagaacaacagccaccacuacaucauggucggcaacgagaccggccucgagcugacgcugaccaacaccuccaucaucaaccacaaguucugcaaccucagcgacgcccacaagaagaaccuguacgaccacgcccugauguccaucaucagcaccuuccaccucuccauccccaacuucaaccaguacgaggccaugagcugcgacuucaacgggggcaagaucuccgugcaguacaaccugagccacuccuacgccggggacgcggccaaccacugcggcacgguggccaacgggguccugcagaccuucaugcggauggccuggggcggcagcuacaucgcgcucgacuccgggugcggcaacugggacugcaucaugaccagcuaccaguaccugaucauccagaacaccacgugggaggaccacugccaguucucccgccccagccccaucggguaccugggccuccugucccagcggacccgcgacaucuacaucagccggcgccugcucggcaccuucaccuggacgcugagcgacuccgagggggaggacaccccgggcggguacugccugacccgguggaugcucaucgaggccgagcugaagugcuucggcaacaccgccguggccaagugcaacgagaagcacgacgaggaguucugcgacaugcugcgccucuucgacuucaacaagcaggccauccagcggcugaaggcggaggcccagaugagcauccagcugaucaacaaggccgugaacgcccucaucaacgaccagcugaucaugaagaaccaccuccgcgacaucaugugcauccccuacugcaacuacuccaaguacugguaccugaaccacacgaccaccgggcggaccagccugcccaagugcuggcuggucuccaacggcagcuaccucaacgagacgcacuucuccgacgacaucgagcagcaggccgacaacaugaucaccgagaugcugcagaaggaguacauggagcgccagggcaagacgccccuggggcugguggaccucuucguguucagcaccuccuucuaccugaucagcaucuuccugcaccucgucaagaucccgacccaccggcacaucgugggcaaguccugccccaagccccaccgccugaaccacauggggaucugcagcugcggccuguacaagcagcccggggugccggucaaguggaagcggugaggacuagucccuguucccagagcccacuuuuuuuucuuuuuuugaaauaaaauagccugucuuucagaucucaaaggcucuuuucagagccaccaaaaaaaaaaaaaaaaaaaaaaaaaaaaaaaaaaaaaaaaaaaaaaaaaaaaaaaaaaaaaaaaaaaaaaaaaaaaaaaaaaaaaaaaaaaaaaaaaaaaa

SEQ ID NO: 35169 - RNA, 1748 nt, Artificial Sequence
  mRNA product Design a-1 (hSL-A100) comprising derived and/or modified sequence from LASV(LM765-SLE-2012;Clade IV)__AIT17814__GPCmut9 (opt1)
aggagagucccgcagucggcguccagcggcucugcuuguucgugugugugucguugcaggccuuauucaagcuuaccaugggccagaucgugaccuucuuccaggaggucccccacgugaucgaggaggugaugaacaucguccugaucgcccucagcauccuggccgugcugaaggggcucuacaacuucgcgaccugcggccugguggggcuggucacguuccuccugcugugcggccgcuccugcaccaccagccucuacaaggggguguacgagcugcagacccuggagcucaacauggagacgcugaacaugaccaugccgcuguccugcaccaagaacaacagccaccacuacaucauggugggcaacgagaccggccucgagcugacgcugaccaacaccuccaucaucgaccacaaguucugcaaccucagcgacgcccaccggaagaaccuguacgaccacgcccugauguccaucaucagcaccuuccaccucuccauccccaacuucaaccaguacgaggccaugagcugcgacuucaacgggggcaagaucuccguccaguacaaccugagccacuccuacgccaaggacgcggccgaccacugcgggacgguggccaacggcgugcugcagaccuucaugcgcauggccuggggcgggagcuacaucgcgcucgacuccggcugcgggcggugggacugcaucaugaccagcuaccaguaccugaucauccagaacaccacgugggaggaccacugccaguucucccgccccagccccaucggcuaccuggggcuccugucccagcggacccgcgacaucuacaucagccggcgccugcucggcaccuucaccuggacgcugagcgacuccgagggcaaggacacccccgggggcuacugccugacccgguggaugcucaucgaggccgagcugaagugcuucgggaacaccgccgucgccaagugcaacgagaagcacgacgaggaguucugcgacaugcugcgccucuucgacuucaacaagcaggccauccagcggcugaaggcggaggcccagaugagcauccagcugaucaacaaggccgugaacgcccucaucaacgaccagcugaucaugaagaaccaccuccgcgacaucaugugcauccccuacugcaacuacuccaaguacugguaccugaaccacacgaccaccggcaagaccagccugcccaagugcuggcugguguccaacgggagcuaccucaacgagacgcacuucuccgacgacaucgagcagcaggccgacaacaugaucaccgagaugcugcagaaggaguacauggagcggcagggcaagaccccgcugggccuggucgaccucuucguguucagcaccuccuucuaccugaucagcaucuuccugcaccucgugaagaucccgacgcaccgccacaucgucgggaagcccugccccaagccccaccggcugaaccacaugggcaucugcuccugcgggcuguacaagcagccgggcgugcccgugaaguggaagcgcugaggacuagucccuguucccagagcccacuuuuuuuucuuuuuuugaaauaaaauagccugucuuucagaucucaaaggcucuuuucagagccaccaaaaaaaaaaaaaaaaaaaaaaaaaaaaaaaaaaaaaaaaaaaaaaaaaaaaaaaaaaaaaaaaaaaaaaaaaaaaaaaaaaaaaaaaaaaaaaaaaaaaa

SEQ ID NO: 35170 - RNA, 1748 nt, Artificial Sequence
  mRNA product Design a-1 (hSL-A100) comprising derived and/or modified sequence from LASV(LM776-SLE-2012;Clade IV)__AIT17824__GPCmut9 (opt1)
aggagagucccgcagucggcguccagcggcucugcuuguucgugugugugucguugcaggccuuauucaagcuuaccaugggccagaucgugaccuucuuccaggaggucccccacgugaucgaggaggugaugaacaucguccugaucgcccucagcauccuggccgugcugaaggggcucuacaacuucgcgaccugcggccugguggggcuggucacguuccuccugcugugcggccgcuccugcaccaccagcguguacaaggggguguacgagcuccagacccuggagcugaacauggagacgcucaacaugaccaugccgcuguccugcaccaagaacaacagccaccacuacaucauggucggcaacgagaccggccuggagcucacgcugaccaacaccuccaucaucaaccacaaguucugcaaccugagcgacgcccacaagaagaaccucuacgaccacgcccugauguccaucaucagcaccuuccaccuguccauccccaacuucaaccaguacgaggccaugagcugcgacuucaacgggggcaagaucuccgugcaguacaaccucagccacuccuacgccggggacgcggccaaccacugcggcacgguggccaacgggguccugcagaccuucaugcggauggccuggggcggcagcuacaucgcgcuggacuccgggugcggcaagugggacugcaucaugaccagcuaccaguaccucaucauccagaacaccacgugggaggaccacugccaguucucccgccccagccccaucggguaccugggccugcucucccagcggacccgcgacaucuacaucagccggcgccugcugggcaccuucaccuggacgcucagcgacuccgaggggaaggacaccccgggcggguacugccugacccgguggaugcugaucgaggccgagcucaagugcuucggcaacaccgccguggccaagugcaacgagaagcacgacgaggaguucugcgacaugcugcgccuguucgacuucaacaagcaggccauccagcggcucaaggcggaggcccagaugagcauccagcugaucaacaaggccgugaacgcccugaucaacgaccagcucaucaugaagaaccaccuccgcgacaucaugugcauccccuacugcaacuacuccaaguacugguaccugaaccacacgaccaccgggaagaccagccugcccaagugcuggcuggucuccaacggcagcuaccugaacgagacgcacuucuccgacgacaucgagcagcaggccgacaacaugaucaccgagaugcuccagaaggaguacauggagcggcagggcaagacgccccuggggcugguggaccuguucguguucagcaccuccuucuaccucaucagcaucuuccugcaccuggucaagaucccgacccaccgccacaucgugggcaaguccugccccaagccccaccggcucaaccacauggggaucugcagcugcggccuguacaagcagcccggggugccgguccgcuggaagcggugaggacuagucccuguucccagagcccacuuuuuuuucuuuuuuugaaauaaaauagccugucuuucagaucucaaaggcucuuuucagagccaccaaaaaaaaaaaaaaaaaaaaaaaaaaaaaaaaaaaaaaaaaaaaaaaaaaaaaaaaaaaaaaaaaaaaaaaaaaaaaaaaaaaaaaaaaaaaaaaaaaaaa

SEQ ID NO: 35171 - RNA, 1748 nt, Artificial Sequence
  mRNA product Design a-1 (hSL-A100) comprising derived and/or modified sequence from LASV(Mad39;Clade IV)__ANH09722__GPCmut9 (opt1)
aggagagucccgcagucggcguccagcggcucugcuuguucgugugugugucguugcaggccuuauucaagcuuaccaugggccagaucgugaccuucuuccaggaggucccccacgugaucgaggaggugaugaacaucguccugaucgcccucagcauccuggccgugcugaaggggcucuacaacguggcgaccugcggccugaucgggcuggucacguuccuccugcugugcggccgcuccugcaccaccacccucuacaaggggguguacgagcugcaggcccuggagcucaacauggagacgcugaacaugaccaugccgcugagcugcaccaagaacaacucccaccacuacauccgggugggcaacgagaccggccucgagcugacgcugaccaacaccagccucaucaaccacaaguucugcaaccuguccgacgcccacaagaagaaccuguacgaccacgcccucaugagcaucaucuccaccuuccaccugagcauccccaacuucaaccaguacgaggccauguccugcgacuucaacgacgggaagaucagcguccaguacaaccugucccacacguacgcgggcgacaccgccaaccacugcgggaccguggccaacggcgugcuccagaccuucaugcgcauggccuggggcgggagcuacaucgcgcuggacuccggcugcgggggcugggacugcaucaugacgagcuaccaguaccugaucauccagaacaccaccugggaggaccacugccaguucucccggcccagccccaucggguaccucggccugcugucccagcgcacccgggacaucuacaucagccgccggcuccugggcacguucaccuggacccuguccgacagcgaggggaaggacaccccgggcggguacugccucacgcgcuggaugcugaucgaggccgagcugaagugcuucggcaacaccgccgucgccaagugcaacgagaagcacgacgaggaguucugcgacaugcuccggcuguucgacuucaacaagcaggccauccagcgccugaaggcggaggcccagaugagcauccagcucaucaacaaggccgugaacgcccugaucaacgaccagcugaucaugaagaaccaccuccgggacaucaugugcauccccuacugcaacuacuccaaguacugguaccugaaccacaccgugaccgggaagacgagccugcccaagugcuggcucgucuccaacggcagcuaccugaacgagacccacuucuccgacgacaucgagcagcaggccgacaacaugaucaccgagaugcugcagaaggaguacauggagcgccagggcaagacgccccuggggcucguggaccuguucguguucagcaccuccuucuaccugaucagcaucuuccuccaccuggucaagaucccgacccaccggcacguggugggcaagcccugccccaagccccaccgccugaaccacauggggaucugcuccugcggcuucuacaagcagccggggguccccgugcgguggaagcgcugaggacuagucccuguucccagagcccacuuuuuuuucuuuuuuugaaauaaaauagccugucuuucagaucucaaaggcucuuuucagagccaccaaaaaaaaaaaaaaaaaaaaaaaaaaaaaaaaaaaaaaaaaaaaaaaaaaaaaaaaaaaaaaaaaaaaaaaaaaaaaaaaaaaaaaaaaaaaaaaaaaaaa

SEQ ID NO: 35172 - RNA, 1748 nt, Artificial Sequence
  mRNA product Design a-1 (hSL-A100) comprising derived and/or modified sequence from LASV(Z0947-SLE-2011;Clade IV)__AIT17840__GPCmut9 (opt1)
aggagagucccgcagucggcguccagcggcucugcuuguucgugugugugucguugcaggccuuauucaagcuuaccaugggccagaucgugaccuucuuccaggaggucccccacgugaucgaggaggugaugaacaucguccugaucgcccucagcauccuggccgugcugaaggggcucuacaacuucgcgaccugcggccugguggggcuggucacguuccuccugcugugcggccgcuccugcaccaucagccucuacaaggggguguacgagcugcagacccuggagcucaacauggagacccugaacaugacgaugccgcuguccugcaccaagaacaacagccaccacuacaucauggugggcaacgagaccggccucgagcugacccugacgaacaccuccaucaucaaccacaaguucugcaaccucagcgacgcccacaagaagaaccuguacgaccacgcccugauguccaucaucagcaccuuccaccucuccauccccaacuucaaccaguacgaggccaugagcugcgacuucaacgggggcaagaucuccguccaguacaaccugagccacuccuacgccggggacgcggccaaccacugcggcaccguggccaacggggugcugcagacguucaugcggauggccuggggcggcagcuacaucgcgcucgacuccgggugcgaccgcugggacugcaucaugaccagcuaccaguaccugaucauccagaacaccaccugggaggaccacugccaguucucccggcccagccccaucggcuaccuggggcuccugucccagcgcacgcgggacaucuacaucagccgccggcugcucggcaccuucaccuggacccugagcgacuccgagggcaaggacacgcccgggggcuacugccugacccgcuggaugcucaucgaggccgagcugaagugcuucgggaacaccgccgucgccaagugcaacgagaagcacgacgaggaguucugcgacaugcugcggcuguucgacuucaacaagcaggccauccagcgccugaaggcggaggcccagaugagcauccagcugaucaacaaggccgugaacgcccucaucaacgaccagcugaucaugaagaaccaccuccgggacaucaugugcauccccuacugcaacuacuccaaguacugguaccucaaccacaccacgaccggcaagaccagccugcccaagugcuggcugguguccaacgggagcuaccucaacgagacccacuucuccgacgacaucgagcagcaggccgacaacaugaucacggagaugcugcagaaggaguacauggagcgccagggcaagaccccgcugggccuggucgaccucuucguguucagcaccuccuucuaccugaucagcaucuuccugcaccucgugaagaucccgacccaccggcacaucgucgggaagcccugccccaagccccaccgccugaaccacaugggcaucugcuccugcgggcuguacaagcagccgggcgugcccgugaaguggaagcggugaggacuagucccuguucccagagcccacuuuuuuuucuuuuuuugaaauaaaauagccugucuuucagaucucaaaggcucuuuucagagccaccaaaaaaaaaaaaaaaaaaaaaaaaaaaaaaaaaaaaaaaaaaaaaaaaaaaaaaaaaaaaaaaaaaaaaaaaaaaaaaaaaaaaaaaaaaaaaaaaaaaaa

SEQ ID NO: 35173 - RNA, 1748 nt, Artificial Sequence
  mRNA product Design a-1 (hSL-A100) comprising derived and/or modified sequence from LASV(Josiah;Clade IV)__NP_694870__GPCmut9 (opt4)
aggagagucccgcagucggcguccagcggcucugcuuguucgugugugugucguugcaggccuuauucaagcuuaccaugggccagaucgugaccuucuuccaggaggugccccacgugaucgaggaggugaugaacaucgugcugaucgcccugagcgugcuggccgugcugaagggccuguacaacuucgccaccugcggccuggugggccuggugaccuuccugcugcugugcggcagaagcugcaccaccagccuguacaagggcguguacgagcugcagacccuggagcugaacauggagacccugaacaugaccaugccccugagcugcaccaagaacaacagccaccacuacaucauggugggcaacgagaccggccuggagcugacccugaccaacaccagcaucaucaaccacaaguucugcaaccugagcgacgcccacaagaagaaccuguacgaccacgcccugaugagcaucaucagcaccuuccaccugagcauccccaacuucaaccaguacgaggccaugagcugcgacuucaacggcggcaagaucagcgugcaguacaaccugagccacagcuacgccggcgacgccgccaaccacugcggcaccguggccaacggcgugcugcagaccuucaugagaauggccuggggcggcagcuacaucgcccuggacagcggcugcggcaacugggacugcaucaugaccagcuaccaguaccugaucauccagaacaccaccugggaggaccacugccaguucagcagacccagccccaucggcuaccugggccugcugagccagagaaccagagacaucuacaucagcagaagacugcugggcaccuucaccuggacccugagcgacagcgagggcaaggacacccccggcggcuacugccugaccagauggaugcugaucgaggccgagcugaagugcuucggcaacaccgccguggccaagugcaacgagaagcacgacgaggaguucugcgacaugcugagacuguucgacuucaacaagcaggccauccagagacugaaggccgaggcccagaugagcauccagcugaucaacaaggccgugaacgcccugaucaacgaccagcugaucaugaagaaccaccugagagacaucaugugcauccccuacugcaacuacagcaaguacugguaccugaaccacaccaccaccggcagaaccagccugcccaagugcuggcuggugagcaacggcagcuaccugaacgagacccacuucagcgacgacaucgagcagcaggccgacaacaugaucaccgagaugcugcagaaggaguacauggagagacagggcaagaccccccugggccugguggaccuguucguguucagcaccagcuucuaccugaucagcaucuuccugcaccuggugaagauccccacccacagacacaucgugggcaagagcugccccaagccccacagacugaaccacaugggcaucugcagcugcggccuguacaagcagcccggcgugcccgugaaguggaagagaugaggacuagucccuguucccagagcccacuuuuuuuucuuuuuuugaaauaaaauagccugucuuucagaucucaaaggcucuuuucagagccaccaaaaaaaaaaaaaaaaaaaaaaaaaaaaaaaaaaaaaaaaaaaaaaaaaaaaaaaaaaaaaaaaaaaaaaaaaaaaaaaaaaaaaaaaaaaaaaaaaaaaa

SEQ ID NO: 35174 - RNA, 1745 nt, Artificial Sequence
  mRNA product Design a-1 (hSL-A100) comprising derived and/or modified sequence from LASV(LP;Clade I)__AAF86701__GPCmut9 (opt4)
aggagagucccgcagucggcguccagcggcucugcuuguucgugugugugucguugcaggccuuauucaagcuuaccaugggccagaucaucaccuucuuccaggaggugccccacgugaucgaggaggugaugaacaucgugcugaucgcccugagccugcuggccauccugaagggccuguacaacaucgccaccugcggcaucaucggccugguggccuuccuguuccugugcggcaagagcugcagccugacccugaagggcggcuacgagcugcagacccuggagcugaacauggagacccugaacaugaccaugccccugagcugcaccaagaacagcagccaccacuacaucagagugggcaacgagaccggccuggagcugacccugaccaacaccagcaucaucaaccacaaguucugcaaccugagcgacgcccacaagaagaaccuguacgaccacgcccugaugagcaucaucagcaccuuccaccugagcauccccaacuucaaccaguacgaggccaugagcugcgacuucaacggcggcaagaucagcgugcaguacaaccugagccacagcuacgccggcgacgccgccgagcacugcggcaccguggccaacggcgugcugcagaccuucaugagaauggccuggggcggcagauacaucgcccuggacagcggcugcggcaacugggacugcaucaugaccagcuaccaguaccugaucauccagaacaccaccugggaggaccacugccaguucagcagacccagccccaucggcuaccugggccugcugagccagagaaccagagacaucuacaucagcagaagacugcugggcaccuucaccuggacccugagcgacagcgagggcaacgagacccccggcggcuacugccugaccagauggaugcugaucgaggccgagcugaagugcuucggcaacaccgccguggccaagugcaacgagaagcacgacgaggaguucugcgacaugcugagacuguucgacuucaacaagcaggccaucagaagacugaaggccgaggcccagaugagcauccagcugaucaacaaggccgugaacgcccugaucaacgaccagcugaucaugaagaaccaccugagagacaucaugugcauccccuacugcaacuacagcaaguacugguaccugaaccacaccagcagcggcagaaccagccugcccaagugcuggcugaucagcaacggcagcuaccugaacgagacccaguucagcgacgacaucgagcagcaggccgacaacaugaucaccgagaugcugcagaaggaguacaucgagagacagggcaagaccccccugggccugguggacaucuucaucuucagcaccagcuucuaccugaucagcaucuuccugcaccugaucaagauccccacccacagacacaucgugggcaagcccugccccaagccccacagacugaaccacaugggcgugugcagcugcggccuguacaagcaccccggcgugcccaccaaguggaagagaugaggacuagucccuguucccagagcccacuuuuuuuucuuuuuuugaaauaaaauagccugucuuucagaucucaaaggcucuuuucagagccaccaaaaaaaaaaaaaaaaaaaaaaaaaaaaaaaaaaaaaaaaaaaaaaaaaaaaaaaaaaaaaaaaaaaaaaaaaaaaaaaaaaaaaaaaaaaaaaaaaaaaa

SEQ ID NO: 35175 - RNA, 1745 nt, Artificial Sequence
  mRNA product Design a-1 (hSL-A100) comprising derived and/or modified sequence from LASV(803213;Clade II)__AAF86703__GPCmut9 (opt4)
aggagagucccgcagucggcguccagcggcucugcuuguucgugugugugucguugcaggccuuauucaagcuuaccaugggccagaucaucaccuucuuccaggaggugccccacgugaucgaggaggugaugaacaucgugcugaucgcccugagccugcuggccauccugaagggcaucuacaacguggccaccugcggccuguucggccugaucagcuuccugcugcugugcggcagaagcugcagcgugaccuacaagggcguguacgagcugcagacccuggagcugaacauggccaaccugaacaugaccaugccccugagcugcaccaagaacaacagccaccacuacaucauggugggcaacgagaccggccuggagcugacccugaccaacaccagcaucaucaaccacaaguucugcaaccugagcgacgcccacaagaagaaccuguacgaccacgcccugaugagcaucaucagcaccuuccaccugagcauccccaacuucaaccaguacgaggccaugagcugcgacuucaacggcggcaagaucagcgugcaguacaaccugagccacagcuucgccguggacgccgccaaccacugcggcaccaucgccaacggcgugcugcagaccuucaugagaauggccuggggcggcagcuacaucgcccuggacagcggcugcggcaacugggacugcaucaugaccagcuaccaguaccugaucauccagaacaccaccugggaggaccacugccaguucagcagacccagccccaucggcuaccugggccugcugagccagagaaccagagacaucuacaucagcagaagacugcugggcaccuucaccuggacccugagcgacagcgagggcaacgaggcccccggcggcuacugccugaccagauggaugcugaucgaggccgagcugaagugcuucggcaacaccgccguggccaagugcaacgagaagcacgacgaggaguucugcgacaugcugagacuguucgacuucaacaagcaggccaucaagagacugaagaccgaggcccagaugagcauccagcugaucaacaaggccgugaacgcccugaucaacgaccagcugaucaugaagaaccaccugagagacaucaugugcauccccuacugcaacuacagcagauacugguaccugaaccacaccgugaccggcaagaccagccugcccagaugcuggcuggugagcaacggcagcuaccugaacgagacccacuucagcgacgacaucgagcagcaggccgacaacaugaucaccgagaugcugcagaaggaguacauggacagacagggcaagaccccccugggccugguggaccuguucguguucagcaccagcuucuaccugaucagcaucuuccugcaccuggugaagauccccacccacagacacaucgugggcaagcccugccccaagccccacagacugaaccacaugggcaucugcagcugcggccuguacaagcaccccggcgugcccgugaaguggaagagaugaggacuagucccuguucccagagcccacuuuuuuuucuuuuuuugaaauaaaauagccugucuuucagaucucaaaggcucuuuucagagccaccaaaaaaaaaaaaaaaaaaaaaaaaaaaaaaaaaaaaaaaaaaaaaaaaaaaaaaaaaaaaaaaaaaaaaaaaaaaaaaaaaaaaaaaaaaaaaaaaaaaaa

SEQ ID NO: 35176 - RNA, 1745 nt, Artificial Sequence
  mRNA product Design a-1 (hSL-A100) comprising derived and/or modified sequence from LASV(GA391;Clade III)__CAA36645__GPCmut9 (opt4)
aggagagucccgcagucggcguccagcggcucugcuuguucgugugugugucguugcaggccuuauucaagcuuaccaugggccagaucgugaccuucuuccaggaggugccccacgugaucgaggaggugaugaacaucgugcugaucgcccugagcauccuggccauccugaagggccuguacaacguggccaccugcggccugaucggccuggugaccuuccugcugcugagcggcagaagcugcagccugaucuacaagggcaccuacgagcugcagacccuggagcugaacauggagacccugaacaugaccaugccccugagcugcaccaagaacaacagccaccacuacaucagagugggcaacgagaccggccuggagcugacccugaccaacaccagcauccugaaccacaaguucugcaaccugagcgacgcccacaagagaaaccuguacgaccacagccugaugagcaucaucagcaccuuccaccugagcauccccaacuucaaccaguacgaggccaugagcugcgacuucaacggcggcaagaucaccgugcaguacaaccugagccacagcuucgccguggacgccgccggccacugcggcacccuggccaacggcgugcugcagaccuucaugagaauggccuggggcggcagcuacaucgcccuggacagcggcugcggcaacugggacugcaucaugaccagcuaccaguaccugaucauccagaacaccaccugggacgaccacugccaguucagcagacccagccccaucggcuaccugggccugcugagccagagaaccagagacaucuacaucagcagaagacugcugggcaccuucaccuggacccugagcgacagcgagggcaacgagacccccggcggcuacugccugaccagauggaugcugaucgaggccgagcugaagugcuucggcaacaccgccguggccaagugcaacgagaagcacgacgaggaguucugcgacaugcugagacuguucgacuucaacaagcaggccaucagaagacugaagaccgaggcccagaugagcauccagcugaucaacaaggccgugaacgcccugaucaacgaccagcugaucaugaagaaccaccugagagacaucaugugcauccccuacugcaacuacagcagauacugguaccugaaccacaccagcaccggcaagaccagccugcccagaugcuggcugaucagcaacggcagcuaccugaacgagaccaaguucagcgacgacaucgagcagcaggccgacaacaugaucaccgagaugcugcagaaggaguacaucgacagacagggcaagaccccccugggccugguggaccuguucguguucagcaccagcuucuaccugaucagcaucuuccugcaccuggugaagauccccacccacagacacaucgugggcaagcccugccccaagccccacagacugaaccacaugggcaucugcagcugcggccuguacaagcagcccggcgugcccgugagauggaagagaugaggacuagucccuguucccagagcccacuuuuuuuucuuuuuuugaaauaaaauagccugucuuucagaucucaaaggcucuuuucagagccaccaaaaaaaaaaaaaaaaaaaaaaaaaaaaaaaaaaaaaaaaaaaaaaaaaaaaaaaaaaaaaaaaaaaaaaaaaaaaaaaaaaaaaaaaaaaaaaaaaaaaa

SEQ ID NO: 35177 - RNA, 1748 nt, Artificial Sequence
  mRNA product Design a-1 (hSL-A100) comprising derived and/or modified sequence from LASV(AV;Clade V)__CCA30314__GPCmut9 (opt4)
aggagagucccgcagucggcguccagcggcucugcuuguucgugugugugucguugcaggccuuauucaagcuuaccaugggccagaucgugaccuucuuccaggaggugccccacgugaucgaggaggugaugaacaucgugcugaucgcccugagcauccuggccgugcugaagggccuguacaacaucgccaccugcggccugaucggccugaucaccuuccugcugcugugcggcagaagcugcagcagcaaccuguacaagggcguguacgagcugcagagccuggaccugaacauggagacccugaacaugaccaugccccugagcugcaccaagaacaacagccaccacuacaucagagugggcaacgacaccggccuggagcugacccugaccaacaccagcauccugaaccacaaguucugcaaccugagcgacgcccacaagaaggaccuguacgaccacgcccugaugagcaucaucagcaccuuccaccugagcauccccaacuucaaccaguacgaggccaugagcugcgacuucaacggcggcaagaucagcgugcaguacaaccugagccacagcuacgccaucgacgccgccaaccacugcggcaccguggccaacggcauccugcagaccuucaugagaauggccuggggcggcagcuacaucgcccuggacagcggcugcggcaacugggacugcaucaugaccagcuaccaguaccugaucauccagaacaccaccugggagaaccacugccaguucagcagacccagccccaucggcuaccugggccugcugagccagagaaccagagacaucuacaucagcagaagacugcugggcaccuucaccuggacccugagcgacagcgagggcaacgccacccccggcggcuacugccugaccagauggaugcugaucgaggccgagcugaagugcuucggcaacaccgccguggccaagugcaacgagaagcacgacgaggaguucugcgacaugcugagacuguucgacuucaacaagcaggccaucagcagacugaagagcgaggcccagaugagcauccagcugaucaacaaggccgugaacgcccugaucaacgaccagcugaucaugaagaaccaccugagagacaucaugugcauccccuacugcaacuacagcaaguacugguaccugaaccacaccaucaccggcaagaccagccugcccaagugcuggcuggugagcaacggcagcuaccugaacgagacccacuucagcgacgacaucgagcagcaggccgacaacaugaucaccgagaugcugcagaaggaguacauggagagacagggcaagaccccccugggccugguggaccuguucguguucagcaccagcuucuaccugaucagcaucuuccugagacuggugaagauccccacccacagacacaucgugggcaagcccugccccaagccccacagacugaaccacaugggcaucugcagcugcggccuguacaagcagcccggcgugcccgugagauggaagagaugaggacuagucccuguucccagagcccacuuuuuuuucuuuuuuugaaauaaaauagccugucuuucagaucucaaaggcucuuuucagagccaccaaaaaaaaaaaaaaaaaaaaaaaaaaaaaaaaaaaaaaaaaaaaaaaaaaaaaaaaaaaaaaaaaaaaaaaaaaaaaaaaaaaaaaaaaaaaaaaaaaaaa

SEQ ID NO: 35178 - RNA, 1745 nt, Artificial Sequence
  mRNA product Design a-1 (hSL-A100) comprising derived and/or modified sequence from LASV(Togo/2016/7082;Clade VI)__AMR44577__GPCmut9 (opt4)
aggagagucccgcagucggcguccagcggcucugcuuguucgugugugugucguugcaggccuuauucaagcuuaccaugggccagaucaucaccuucuuccaggaggugccccacgugaucgaggaggugaugaacaucgugcugaucgcccugagccugcuggccauccugaagggcguguacaacguggccaccugcggcaucaucggccuggugaccuuccuguuccugugcggcagaagcugcagccugaucuacaagggcagcuacgagcugcagacccuggagcugaacauggagacccugaacaugaccaugccccugagcugcaccaagaacagcagccaccacuacaucagagugggcaacgagaccggccuggagcugacccugaccaacaccagcaucaucaaccacaaguucugcaaccugagcgacgcccacaagagaaaccuguacgaccacgcccugaugagcauccugagcaccuuccaccugagcauccccaacuucaaccaguacgaggccaugagcugcgacuucaacggcggcaagaucagcgugcaguacaaccugagccacgccuacgccguggacgccgccgagcacugcggcaccguggccaacggcgugcugcagaccuucaugagaauggccuggggcggcagcuacaucgcccuggacagcggcugcggcaacugggacugcaucaugaccagcuaccaguaccugaucauccagaacaccaccugggaggaccacugccaguucagcagacccagccccaucggcuaccugggccugcugagccagagaaccagagacaucuacaucagcagaagacugcugggcaccuucaccuggacccugagcgacagcgagggcaacgagacccccggcggcuacugccugaccagauggaugcugaucgaggccgagcugaagugcuucggcaacaccgccguggccaagugcaacgagaagcacgacgaggaguucugcgacaugcugagacuguucgacuucaacaagcaggccauccagagacugaagagcgaggcccagaugagcauccagcugaucaacaaggccgugaacgcccugaucaacgaccagcugaucaugaagaaccaccugagagacaugaugugcauccccuacugcaacuacagcaaguacugguaccugaaccacaccagcagcggcagaaccagccugcccaagugcuggcuggugagcaacggcagcuaccugaacgagacccacuucagcgacgacaucgagcagcaggccgacaacaugaucaccgagaugcugcagaaggaguacaucgacagacagggcaagaccccccugggccugguggaccuguucguguucagcaccagcuucuaccugaucagcaucuuccugcaccugaucaagauccccacccacagacacaucgugggcaagcccugccccaagccccacagacugaaccacaugggcaucugcagcugcggccuguacaagcagcccggcgugcccaccagauggaagagaugaggacuagucccuguucccagagcccacuuuuuuuucuuuuuuugaaauaaaauagccugucuuucagaucucaaaggcucuuuucagagccaccaaaaaaaaaaaaaaaaaaaaaaaaaaaaaaaaaaaaaaaaaaaaaaaaaaaaaaaaaaaaaaaaaaaaaaaaaaaaaaaaaaaaaaaaaaaaaaaaaaaaa

SEQ ID NO: 35179 - RNA, 1745 nt, Artificial Sequence
  mRNA product Design a-1 (hSL-A100) comprising derived and/or modified sequence from LASV(KAK-428;Clade n.d. (VII))__ANH09740__GPCmut9 (opt4)
aggagagucccgcagucggcguccagcggcucugcuuguucgugugugugucguugcaggccuuauucaagcuuaccaugggccagaucgugaccuucuuccaggaggugccccacgugaucgaggaggugaugaacaucgugcugaucgcccugagccugcuggccauccugaagggccuguacaacuucgccaccugcggcgugaucggccugaucaccuuccugcugcugugcggcagaagcugcagcgccaccuacaagggccaguacgagcugcagacccuggagcugaacauggagagccugaacaugaccaugccccugagcugcaccaagaacaacagccaccacuacaucagagccggcaacaacaccggccuggagcugacccugaccaacaccagcaucaucagccacaaguucugcaaccugagcgacgcccacaagaagaaccuguacgaccacacccugaugagcaucaucaccaccuuccaccugagcauccccaacuucaaccaguacgaggccaugagcugcgacuucaacggcggcaagaucagcauccaguacaaccugagccacagcuacgccggcgacgccgcccagcacugcggcaccguggccaacggcgugcugcagaccuucaugagaauggccuggggcggcagcuaccuggcccuggacagcggcugcagaggcugggacugcaucaucagcagcuaccaguaccugaucauccagaacaccaccugggacgaccacugccaguucagcagacccagccccaucggcuaccugggcuucgugagccagaagaccagagacaucuacaucagcagaagacugcugggcaccuucaccuggacccugagcgacagcgagggccacgacaugcccggcggcuacugccugaccagauggaugcugaucgaggccgaccugaagugcuucggcaacaccgccguggccaagugcaacgagaagcacgacgaggaguucugcgacauguggagacuguucgacuucaacaagcaggccauccagagacugaaggccgaggcccagaugaacauccagcugaucaacaaggccgugaacgcccugaucaacgaccagcugaugaugaagaaccaccugagagacaucaugugcauccccuacugcaacuacagcaaguucugguaccugaacaacaccaccaccggcagaaccagccugcccagaugcuggcugaucagcaacggcagcuaccugaacgagacccacuucagcgacgacaucgagcagcaggccgacaacaugaucaccgagaugcugcagaaggaguacauggacagacagggcaagaccccccugggccugguggaccuguucguguucagcaccagcuucuaccugaucaccaucuuccugcaccuggugaagauccccacccacagacacaucgugggcaagcccugccccaagccccacagacugaaccacaugggcaucugcagcugcggccuguacaagcagcccggcgugcccgugagauggaagagaugaggacuagucccuguucccagagcccacuuuuuuuucuuuuuuugaaauaaaauagccugucuuucagaucucaaaggcucuuuucagagccaccaaaaaaaaaaaaaaaaaaaaaaaaaaaaaaaaaaaaaaaaaaaaaaaaaaaaaaaaaaaaaaaaaaaaaaaaaaaaaaaaaaaaaaaaaaaaaaaaaaaaa

SEQ ID NO: 35180 - RNA, 1745 nt, Artificial Sequence; identical to SEQ ID NO: 35174
  mRNA product Design a-1 (hSL-A100) comprising derived and/or modified sequence from LASV(Pinneo-NIG-1969;Clade I)__AIT17836__GPCmut9 (opt4)

SEQ ID NO: 35181 - RNA, 1745 nt, Artificial Sequence
  mRNA product Design a-1 (hSL-A100) comprising derived and/or modified sequence from LASV(ISTH0009-NIG-2011;Clade II)__AIT17404__GPCmut9 (opt4)
aggagagucccgcagucggcguccagcggcucugcuuguucgugugugugucguugcaggccuuauucaagcuuaccaugggccagaucaucaccuucuuccaggaggugccccacgugaucgaggaggugaugaacaucgugcugaucgcccugagccugcuggccauccugaagggcaucuacaacguggccaccugcggccuguucggccuggugagcuuccugcugcugugcggcagaagcugcagcaccaccuacaagggcguguacgagcugcagacccuggagcuggacauggccagccugaacaugaccaugccccugagcugcaccaagaacaacagccaccacuacaucauggugggcaacgagaccggccuggagcugacccugaccaacaccagcaucaucaaccacaaguucugcaaccugagcgacgcccacaagaagaaccuguacgaccacgcccugaugagcaucaucagcaccuuccaccugagcauccccaacuucaaccaguacgaggccaugagcugcgacuucaacggcggcaagaucagcgugcaguacaaccugagccacgccuacgccguggacgccgccaaccacugcggcaccaucgccaacggcgugcugcagaccuucaugagaauggccuggggcggcagcuacaucgcccuggacagcggcugcggcagcugggacugcaucaugaccagcuaccaguaccugaucauccagaacaccaccugggaggaccacugccaguucagcagacccagccccaucggcuaccugggccugcugagccagagaaccagagacaucuacaucagcagaagacugcugggcaccuucaccuggacccugagcgacagcgagggcaacgagacccccggcggcuacugccugaccagauggaugcugaucgaggccgagcugaagugcuucggcaacaccgccguggccaagugcaacgagaagcacgacgaggaguucugcgacaugcugagacuguucgacuucaacaagcaggccaucagaagacugaagaccgaggcccagaugagcauccagcugaucaacaaggccgugaacgcccugaucaacgaccagcugaucaugaagaaccaccugagagacaucaugugcauccccuacugcaacuacagcaaguacugguaccugaaccacaccgugaccggcaagaccagccugcccagaugcuggcuggugagcaacggcagcuaccugaacgagacccacuucagcgacgacaucgagcagcaggccgacaacaugaucaccgagcugcugcagaaggaguacauggacagacagggcaagaccccccugggccugguggaccuguucguguucagcaccagcuucuaccugaucagcaucuuccugcaccugaucaagauccccacccacagacacaucaccggcaagcccugccccaagccccacagacugaaccacaugggcaucugcagcugcggccuguacaagcaccccggcgugcccgugaaguggaagagaugaggacuagucccuguucccagagcccacuuuuuuuucuuuuuuugaaauaaaauagccugucuuucagaucucaaaggcucuuuucagagccaccaaaaaaaaaaaaaaaaaaaaaaaaaaaaaaaaaaaaaaaaaaaaaaaaaaaaaaaaaaaaaaaaaaaaaaaaaaaaaaaaaaaaaaaaaaaaaaaaaaaaa

SEQ ID NO: 35182 - RNA, 1745 nt, Artificial Sequence
  mRNA product Design a-1 (hSL-A100) comprising derived and/or modified sequence from LASV(ISTH2010-NIG-2012;Clade II)__AIT17482__GPCmut9 (opt4)
aggagagucccgcagucggcguccagcggcucugcuuguucgugugugugucguugcaggccuuauucaagcuuaccaugggccagaucaucaccuucuuccaggaggugccccacgugaucgaggaggugaugaacaucgugcugaucgcccugagccugcuggccauccugaagggcaucuacaacguggccaccugcggccuguucggccuggugagcuuccugcugcugugcggcagaagcugcagcaccaccuacaagggcguguacgagcugcagacccuggagcuggacauggccagccugaacaugaccaugccccugagcugcaccaagaacaacagccaccacuacaucauggugggcaacgagaccggccuggagcugacccugaccaacaccagcaucaucaaccacaaguucugcaaccugagcgacgcccacaagaagaaccuguacgaccacgcccugaugagcaucaucagcaccuuccaccugagcauccccaacuucaaccaguacgaggccaugagcugcgacuucaacggcggcaagaucagcgugcaguacaaccugagccacgccuacgccguggacgccgccaaccacugcggcaccaucgccaacggcgugcugcagaccuucaugagaauggccuggggcggcagcuacaucgcccuggacagcggcugcggcagcugggacugcaucaugaccagcuaccaguaccugaucauccagaacaucaccugggaggaccacugccaguucagcagacccagccccaucggcuaccugggccugcugagccagagaaccagagacaucuacaucagcagaagacugcugggcaccuucaccuggacccugagcgacagcgagggcaacgagacccccggcggcuacugccugaccagauggaugcugaucgaggccgagcugaagugcuucggcaacaccgccguggccaagugcaacgagaagcacgacgaggaguucugcgacaugcugagacuguucgacuucaacaagcaggccaucagaagacugaagaccgaggcccagaugagcauccagcugaucaacaaggccgugaacgcccugaucaacgaccagcugaucaugaagaaccaccugagagacaucaugugcauccccuacugcaacuacagcaaguacugguaccugaaccacaccgugaccggcaagaccagccugcccagaugcuggcuggugagcaacggcagcuaccugaacgagacccacuucagcgacgacaucgagcagcaggccgacaacaugaucaccgagcugcugcagaaggaguacaucgacagacagggcaagaccccccugggccugguggaccuguucguguucagcaccagcuucuaccugaucagcaucuuccugcaccuggugaagauccccacccacagacacguggugggcaagcccugccccaagccccacagacugaaccacaugggcaucugcagcugcggccuguacaagcaccccggcgugcccgugaaguggaagagaugaggacuagucccuguucccagagcccacuuuuuuuucuuuuuuugaaauaaaauagccugucuuucagaucucaaaggcucuuuucagagccaccaaaaaaaaaaaaaaaaaaaaaaaaaaaaaaaaaaaaaaaaaaaaaaaaaaaaaaaaaaaaaaaaaaaaaaaaaaaaaaaaaaaaaaaaaaaaaaaaaaaaa

SEQ ID NO: 35183 - RNA, 1745 nt, Artificial Sequence
  mRNA product Design a-1 (hSL-A100) comprising derived and/or modified sequence from LASV(Lassa virus/H.sapiens-wt/NGA/2015/ISTH_0543;Clade II)__AVO03639__GPCmut9 (opt4)
aggagagucccgcagucggcguccagcggcucugcuuguucgugugugugucguugcaggccuuauucaagcuuaccaugggccagaucaucaccuucuuccaggaggugccccacgugaucgaggaggugaugaacaucgugcugaucgcccugagccugcuggccauccugaagggcaucuacaacguggccaccugcggccuguucggccuggugagcuuccugcugcugugcggcagaagcugcagcaccaccuacaagggcguguacgagcugcagacccuggagcuggacauggccaaccugaacaugaccaugccccugagcugcaccaagaacaacagccaccacuacaucauggugggcaacgagaccggccuggagcugacccugaccaacaccagcaucaucaaccacaaguucugcaaccugagcgacgcccacaagaagaaccuguacgaccacgcccugaugagcaucaucagcaccuuccaccugagcauccccaacuucaaccaguacgaggccaugagcugcgacuucaacggcggcaagaucagcgugcaguacaaccugagccacaccuacgccguggacgccgccaaccacugcggcaccaucgccaacggcgugcugcagaccuucaugagaauggccuggggcggcagcuacaucgcccuggacagcggcugcggcagcugggacugcaucaugaccagcuaccaguaccuggugauccagaacaccaccugggaggaccacugccaguucagcagacccagccccaucggcuaccugggccugcugagccagagaaccagagacaucuacaucagcagaagacugcugggcaccuucaccuggacccugagcgacagcgagggcaacgagacccccggcggcuacugccugaccagauggaugcugaucgaggccgagcugaagugcuucggcaacaccgccguggccaagugcaacgagaagcacgacgaggaguucugcgacaugcugagacuguucgacuucaacaagcaggccaucagaagacugaagaccgaggcccagaugagcauccagcugaucaacaaggccgugaacgcccugaucaacgaccagcugaucaugaagaaccaccugagagacaucaugugcauccccuacugcaacuacagcaaguacugguaccugaaccacaccgugaccggcaagaccagccugcccagaugcuggcuggugagcaacggcagcuaccugaacgagacccacuucagcgacgacaucgagcagcaggccgacaacaugaucaccgagcugcugcagaaggaguacaucgacagacagggcaagaccccccugggccugguggaccuguucguguucagcaccagcuucuaccugaucagcaucuuccugcaccuggugaagauccccacccacagacacaucaccggcaagcccugccccaagccccacagacugaaccacaugggcaucugcagcugcggccuguacaagcaccccggcgugcccgugaaguggaagagaugaggacuagucccuguucccagagcccacuuuuuuuucuuuuuuugaaauaaaauagccugucuuucagaucucaaaggcucuuuucagagccaccaaaaaaaaaaaaaaaaaaaaaaaaaaaaaaaaaaaaaaaaaaaaaaaaaaaaaaaaaaaaaaaaaaaaaaaaaaaaaaaaaaaaaaaaaaaaaaaaaaaaa

SEQ ID NO: 35184 - RNA, 1745 nt, Artificial Sequence
  mRNA product Design a-1 (hSL-A100) comprising derived and/or modified sequence from LASV(Lassa virus/H.sapiens-wt/NGA/2016/ISTH_0009;Clade II)__AVO03571__GPCmut9 (opt4)
aggagagucccgcagucggcguccagcggcucugcuuguucgugugugugucguugcaggccuuauucaagcuuaccaugggccagaucaucaccuucuuccaggaggugccccacgugaucgaggaggugaugaacaucgugcugaucgcccugagccugcuggccauccugaagggcaucuacaacguggccaccugcggccugcugggccuggugagcuuccugcugcugugcggcagaagcugcagcaccaccuacaagggcguguacgagcugcagacccuggagcuggacauggccagccugaacaugaccaugccccugagcugcaccaagaacaacagccaccacuacaucauggugggcaacgagaccggccuggagcugacccugaccaacaccagcaucaucaaccacaaguucugcaaccugagcgacgcccacaagaagaaccuguacgaccacgcccugaugagcaucaucagcaccuuccaccugagcauccccaacuucaaccaguacgaggccaugagcugcgacuucaacggcggcagaaucagcgugcaguacaaccugagccacagcuacgccguggacgccgccaaccacugcggcaccaucgccaacggcgugcugcagaccuucaugagaauggccuggggcggcagcuacaucgcccuggacagcggcugcggcagcugggacugcaucaugaccagcuaccaguaccugaucauccagaacaccaccugggaggaccacugccaguucagcagacccagccccaucggcuaccugggccugcugagccagagaaccagagacaucuacaucagcagaagacugcugggcaccuucaccuggacccugagcgacagcgagggcaacgagacccccggcggcuacugccugaccagauggaugcugaucgaggccgagcugaagugcuucggcaacaccgccguggccaagugcaacgagaagcacgacgaggaguucugcgacaugcugagacuguucgacuucaacaagcaggccaucagaagacugaagaccgaggcccagaugagcauccagcugaucaacaaggccgugaacgcccugaucaacgaccagcugaucaugaagaaccaccugagagacaucaugugcauccccuacugcaacuacagcaaguacugguaccugaaccacaccgugaccggcaagaccagccugcccagaugcuggcuggugagcaacggcagcuaccugaacgagacccacuucagcgacgacaucgagcagcaggccgacaacaugaucaccgagcugcugcagaaggaguacaucgacagacagggcaagaccccccugggccugguggaccuguucguguucagcaccagcuucuaccugaucagcaucuuccugcaccuggugaagauccccacccacagacacaucaccggcaagcccugccccaagccccacagacugaaccacaugggcaucugcagcugcggccuguacaaccaccccggcgugcccgugaaguggaagagaugaggacuagucccuguucccagagcccacuuuuuuuucuuuuuuugaaauaaaauagccugucuuucagaucucaaaggcucuuuucagagccaccaaaaaaaaaaaaaaaaaaaaaaaaaaaaaaaaaaaaaaaaaaaaaaaaaaaaaaaaaaaaaaaaaaaaaaaaaaaaaaaaaaaaaaaaaaaaaaaaaaaaa

SEQ ID NO: 35185 - RNA, 1745 nt, Artificial Sequence
  mRNA product Design a-1 (hSL-A100) comprising derived and/or modified sequence from LASV(Lassa virus/H.sapiens-wt/NGA/2016/ISTH_0017;Clade II)__AVO03567__GPCmut9 (opt4)
aggagagucccgcagucggcguccagcggcucugcuuguucgugugugugucguugcaggccuuauucaagcuuaccaugggccagaucaucaccuucuuccaggaggugccccacgugaucgaggaggugaugaacaucgugcugaucgcccugagccugcuggccauccugaagggcaucuacaacguggccaccugcggccuguucggccuggugagcuuccugcugcugugcggcagaagcugcagcaccaccuacaagggcguguacgagcugcagacccuggagcuggacauggccagccugaacaugaccaugccccugagcugcaccaagaacaacagccaccacuacaucauggugggcaacgagaccggccuggagcugacccugaccaacaccagcaucaucaaccacaaguucugcaaccugagcgacgcccacaagaagaaccuguacgaccacgcccugaugagcaucaucagcaccuuccaccugagcauccccaacuucaaccaguacgaggccaugagcugcgacuucaacggcggcaagaucagcgugcaguacaaccugagccacaccuacgccaucgacgccgccaaccacugcggcaccaucgccaacggcgugcugcagaccuucaugagaauggccuggggcggcagcuacaucgcccuggacagcggcugcggcagcugggacugcaucaugaccagcuaccaguaccugaucauccagaacaccaccugggaggaccacugccaguucagcagacccagccccaucggcuaccugggccugcugagccagagaaccagagacaucuacaucagcagaagacugcugggcaccuucaccuggacccugagcgacagcgagggcaacgagacccccggcggcuacugccugaccagauggaugcugaucgaggccgagcugaagugcuucggcaacaccgccguggccaagugcaacgagaagcacgacgaggaguucugcgacaugcugagacuguucgacuucaacaagcaggccaucagaagacugaagaccgaggcccagaugagcauccagcugaucaacaaggccgugaacgcccugaucaacgaccagcugaucaugaagaaccaccugagagacaucaugugcauccccuacugcaacuacagcaaguacugguaccugaaccacaccgugaccggcaagaccagccugcccagaugcuggcuggugagcaacggcagcuaccugaacgagacccacuucagcgacgacaucgagcagcaggccgacaacaugaucaccgagcugcugcagaaggaguacauggacagacagggcaagaccccccugggccugguggaccuguucguguucagcaccagcuucuaccugaucagcaucuuccugcaccuggugagaauccccacccacagacacgugaucggcaagcccugccccaagccccacagacugaaccacaugggcaucugcagcugcggccuguacaagcaccccggcgugcccgugaaguggaagagaugaggacuagucccuguucccagagcccacuuuuuuuucuuuuuuugaaauaaaauagccugucuuucagaucucaaaggcucuuuucagagccaccaaaaaaaaaaaaaaaaaaaaaaaaaaaaaaaaaaaaaaaaaaaaaaaaaaaaaaaaaaaaaaaaaaaaaaaaaaaaaaaaaaaaaaaaaaaaaaaaaaaaa

SEQ ID NO: 35186 - RNA, 1745 nt, Artificial Sequence
  mRNA product Design a-1 (hSL-A100) comprising derived and/or modified sequence from LASV(Lassa virus/H.sapiens-wt/NGA/2018/ISTH_0959;Clade II)__AVV65099__GPCmut9 (opt4)
aggagagucccgcagucggcguccagcggcucugcuuguucgugugugugucguugcaggccuuauucaagcuuaccaugggccagaucaucaccuucuuccaggaggugccccacgugaucgaggaggugaugaacaucgugcugaucgcccugagccugcuggccauccugaagggcaucuacaacguggugaccugcggccuguucggccuggugagcuuccugcugcugugcggcagaagcugcagcaccaccuacaagggcguguacgagcugcagacccuggagcuggacauggccagccugaacaugaccaugccccugagcugcaccaagaacaacagccaccacuacaucauggugggcaacgagaccggccuggagcugacccugaccaacaccagcaucaucaaccacaaguucugcaaccugagcgacgcccacaagaagaaccuguacgaccacgcccugaugagcaucaucagcaccuuccaccugagcauccccaacuucaaccaguacgaggccaugagcugcgacuucaacggcggcaagaucagcgugcaguacaaccugagccacgccuacgccaucgacgccgccaaccacugcggcaccaucgccaacggcgugcugcagaccuucaugagaauggccuggggcggcagcuacaucgcccuggacagcggcugcggcagcugggacugcaucaugaccagcuaccaguaccugaucauccagaacaccaccugggaggaccacugccaguucagcagacccagccccaucggcuaccugggccugcugagccagagaaccagagacaucuacaucagcagaagacugcugggcaccuucaccuggacccugagcgacagcgagggcaacgagacccccggcggcuacugccugaccagauggaugcugaucgaggccgagcugaagugcuucggcaacaccgccguggccaagugcaacgagaagcacgacgaggaguucugcgacaugcugagacuguucgacuucaacaagcaggccaucagaagacugaagaccgaggcccagaugagcauccagcugaucaacaaggccgugaacgcccugaucaacgaccagcugaucaugaagaaccaccugagagacaucaugugcauccccuacugcaacuacagcaaguacugguaccugaaccacaccgugaccggcaagaccagccugcccagaugcuggcuggugagcaacggcagcuaccugaacgagacccacuucagcgacgacaucgagcagcaggccgacaacaugaucaccgagcugcugcagaaggaguacaucgacagacagggcaagaccccccugggccugguggaccuguucguguucagcaccagcuucuaccugaucagcaucuuccugcaccuggugaagauccccacccacagacacgugaucggcaagcccugccccaagccccacagacugaaccacaugggcaucugcagcugcggccuguacaagcaccccggcgugcccgugaaguggaagagaugaggacuagucccuguucccagagcccacuuuuuuuucuuuuuuugaaauaaaauagccugucuuucagaucucaaaggcucuuuucagagccaccaaaaaaaaaaaaaaaaaaaaaaaaaaaaaaaaaaaaaaaaaaaaaaaaaaaaaaaaaaaaaaaaaaaaaaaaaaaaaaaaaaaaaaaaaaaaaaaaaaaaa

SEQ ID NO: 35187 - RNA, 1745 nt, Artificial Sequence
  mRNA product Design a-1 (hSL-A100) comprising derived and/or modified sequence from LASV(LASV003-NIG-2008;Clade II)__AIT17580__GPCmut9 (opt4)
aggagagucccgcagucggcguccagcggcucugcuuguucgugugugugucguugcaggccuuauucaagcuuaccaugggccagaucaucaccuucuuccaggaggugccccacgugaucgaggaggugaugaacaucgugcugaucgcccugagccugcuggccauccugaagggcaucuacaacguggccaccugcggccuguucggccuggugagcuuccugcugcugugcggcagaagcugcagcaccaccuacaagggcguguacgagcugcagacccuggagcuggacauggccagccugaacaugaccaugccccugagcugcaccaagaacaacagccaccacuacaucauggugggcaacgagaccggccuggagcugacccugaccaacaccagcaucaucaaccacaaguucugcaaccugagcgacgcccacaagaagaaccuguacgaccacgcccugaugagcaucaucagcaccuuccaccugagcauccccaacuucaaccaguacgaggccaugagcugcgacuucaacggcggcaagaucagcgugcaguacaaccugagccacaccuacgccguggacgccgccaaccacugcggcaccaucgccaacggcgugcugcagaccuucaugagaauggccuggggcggcagcuacaucgcccuggacagcggcugcggcagcugggacugcaucaugaccagcuaccaguaccugaucauccagaacaccaccugggaggaccacugccaguucagcagacccagccccaucggcuaccugggccugcugagccagagaaccagagacaucuacaucagcagaagacugcugggcaccuucaccuggacccugagcgacagcgagagcaacgagacccccggcggcuacugccugaccagauggaugcugaucgaggccgagcugaagugcuucggcaacaccgccguggccaagugcaacgagaagcacgacgaggaguucugcgacaugcugagacuguucgacuucaacaagcaggccaucagaagacugaaggccgaggcccagaugagcauccagcugaucaacaaggccgugaacgcccugaucaacgaccagcugaucaugaagaaccaccugagagacaucaugugcauccccuacugcaacuacagcaaguacugguaccugaaccacaccgugaccggcagaaccagccugcccagaugcuggcuggugagcaacggcagcuaccugaacgagacccacuucagcgacgacaucgagcagcaggccgacaacaugaucaccgagcugcugcagaaggaguacauggacagacagggcaagaccccccugggccugguggaccuguucguguucagcaccagcuucuaccugaucagcaucuuccugcaccuggugaagauccccacccacagacacgugaucggcaagcccugccccaagccccacagacugaaccacaugggcaucugcagcugcggccuguacaagcaccccggcgugcccgugaaguggaagagaugaggacuagucccuguucccagagcccacuuuuuuuucuuuuuuugaaauaaaauagccugucuuucagaucucaaaggcucuuuucagagccaccaaaaaaaaaaaaaaaaaaaaaaaaaaaaaaaaaaaaaaaaaaaaaaaaaaaaaaaaaaaaaaaaaaaaaaaaaaaaaaaaaaaaaaaaaaaaaaaaaaaaa

SEQ ID NO: 35188 - RNA, 1745 nt, Artificial Sequence
  mRNA product Design a-1 (hSL-A100) comprising derived and/or modified sequence from LASV(LASV035-NIG-2009;Clade II)__AIT17588__GPCmut9 (opt4)
aggagagucccgcagucggcguccagcggcucugcuuguucgugugugugucguugcaggccuuauucaagcuuaccaugggccagaucaucaccuucuuccaggaggugccccacgugaucgaggaggugaugaacaucgugcugaucgcccugagccugcuggccauccugaagggcaucuacaacguggccaccugcggccuguucggccuggugagcuuccugcugcugugcggcagaagcugcagcaccaccuacaagggcguguacgagcugcagacccuggagcuggacauggccagccugaacaugaccaugccccugagcugcaccaagaacaacagccaccacuacaucauggugggcaacgagaccggccuggagcugacccugaccaacaccagcaucaucaaccacaaguucugcaaccugagcgacgcccacaagaagaaccuguacgaccacgcccugaugagcaucaucagcaccuuccaccugagcauccccaacuucaaccaguacgaggccaugagcugcgacuucaacggcggcaagaucagcgugcaguacaaccugagccacgccuacgccguggacgccgccaaccacugcggcaccaucgccaacggcgugcugcagaccuucaugagaauggccuggggcggcagcuacaucgcccuggacagcggcugcggcagcugggacugcaucaugaccagcuaccaguaccugaucauccagaacaccaccugggaggaccacugccaguucagcagacccagccccaucggcuaccugggccugcugagccagagaaccagagacaucuacaucagcagaagacugcugggcaccuucaccuggacccugagcgacagcgagggcaacgagacccccggcggcuacugccugaccagauggaugcugaucgaggccgagcugaagugcuucggcaacaccgccguggccaagugcaacgagaagcacgacgaggaguucugcgacaugcugagacuguucgacuucaacaagcaggccaucagaagacugaaggccgaggcccagaugagcauccagcugaucaacaaggccgugaacgcccugaucaacgaccagcugaucaugaagaaccaccugagagacaucaugugcauccccuacugcaacuacagcaaguacugguaccugaaccacaccgugaccggcaagaccagccugcccagaugcuggcuggugagcaacggcagcuaccugaacgagacccacuucagcgacgacaucgagcagcaggccgacaacaugaucaccgagcugcugcagaaggaguacaucgacagacagggcaagaccccccugggccugguggaccuguucguguucagcaccagcuucuaccugaucagcaucuuccugcaccuggugaagauccccacccacagacacgugaucggcaagcccugccccaagccccacagacugaaccacaugggcaucugcagcugcggccuguacaagcaccccggcgugcccgugaaguggaagagaugaggacuagucccuguucccagagcccacuuuuuuuucuuuuuuugaaauaaaauagccugucuuucagaucucaaaggcucuuuucagagccaccaaaaaaaaaaaaaaaaaaaaaaaaaaaaaaaaaaaaaaaaaaaaaaaaaaaaaaaaaaaaaaaaaaaaaaaaaaaaaaaaaaaaaaaaaaaaaaaaaaaaa

SEQ ID NO: 35189 - RNA, 1745 nt, Artificial Sequence
  mRNA product Design a-1 (hSL-A100) comprising derived and/or modified sequence from LASV(LASV1000-NIG-2009;Clade II)__AIT17782__GPCmut9 (opt4)
aggagagucccgcagucggcguccagcggcucugcuuguucgugugugugucguugcaggccuuauucaagcuuaccaugggccagaucaucaccuucuuccaggaggugccccacgugaucgaggaggugaugaacaucgugcugaucgcccugagccugcuggccauccugaagggcaucuacaacguggccaccugcggccuguucggccuggugagcuuccugcugcugugcggcagaagcugcagcaccaccuacaagggcguguacgagcugcagacccuggagcuggacauggccagccugaacaugaccaugccccugagcugcaccaagaacaacagccaccacuacaucauggugggcaacgagaccggccuggagcugacccugaccaacaccagcaucaucaaccacaaguucugcaaccugagcgacgcccacaagaagaaccuguacgaccacgcccugaugagcaucaucagcaccuuccaccugagcauccccaacuucaaccaguacgaggccaugagcugcgacuucaacggcggcaagaucagcgugcaguacaaccugagccacaccuacgccguggacgccgccaaccacugcggcaccaucgccaacggcgugcugcagaccuucaugagaauggccuggggcggcagcuacaucgcccuggacagcggcugcggcagcugggacugcaucaugaccagcuaccaguaccugaucauccagaacaccaccugggaggaccacugccaguucagcagacccagccccaucggcuaccugggccugcugagccagagaaccagagacaucuacaucagcagaagacugcugggcaccuucaccuggacccugagcgacagcgagggcaacgagacccccggcggcuacugccugaccagauggaugcugaucgaggccgagcugaagugcuucggcaacaccgccguggccaagugcaacgagaagcacgacgaggaguucugcgacaugcugagacuguucgacuucaacaagcaggccaucaagagacugaagaccgaggcccagaugagcauccagcugaucaacaaggccgugaacgcccugaucaacgaccagcugaucaugaagaaccaccugagagacaucaugugcauccccuacugcaacuacagcaaguacugguaccugaaccacaccgugaccggcaagaccagccugcccagaugcuggcuggugagcaacggcagcuaccugaacgagacccacuucagcgacgacaucgagcagcaggccgacaacaugaucaccgagcugcugcagaaggaguacaucgacagacagggcaagaccccccugggccugguggaccuguucguguucagcaccagcuucuaccugaucagcaucuuccugcaccuggugaagauccccacccacagacacguggugggcaagcccugccccaagccccacagacugaaccacaugggcaucugcagcugcggccuguacaagcaccccggcgugcccgugaaguggaagagaugaggacuagucccuguucccagagcccacuuuuuuuucuuuuuuugaaauaaaauagccugucuuucagaucucaaaggcucuuuucagagccaccaaaaaaaaaaaaaaaaaaaaaaaaaaaaaaaaaaaaaaaaaaaaaaaaaaaaaaaaaaaaaaaaaaaaaaaaaaaaaaaaaaaaaaaaaaaaaaaaaaaaa

SEQ ID NO: 35190 - RNA, 1745 nt, Artificial Sequence
  mRNA product Design a-1 (hSL-A100) comprising derived and/or modified sequence from LASV(LASV221-NIG-2010;Clade II)__AIT17624__GPCmut9 (opt4)
aggagagucccgcagucggcguccagcggcucugcuuguucgugugugugucguugcaggccuuauucaagcuuaccaugggccagaucaucaccuucuuccaggaggugccccacgugaucgaggaggugaugaacaucgugcugaucgcccugagccugcuggccauccugaagggcaucuacaacguggccaccugcggccuguucggccuggugagcuuccugcugcugugcggcagaagcugcagcaccaccuacaagggcguguacgagcugcagacccuggagcuggacauggccagccugaacaugaccaugccccugagcugcaccaagaacaacagccaccacuacaucauggugggcaacgagaccggccuggagcugacccugaccaacaccagcaucaucaaccacaaguucugcaaccugagcgacgcccacaagaagaaccuguacgaccacgcccugaugagcaucaucagcaccuuccaccugagcauccccaacuucaaccaguacgaggccaugagcugcgacuucaacggcggcaagaucagcgugcaguacaaccugagccacaccuacgccaucgacgccgccaaccacugcggcaccaucgccaacggcgugcugcagaccuucaugagaauggccuggggcggcagcuacaucgcccuggacagcggcugcggcagcugggacugcaucaugaccagcuaccaguaccugaucauccagaacaccaccugggaggaccacugccaguucagcagacccagccccaucggcuaccugggccugcugagccagagaaccagagacaucuacaucagcagaagacugcugggcaccuucaccuggacccugagcgacagcgagggcaacgagacccccggcggcuacugccugaccagauggaugcugaucgaggccgagcugaagugcuucggcaacaccgccguggccaagugcaacgagaagcacgacgaggaguucugcgacaugcugagacuguucgacuucaacaagcaggccaucagaagacugaagaccgaggcccagaugagcauccagcugaucaacaaggccgugaacgcccugaucaacgaccagcugaucaugaagaaccaccugagagacaucaugugcauccccuacugcaacuacagcaaguacugguaccugaaccacaccgugaccggcaagaccagccugcccagaugcuggcuggugagcaacggcagcuaccugaacgagacccacuucagcgacgacaucgagcagcaggccgacaacaugaucaccgagaugcugcagaaggaguacauggacagacagggcaagaccccccugggccugguggaccuguucguguucagcaccagcuucuaccugaucagcaucuuccugcaccuggugaagauccccacccacagacacgugaucggcaagcccugccccaagccccacagacugaaccacaugggcaucugcagcugcggccuguacaagcaccccggcgugcccgugaaguggaagagaugaggacuagucccuguucccagagcccacuuuuuuuucuuuuuuugaaauaaaauagccugucuuucagaucucaaaggcucuuuucagagccaccaaaaaaaaaaaaaaaaaaaaaaaaaaaaaaaaaaaaaaaaaaaaaaaaaaaaaaaaaaaaaaaaaaaaaaaaaaaaaaaaaaaaaaaaaaaaaaaaaaaaa

SEQ ID NO: 35191 - RNA, 1745 nt, Artificial Sequence
  mRNA product Design a-1 (hSL-A100) comprising derived and/or modified sequence from LASV(LASV237-NIG-2010;Clade II)__AIT17638__GPCmut9 (opt4)
aggagagucccgcagucggcguccagcggcucugcuuguucgugugugugucguugcaggccuuauucaagcuuaccaugggccagaucaucaccuucuuccaggaggugccccacgugaucgaggaggugaugaacaucgugcugaucgcccugagccugcuggccauccugaagggcaucuacaacguggccaccugcggccuguucggccuggugagcuuccugcugcugugcggcagaagcugcagcaccaccuacaagggcguguacgagcugcagacccuggagcuggacauggccagccugaacaugaccaugccccugagcugcaccaagaacaacagccaccacuacaucauggugggcaacgagaccggccuggagcugacccugaccaacaccagcaucaucaaccacaaguucugcaaccugagcgacgcccacaagaaggaccuguacgaccacgcccugaugagcaucaucagcaccuuccaccugagcauccccaacuucaaccaguacgaggccaugagcugcgacuucaacggcggcaagaucagcgugcaguacaaccugagccacaccuacgccguggacgccgccaaccacugcggcaccaucgccaacggcgugcugcagaccuucaugagaauggccuggggcggcagcuacaucgcccuggacagcggcugcggcagcugggacugcaucaugaccagcuaccaguaccugaucauccagaacaccaccugggaggaccacugccaguucagcagacccagccccaucggcuaccugggccugcugagccagagaaccagagacaucuacaucagcagaagacugcugggcaccuucaccuggacccugagcgacagcgagggcaacgagacccccggcggcuacugccugaccagauggaugcugaucgaggccgagcugaagugcuucggcaacaccgccguggccaagugcaacgagaagcacgacgaggaguucugcgacaugcugagacuguucgacuucaacaagcaggccaucagaagacugaagaccgaggcccagaugagcauccagcugaucaacaaggccgugaacgcccugaucaacgaccagcugaucaugaagaaccaccugagagacaucaugugcauccccuacugcaacuacagcaaguacugguaccugaaccacaccgugaccggcaagaccagccugcccagaugcuggcuggugagcaacggcagcuaccugaacgagacccacuucagcgacgacaucgagcagcaggccgacaacaugaucaccgagcugcugcagaaggaguacauggacagacagggcaagaccccccugggccugguggaccuguucguguucagcaccagcuucuaccugaucagcaucuuccugcaccugaucaagauccccacccacagacacaucaccggcaagcccugccccaagccccacagacugaaccacaugggcaucugcagcugcggccuguacaagcaccccggcgugcccgugaaguggaagagaugaggacuagucccuguucccagagcccacuuuuuuuucuuuuuuugaaauaaaauagccugucuuucagaucucaaaggcucuuuucagagccaccaaaaaaaaaaaaaaaaaaaaaaaaaaaaaaaaaaaaaaaaaaaaaaaaaaaaaaaaaaaaaaaaaaaaaaaaaaaaaaaaaaaaaaaaaaaaaaaaaaaaa

SEQ ID NO: 35192 - RNA, 1745 nt, Artificial Sequence
  mRNA product Design a-1 (hSL-A100) comprising derived and/or modified sequence from LASV(LASV253-NIG-2011;Clade II)__AIT17670__GPCmut9 (opt4)
aggagagucccgcagucggcguccagcggcucugcuuguucgugugugugucguugcaggccuuauucaagcuuaccaugggccagaucaucaccuucuuccaggaggugccccacgugaucgaggaggugaugaacaucgugcugaucgcccugagccugcuggccauccugaagggcaucuacaacguggccaccugcggccuguucggccuggugagcuuccugcugcugugcggcagaagcugcagcaccaccuacaagggcguguacgagcugcagacccuggagcuggacauggccagccugaacaugaccaugccccugagcugcaccaagaacaacagccaccacuacaucauggugggcaacgagaccggccuggagcugacccugaccaacaccagcaucaucaaccacaaguucugcaaccugagcgacgcccacaagaagaaccuguacgaccacgcccugaugagcaucaucagcaccuuccaccugagcauccccaacuucaaccaguacgaggccaugagcugcgacuucaacggcggcaagaucagcgugcaguacaaccugagccacaccuacgccguggacgccgccaaccacugcggcaccaucgccaacggcgugcugcagaccuucaugagaauggccuggggcggcagcuacaucgcccuggacagcggcugcggcagcugggacugcaucaugaccagcuaccaguaccugaucauccagaacaccaccugggaggaccacugccaguucagcagacccagccccaucggcuaccugggccugcugagccagagaaccagagacaucuacaucagcagaagacugcugggcaccuucaccuggacccugagcgacagcgagggcaacgagacccccggcggcuacugccugaccagauggaugcugaucgaggccgagcugaagugcuucggcaacaccgccguggccaagugcaacgagaagcacgacgaggaguucugcgacaugcugagacuguucgacuucaacaagcaggccaucagaagacugaaggccgaggcccagaugagcauccagcugaucaacaaggccgugaacgcccugaucaacgaccagcugaucaugaagaaccaccugagagacaucaugugcauccccuacugcaacuacagcaaguacugguaccugaaccacaccgugaccggcagaaccagccugcccagaugcuggcuggugagcaacggcagcuaccugaacgagacccacuucagcgacgacaucgagcagcaggccgacaacaugaucaccgagcugcugcagaaggaguacaucgacagacagggcaagaccccccugggccugguggaccuguucguguucagcaccagcuucuaccugaucagcaucuuccugcaccuggugaagauccccacccacagacacaucaucggcaagcccugccccaagccccacagacugaaccacaugggcaucugcagcugcggccuguacaagcaccccggcgugcccgugaaguggaagagaugaggacuagucccuguucccagagcccacuuuuuuuucuuuuuuugaaauaaaauagccugucuuucagaucucaaaggcucuuuucagagccaccaaaaaaaaaaaaaaaaaaaaaaaaaaaaaaaaaaaaaaaaaaaaaaaaaaaaaaaaaaaaaaaaaaaaaaaaaaaaaaaaaaaaaaaaaaaaaaaaaaaaa

SEQ ID NO: 35193 - RNA, 1745 nt, Artificial Sequence
  mRNA product Design a-1 (hSL-A100) comprising derived and/or modified sequence from LASV(LASV254-NIG-2011;Clade II)__AIT17674__GPCmut9 (opt4)
aggagagucccgcagucggcguccagcggcucugcuuguucgugugugugucguugcaggccuuauucaagcuuaccaugggccagaucaucaccuucuuccaggaggugccccacgugaucgaggaggugaugaacaucgugcugaucgcccugagccugcuggccauccugaagggcaucuacaacguggccaccugcggccuguucggccuggugagcuuccugcugcugugcggcagaagcugcagcaccaccuacaagggcguguacgagcugcagacccuggagcuggacaugaccaaccugaacaugaccaugccccugagcugcaccaagaacaacagccaccacuacaucauggugggcaacgagaccggccuggagcugacccugaccaacaccagcaucaucaaccacaaguucugcaaccugagcgacgcccacaagaagaaccuguacaaccacgcccugaugagcaucaucagcaccuuccaccugagcauccccaacuucaaccaguacgaggccaugagcugcgacuucaacggcggcaagaucagcgugcaguacaaccugagccacagcuacgccguggacgccgccaaccacugcggcaccaucgccaacggcgugcugcagaccuucaugagaauggccuggggcggcagcuacaucgcccuggacagcggcugcggcaacugggacugcaucaugaccagcuaccaguaccugaucauccagaacaccaccugggaggaccacugccaguucagcagacccagccccaucggcuaccugggccugcugagccagagaaccagagacaucuacaucagcagaagacugcugggcaccuucaccuggacccugagcgacagcgagggcaacgagacccccggcggcuacugccugaccagauggaugcugaucgaggccgagcugaagugcuucggcaacaccgccguggccaagugcaacgagaagcacgacgaggaguucugcgacaugcugagacuguucgacuucaacaagcaggccaucagaagacugaagaccgaggcccaggccaacauccagcugaucaacaaggccgugaacgcccugaucaacgaccagcugaucaugaagaaccaccugagagacaucaugugcauccccuacugcaacuacagcaaguacugguaccugaaccacaccgugaccggcaagaccagccugcccagaugcuggcuggugagcaacggcagcuaccugaacgagacccacuucagcgacgacaucgagcagcaggccgacaacaugaucaccgagcugcugcagaaggaguacauggacagacagggcaagaccccccugggccugguggaccuguucguguucagcaccagcuucuaccugaucagcaucuuccugcaccuggugaagauccccacccacagacacgugaucggcaagcccugccccaagccccacagacugaaccacaugggcaucugcagcugcggccuguacaagcaccccggcgugcccgugaaguggaagagaugaggacuagucccuguucccagagcccacuuuuuuuucuuuuuuugaaauaaaauagccugucuuucagaucucaaaggcucuuuucagagccaccaaaaaaaaaaaaaaaaaaaaaaaaaaaaaaaaaaaaaaaaaaaaaaaaaaaaaaaaaaaaaaaaaaaaaaaaaaaaaaaaaaaaaaaaaaaaaaaaaaaaa

SEQ ID NO: 35194 - RNA, 1745 nt, Artificial Sequence
  mRNA product Design a-1 (hSL-A100) comprising derived and/or modified sequence from LASV(Nig08-A19;Clade III)__ADU56618__GPCmut9 (opt4)
aggagagucccgcagucggcguccagcggcucugcuuguucgugugugugucguugcaggccuuauucaagcuuaccaugggccagaucgugaccuucuuccaggaggugccccacgugaucgaggaggugaugaacaucgugcugaucgcccugagcauccuggccauccugaagggccuguacaacaucgccaccugcggccugaucggccuggugaccuuccugcugcugagcggcagaagcugcagcaugaccuacaagggcguguacgagcugcagacccuggagcugaacaugaacacccugaacaugaccaugccccugagcugcaccaagaacaacagccaccacuacaucauggugggcaacgagaccggccuggagcugacccugaccaacaccagccugcugcaccacaaguucugcaaccugagcgacgcccacaagaagaaccuguacgaccacacccugaugagcaucaucagcaccuuccaccugagcauccccaacuucaaccaguacgaggccaugagcugcgacuucaacggcggcaagaucaccgugcaguacaaccugagccacagcuacgccaucgacgccgccaaccacugcggcaccguggccaacggcgugcugcagaccuucaugagaauggccuggggcggcagcuacaucgcccuggacagcggcugcggcaagugggacugcaucaugaccagcuaccaguaccugaucauccagaacaccaccugggaggaccacugccaguucagcagacccagccccaucggcuaccugggccugcugagccagagaaccagagacaucuacaucagcagaagacugcugggcaccuucaccuggacccugagcgacagcgagggcaacgagacccccggcggcuacugccugaccagauggaugcugaucgaggccgagcugaagugcuucggcaacaccgccguggccaagugcaacgagaagcacgacgaggaguucugcgacaugcugagacuguucgacuucaacaagcaggccaucagaagacugaaggccgaggcccagaugagcauccagcugaucaacaaggccgugaacgcccugaucaacgaccagcugaucaugaagaaccaccugagagacaucaugugcauccccuacugcaacuacagcaaguacugguaccugaaccacaccagcaccggcagaaccagccugcccagaugcuggcuggugagcaacggcagcuaccugaacgagacccacuucagcgacgacaucgagcagcaggccgacaacaugaucaccgagaugcugcagaaggaguaccuggacagacagggcaagaccccccugggccugguggaccuguucguguucagcaccagcuucuaccugaucagcaucuuccugcaccuggugaagauccccacccacagacacaucgugggcaagcccugccccaagccccacagacugaaccacaugggcaucugcagcugcggccuguacaagcagcccggcgugcccgugagauggaagagaugaggacuagucccuguucccagagcccacuuuuuuuucuuuuuuugaaauaaaauagccugucuuucagaucucaaaggcucuuuucagagccaccaaaaaaaaaaaaaaaaaaaaaaaaaaaaaaaaaaaaaaaaaaaaaaaaaaaaaaaaaaaaaaaaaaaaaaaaaaaaaaaaaaaaaaaaaaaaaaaaaaaaa

SEQ ID NO: 35195 - RNA, 1748 nt, Artificial Sequence
  mRNA product Design a-1 (hSL-A100) comprising derived and/or modified sequence from LASV(G1180-SLE-2010;Clade IV)__AIT17168__GPCmut9 (opt4)
aggagagucccgcagucggcguccagcggcucugcuuguucgugugugugucguugcaggccuuauucaagcuuaccaugggccagaucgugaccuucuuccaggaggugccccacgugaucgaggaggugaugaacaucgugcugaucgcccugagcauccuggccgugcugaagggccuguacaacuucgccaccugcggccuggugggccugcugaccuuccugcugcugugcggcagaagcugcaccgccagcagauacaagggcguguacgagcugcagacccuggagcugaacauggagacccugaacaugaccaugccccugagcugcaccaagaacaacagccaccacuacaucauggugggcaacgagaccggccuggagcugacccugaccaacaccagcaucaucaaccacaaguucugcaaccugagcgacgcccacaagaagaaccuguacgaccacgcccugaugagcaucaucagcaccuuccaccugagcauccccaacuucaaccaguacgaggccaugagcugcgacuucaacggcggcaagaucagcgugcaguacaaccugagccacagcuacgccggcgacgccgccaaccacugcggcaccguggccaacggcgugcugcagaccuucaugagaauggccuggggcggcagcuacaucgcccuggacagcggcugcggcagcugggacugcaucaugaccagcuaccaguaccugaucauccagaacaccaccugggaggaccacugccaguucagcagacccagccccaucggcuaccugggccugcugagccagagaaccagagacaucuacaucagcagaagacugcugggcaccuucaccuggacccugagcgacagcgagggcaaggacacccccggcggcuacugccugaccagauggaugcugaucgaggccgagcugaagugcuucggcaacaccgccguggccaagugcaacgagaagcacgacgaggaguucugcgacaugcugagacuguucgacuucaacaagcaggccauccagagacugaaggccgaggcccagaugagcauccagcugaucaacaaggccgugaacgcccugaucaacgaccagcugaucaugaagaaccaccugagagacaucaugugcauccccuacugcaacuacagcaaguacugguaccugaaccacaccaccaccggcaagaccagccugcccaagugcuggcuggugagcaacggcagcuaccugaacgagacccacuucagcgacgacaucgagcagcaggccgacaacaugaucaccgagaugcugcagaaggaguacauggagagacagggcaagaccccccugggccugguggaccuguucguguucagcaccagcuucuaccugaucagcaucuuccugcaccuggugaagauccccacccacagacacaucgugggcaagagcugccccaagccccacagacugaaccacaugggcaucugcagcugcggccuguacaagcagcccggcgugcccgugaaguggaagagaugaggacuagucccuguucccagagcccacuuuuuuuucuuuuuuugaaauaaaauagccugucuuucagaucucaaaggcucuuuucagagccaccaaaaaaaaaaaaaaaaaaaaaaaaaaaaaaaaaaaaaaaaaaaaaaaaaaaaaaaaaaaaaaaaaaaaaaaaaaaaaaaaaaaaaaaaaaaaaaaaaaaaa

SEQ ID NO: 35196 - RNA, 1748 nt, Artificial Sequence
  mRNA product Design a-1 (hSL-A100) comprising derived and/or modified sequence from LASV(G1442-SLE-2011;Clade IV)__AIT17180__GPCmut9 (opt4)
aggagagucccgcagucggcguccagcggcucugcuuguucgugugugugucguugcaggccuuauucaagcuuaccaugggccagaucgugaccuucuuccaggaggugccccacgugaucgaggaggugaugaacaucgugcugaucgcccugagcauccuggccgugcugaagggccuguacaacguggccaccugcggccugaucggccuggugaccuuccugcugcugugcggcagaagcugcaccaccacccuguacaagggcguguacgagcugcagacccuggagcugaacauggagacccugaacaugaccaugccccugagcugcaccaagaacaacagccaccacuacaucagagugggcaacgagaccggccuggagcugacccugaccaacaccagcaucaucaaccacaaguucugcaaccugagcgacgcccacaagaagaaccuguacgaccacgcccugaugagcaucaucagcaccuuccaccugagcauccccaacuucaaccaguacgaggccaugagcugcgacuucaacggcggcaagaucagcgugcaguacaaccugagccacagcuacgccggcgacgccgccaaccacugcggcaccguggccaacggcgugcugcagaccuucaugagaauggccuggggcggcagcuacaucgcccuggacagcggcugcggcaacugggacugcaucaugaccagcuaccaguaccugaucauccagaacaccaccugggacgaccacugccaguucagcagacccagccccaucggcuaccugggccugcugagccagagaaccagagacguguacaucagcagaagacugcugggcaccuucaccuggacccugagcgacagcgagggcaaggacacccccggcggcuacugccugaccagauggaugcugaucgaggccgagcugaagugcuucggcaacaccgccguggccaagugcaacgagaagcacgacgaggaguucugcgacaugcugagacuguucgacuucaacaagcaggccauccagagacugaaggccgaggcccagaugagcauccagcugaucaacaaggccgugaacgcccugaucaacgaccagcugaucaugaagaaccaccugagagacaucaugugcauccccuacugcaacuacagcaaguacugguaccugaacaacaccgccaccggcaagaccagccugcccaagugcuggcugaucagcaacggcagcuaccugaacgagacccacuucagcgacgacaucgagcaggaggccgacaacaugaucaccgagaugcugcagaaggaguacauggagagacagggcaagaccccccugggccugguggaccuguucguguucagcaccagcuucuaccugaucagcaucuuccugcaccuggugaagauccccacccacagacacaucgugggcaagagcugccccaagccccacagacugaaccacaugggcaucugcagcugcggccuguacaagcagcccggcgugcccgugagauggaagagaugaggacuagucccuguucccagagcccacuuuuuuuucuuuuuuugaaauaaaauagccugucuuucagaucucaaaggcucuuuucagagccaccaaaaaaaaaaaaaaaaaaaaaaaaaaaaaaaaaaaaaaaaaaaaaaaaaaaaaaaaaaaaaaaaaaaaaaaaaaaaaaaaaaaaaaaaaaaaaaaaaaaaa

SEQ ID NO: 35197 - RNA, 1748 nt, Artificial Sequence
  mRNA product Design a-1 (hSL-A100) comprising derived and/or modified sequence from LASV(G3010-SLE-2013;Clade IV)__AIT17344__GPCmut9 (opt4)
aggagagucccgcagucggcguccagcggcucugcuuguucgugugugugucguugcaggccuuauucaagcuuaccaugggccagaucgugaccuucuuccaggaggugccccacgugaucgaggaggugaugaacaucgugcugaucgcccugagcauccuggccgugcugaagggccuguacaacuucgccaccugcggccuggugggccuggugaccuuccugcugcugugcggcagaagcugcaccaccagccuguacaagggcguguacgagcugcagacccuggagcugaacauggagacccugaacaugaccaugccccugagcugcaccaagaacaacagccaccacuacaucauggugggcaacgagaccggccuggagcugacccugaccaacaccagcaucaucaaccacaaguucugcaaccugagcgacgcccacaagaagaaccuguacaaccacgcccugaugagcaucaucagcaccuuccaccugagcauccccaacuucaaccaguacgaggccaugagcugcgacuucaacggcggcaagaucagcgugcaguacaaccugagccacagcuacgccggcgacgccgccagccacugcggcaccguggccaacggcgugcugcagaccuucaugagaauggccuggggcggcagcuacaucgcccuggacagcggcugcggcaagugggacugcaucaugaccagcuaccaguaccugaucauccagaacaccaccugggaggaccacugccaguucagcagacccagccccaucggcuaccugggccugcugagccagagaaccagagacaucuacaucagcagaagacugcugggcaccuucaccuggacccugagcgacagcgagggcaaggacacccccggcggcuacugccugaccagauggaugcugaucgaggccgagcugaagugcuucggcaacaccgccguggccaagugcaacgagaagcacgacgaggaguucugcgacaugcugagacuguucgacuucaacaagcaggccauccagagacugaagaccgaggcccagaugagcauccagcugaucaacaaggccgugaacgcccugaucaacgaccagcugaucaugaagaaccaccugagagacaucaugugcauccccuacugcaacuacagcaaguacugguaccugaaccacaccaccaccggcaagaccagccugcccaagugcuggcuggugagcaacggcagcuaccugaacgagacccacuucagcgacgacaucgagcagcaggccgacaacaugaucaccgagaugcugcagaaggaguacauggagagacagggcaagaccccccugggccugguggaccuguucguguucagcaccagcuucuaccugaucagcaucuuccugcaccuggugaagauccccacccacagacacaucgugggcaagagcugccccaagccccacagacugaaccacaugggcaucugcagcugcggccuguacaagcagcccggcgugcccgugagauggaagagaugaggacuagucccuguucccagagcccacuuuuuuuucuuuuuuugaaauaaaauagccugucuuucagaucucaaaggcucuuuucagagccaccaaaaaaaaaaaaaaaaaaaaaaaaaaaaaaaaaaaaaaaaaaaaaaaaaaaaaaaaaaaaaaaaaaaaaaaaaaaaaaaaaaaaaaaaaaaaaaaaaaaaa

SEQ ID NO: 35198 - RNA, 1748 nt, Artificial Sequence
  mRNA product Design a-1 (hSL-A100) comprising derived and/or modified sequence from LASV(G502-SLE-2009;Clade IV)__AIT17126__GPCmut9 (opt4)
aggagagucccgcagucggcguccagcggcucugcuuguucgugugugugucguugcaggccuuauucaagcuuaccaugggccagaucgugaccuucuuccaggaggugccccacgugaucgaggaggugaugaacaucgugcugaucgcccugagcauccuggccgugcugaagggccuguacaacuucgccaccugcggccuggugggccugcugaccuuccugcugcugugcggcagaagcugcaccaccggccuguacaagggcguguacgagcugcagacccuggagcugaacauggagacccugaacaugaccaugccccugagcugcaccaagaacaacagccaccacuacaucauggugggcaacgagaccggccuggagcugacccugaccaacaccagcaucaucaaccacaaguucugcaaccugagcgacgcccacaagaagaaccuguacgaccacgcccugaugagcaucaucagcaccuuccaccugagcauccccaacuucaaccaguacgaggccaugagcugcgacuucaacggcggcaagaucagcgugcaguacaaccugagccacagcuacgccggcgacgccgccgaccacugcggcaccguggccaacggcgugcugcagaccuucaugagaauggccuggggcggcagcuacaucgcccuggacagcggcugcggcagaugggacugcaucaugaccagcuaccaguaccugaucauccagaacaccaccugggaggaccacugccaguucagcagacccagccccaucggcuaccugggccugcugagccagagaaccagagacaucuacaucagcagaagacugcugggcaccuucaccuggacccugagcgacagcgagggcaaggacacccccggcggcuacugccugaccagauggaugcugaucgaggccgagcugaagugcuucggcaacaccgccguggccaagugcaacgagaagcacgacgaggaguucugcgacaugcugagacuguucgacuucaacaagcaggccauccagagacugaaggccgaggcccagaugagcauccagcugaucaacaaggccgugaacgcccugaucaacgaccagcuggugaugaagaaccaccugagagacaucaugugcauccccuacugcaacuacagcagauacugguaccugaaccacaccaccaccggcagaaccagccugcccaagugcuggcuggugagcaacggcagcuaccugaacgagacccacuucagcgacgacaucgagcagcaggccgacaacaugaucaccgagaugcugcagaaggaguacauggagagacagggcaagaccccccugggccugguggaccuguucguguucagcaccagcuucuaccugaucagcaucuuccugcaccuggugaagauccccacccacagacacaucgugggcaagagcugccccaagccccacagacugaaccacaugggcaucugcagcugcggccuguacaagcagcccggcgugcccgugaaguggaagagaugaggacuagucccuguucccagagcccacuuuuuuuucuuuuuuugaaauaaaauagccugucuuucagaucucaaaggcucuuuucagagccaccaaaaaaaaaaaaaaaaaaaaaaaaaaaaaaaaaaaaaaaaaaaaaaaaaaaaaaaaaaaaaaaaaaaaaaaaaaaaaaaaaaaaaaaaaaaaaaaaaaaaa

SEQ ID NO: 35199 - RNA, 1748 nt, Artificial Sequence
  mRNA product Design a-1 (hSL-A100) comprising derived and/or modified sequence from LASV(G733-SLE-2010;Clade IV)__AIT17154__GPCmut9 (opt4)
aggagagucccgcagucggcguccagcggcucugcuuguucgugugugugucguugcaggccuuauucaagcuuaccaugggccagaucgugaccuucuuccaggaggugccccacgugaucgaggaggugaugaacaucgugcugaucgcccugagcauccuggccgugcugaagggccuguacaacuucgccaccugcggcaucgugggccuggugagcuuccugcugcugugcggcagaagcugcaccaccagccuguacaagggcguguacgagcugcagacccuggagcugaacauggagacccugaacaugaccaugccccugagcugcaccaagaacaacagccaccacuacaucauggugggcaacgagaccggccuggagcugacccugaccaacaccagcaucaucaaccacaaguucugcaaccugagcgacgcccacaagaagaaccuguacgaccacgcccugaugagcaucaucagcaccuuccaccugagcauccccaacuucaaccaguacgaggccaugagcugcgacuucaacggcggcaagaucagcgugcaguacaaccugagccacagcuacgccggcgacgccgccaaccacugcggcaccaucgccaacggcgugcugcagaccuucaugagaauggccuggggcggcagcuacaucgcccuggacagcggcugcgacagaugggacugcaucaugaccagcuaccaguaccugaucauccagaacaccaccugggaggaccacugccaguucagcagacccagccccaucggcuaccugggccugcugagccagagaaccagagacaucuacaucagcagaagacugcugggcaccuucaccuggacccugagcgacagcgagggcaaggacacccccggcggcuacugccugaccagauggaugcugaucgaggccgagcugaagugcuucggcaacaccgccguggccaagugcaacgagaagcacgacgaggaguucugcgacaugcugagacuguucgacuucaacaagcaggccauccagagacugaaggccgaggcccagaugagcauccagcugaucaacaaggccgugaacgcccugaucaacgaccagcugaucaugaagaaccaccugagagacaucaugugcauccccuacugcaacuacagcaaguacugguaccugaaccacaccaccaccggcaagaccagccugcccaagugcuggcuggugagcaacggcagcuaccugaacgagacccacuucagcgacgacaucgagcagcaggccgacaacaugaucaccgagaugcugcagaaggaguacauggagagacagggcaagaccccccugggccugguggaccuguucguguucagcaccagcuucuaccugaucagcaucuuccugcaccuggugaagauccccacccacagacacguggugggcaagagcugccccaagccccacagacugaaccacaugggcaucugcagcugcggccuguacggccagcccggcgugcccgugaaguggaagagaugaggacuagucccuguucccagagcccacuuuuuuuucuuuuuuugaaauaaaauagccugucuuucagaucucaaaggcucuuuucagagccaccaaaaaaaaaaaaaaaaaaaaaaaaaaaaaaaaaaaaaaaaaaaaaaaaaaaaaaaaaaaaaaaaaaaaaaaaaaaaaaaaaaaaaaaaaaaaaaaaaaaaa

SEQ ID NO: 35200 - RNA, 1748 nt, Artificial Sequence
  mRNA product Design a-1 (hSL-A100) comprising derived and/or modified sequence from MOPV/LASV reassortant(IGS-1;Clade IV)__AFY05576__GPCmut9 (opt4)
aggagagucccgcagucggcguccagcggcucugcuuguucgugugugugucguugcaggccuuauucaagcuuaccaugggccagaucgugaccuucuuccaggaggugccccacgugaucgaggaggugaugaacaucgugcugaucgcccugagcgugcuggccgugcugaagggccuguacaacuucgccaccugcggccuggugggccuggugaccuuccugcugcugugcggcagaagcugcaccaccagccuguacaagggcguguacgagcugcagacccuggagcugaacauggagacccugaacaugaccaugccccugagcugcaccaagaacaacagccaccacuacaucauggugggcaacgagaccggccuggagcugacccugaccaacaccagcaucaucaaccacaaguucugcaaccugagcgacgcccacaagaagaaccuguacgaccacgcccugaugagcaucaucagcaccuuccaccugagcauccccaacuucaaccaguacgaggccaugagcugcgacuucaacggcggcaagaucagcgugcaguacaaccugagccacagcuacgccggcgacgccgccaaccacugcggcaccguggccaacggcgugcugcagaccuucaugagaauggccuggggcggcagcuacaucgcccuggacagcggcugcggcaacugggacugcaucaugaccagcuaccaguaccugaucauccagaacaccaccugggaggaccacugccaguucagcagacccagccccaucggcuaccugggccugcugagccagagaaccagagacaucuacaucagcagaagacugcugggcaccuucaccuggacccugagcgacagcgagggcgaggacacccccggcggcuacugccugaccagauggaugcugaucgaggccgagcugaagugcuucggcaacaccgccguggccaagugcaacgagaagcacgacgaggaguucugcgacaugcugagacuguucgacuucaacaagcaggccauccagagacugaaggccgaggcccagaugagcauccagcugaucaacaaggccgugaacgcccugaucaacgaccagcugaucaugaagaaccaccugagagacaucaugugcauccccuacugcaacuacagcaaguacugguaccugaaccacaccaccaccggcagaaccagccugcccaagugcuggcuggugagcaacggcagcuaccugaacgagacccacuucagcgacgacaucgagcagcaggccgacaacaugaucaccgagaugcugcagaaggaguacauggagagacagggcaagaccccccugggccugguggaccuguucguguucagcaccagcuucuaccugaucagcaucuuccugcaccuggugaagauccccacccacagacacaucgugggcaagagcugccccaagccccacagacugaaccacaugggcaucugcagcugcggccuguacaagcagcccggcgugcccgugaaguggaagagaugaggacuagucccuguucccagagcccacuuuuuuuucuuuuuuugaaauaaaauagccugucuuucagaucucaaaggcucuuuucagagccaccaaaaaaaaaaaaaaaaaaaaaaaaaaaaaaaaaaaaaaaaaaaaaaaaaaaaaaaaaaaaaaaaaaaaaaaaaaaaaaaaaaaaaaaaaaaaaaaaaaaaa

SEQ ID NO: 35201 - RNA, 1748 nt, Artificial Sequence
  mRNA product Design a-1 (hSL-A100) comprising derived and/or modified sequence from LASV(LM765-SLE-2012;Clade IV)__AIT17814__GPCmut9 (opt4)
aggagagucccgcagucggcguccagcggcucugcuuguucgugugugugucguugcaggccuuauucaagcuuaccaugggccagaucgugaccuucuuccaggaggugccccacgugaucgaggaggugaugaacaucgugcugaucgcccugagcauccuggccgugcugaagggccuguacaacuucgccaccugcggccuggugggccuggugaccuuccugcugcugugcggcagaagcugcaccaccagccuguacaagggcguguacgagcugcagacccuggagcugaacauggagacccugaacaugaccaugccccugagcugcaccaagaacaacagccaccacuacaucauggugggcaacgagaccggccuggagcugacccugaccaacaccagcaucaucgaccacaaguucugcaaccugagcgacgcccacagaaagaaccuguacgaccacgcccugaugagcaucaucagcaccuuccaccugagcauccccaacuucaaccaguacgaggccaugagcugcgacuucaacggcggcaagaucagcgugcaguacaaccugagccacagcuacgccaaggacgccgccgaccacugcggcaccguggccaacggcgugcugcagaccuucaugagaauggccuggggcggcagcuacaucgcccuggacagcggcugcggcagaugggacugcaucaugaccagcuaccaguaccugaucauccagaacaccaccugggaggaccacugccaguucagcagacccagccccaucggcuaccugggccugcugagccagagaaccagagacaucuacaucagcagaagacugcugggcaccuucaccuggacccugagcgacagcgagggcaaggacacccccggcggcuacugccugaccagauggaugcugaucgaggccgagcugaagugcuucggcaacaccgccguggccaagugcaacgagaagcacgacgaggaguucugcgacaugcugagacuguucgacuucaacaagcaggccauccagagacugaaggccgaggcccagaugagcauccagcugaucaacaaggccgugaacgcccugaucaacgaccagcugaucaugaagaaccaccugagagacaucaugugcauccccuacugcaacuacagcaaguacugguaccugaaccacaccaccaccggcaagaccagccugcccaagugcuggcuggugagcaacggcagcuaccugaacgagacccacuucagcgacgacaucgagcagcaggccgacaacaugaucaccgagaugcugcagaaggaguacauggagagacagggcaagaccccccugggccugguggaccuguucguguucagcaccagcuucuaccugaucagcaucuuccugcaccuggugaagauccccacccacagacacaucgugggcaagcccugccccaagccccacagacugaaccacaugggcaucugcagcugcggccuguacaagcagcccggcgugcccgugaaguggaagagaugaggacuagucccuguucccagagcccacuuuuuuuucuuuuuuugaaauaaaauagccugucuuucagaucucaaaggcucuuuucagagccaccaaaaaaaaaaaaaaaaaaaaaaaaaaaaaaaaaaaaaaaaaaaaaaaaaaaaaaaaaaaaaaaaaaaaaaaaaaaaaaaaaaaaaaaaaaaaaaaaaaaaa

SEQ ID NO: 35202 - RNA, 1748 nt, Artificial Sequence
  mRNA product Design a-1 (hSL-A100) comprising derived and/or modified sequence from LASV(LM776-SLE-2012;Clade IV)__AIT17824__GPCmut9 (opt4)
aggagagucccgcagucggcguccagcggcucugcuuguucgugugugugucguugcaggccuuauucaagcuuaccaugggccagaucgugaccuucuuccaggaggugccccacgugaucgaggaggugaugaacaucgugcugaucgcccugagcauccuggccgugcugaagggccuguacaacuucgccaccugcggccuggugggccuggugaccuuccugcugcugugcggcagaagcugcaccaccagcguguacaagggcguguacgagcugcagacccuggagcugaacauggagacccugaacaugaccaugccccugagcugcaccaagaacaacagccaccacuacaucauggugggcaacgagaccggccuggagcugacccugaccaacaccagcaucaucaaccacaaguucugcaaccugagcgacgcccacaagaagaaccuguacgaccacgcccugaugagcaucaucagcaccuuccaccugagcauccccaacuucaaccaguacgaggccaugagcugcgacuucaacggcggcaagaucagcgugcaguacaaccugagccacagcuacgccggcgacgccgccaaccacugcggcaccguggccaacggcgugcugcagaccuucaugagaauggccuggggcggcagcuacaucgcccuggacagcggcugcggcaagugggacugcaucaugaccagcuaccaguaccugaucauccagaacaccaccugggaggaccacugccaguucagcagacccagccccaucggcuaccugggccugcugagccagagaaccagagacaucuacaucagcagaagacugcugggcaccuucaccuggacccugagcgacagcgagggcaaggacacccccggcggcuacugccugaccagauggaugcugaucgaggccgagcugaagugcuucggcaacaccgccguggccaagugcaacgagaagcacgacgaggaguucugcgacaugcugagacuguucgacuucaacaagcaggccauccagagacugaaggccgaggcccagaugagcauccagcugaucaacaaggccgugaacgcccugaucaacgaccagcugaucaugaagaaccaccugagagacaucaugugcauccccuacugcaacuacagcaaguacugguaccugaaccacaccaccaccggcaagaccagccugcccaagugcuggcuggugagcaacggcagcuaccugaacgagacccacuucagcgacgacaucgagcagcaggccgacaacaugaucaccgagaugcugcagaaggaguacauggagagacagggcaagaccccccugggccugguggaccuguucguguucagcaccagcuucuaccugaucagcaucuuccugcaccuggugaagauccccacccacagacacaucgugggcaagagcugccccaagccccacagacugaaccacaugggcaucugcagcugcggccuguacaagcagcccggcgugcccgugagauggaagagaugaggacuagucccuguucccagagcccacuuuuuuuucuuuuuuugaaauaaaauagccugucuuucagaucucaaaggcucuuuucagagccaccaaaaaaaaaaaaaaaaaaaaaaaaaaaaaaaaaaaaaaaaaaaaaaaaaaaaaaaaaaaaaaaaaaaaaaaaaaaaaaaaaaaaaaaaaaaaaaaaaaaaa

SEQ ID NO: 35203 - RNA, 1748 nt, Artificial Sequence
  mRNA product Design a-1 (hSL-A100) comprising derived and/or modified sequence from LASV(Mad39;Clade IV)__ANH09722__GPCmut9 (opt4)
aggagagucccgcagucggcguccagcggcucugcuuguucgugugugugucguugcaggccuuauucaagcuuaccaugggccagaucgugaccuucuuccaggaggugccccacgugaucgaggaggugaugaacaucgugcugaucgcccugagcauccuggccgugcugaagggccuguacaacguggccaccugcggccugaucggccuggugaccuuccugcugcugugcggcagaagcugcaccaccacccuguacaagggcguguacgagcugcaggcccuggagcugaacauggagacccugaacaugaccaugccccugagcugcaccaagaacaacagccaccacuacaucagagugggcaacgagaccggccuggagcugacccugaccaacaccagccugaucaaccacaaguucugcaaccugagcgacgcccacaagaagaaccuguacgaccacgcccugaugagcaucaucagcaccuuccaccugagcauccccaacuucaaccaguacgaggccaugagcugcgacuucaacgacggcaagaucagcgugcaguacaaccugagccacaccuacgccggcgacaccgccaaccacugcggcaccguggccaacggcgugcugcagaccuucaugagaauggccuggggcggcagcuacaucgcccuggacagcggcugcggcggcugggacugcaucaugaccagcuaccaguaccugaucauccagaacaccaccugggaggaccacugccaguucagcagacccagccccaucggcuaccugggccugcugagccagagaaccagagacaucuacaucagcagaagacugcugggcaccuucaccuggacccugagcgacagcgagggcaaggacacccccggcggcuacugccugaccagauggaugcugaucgaggccgagcugaagugcuucggcaacaccgccguggccaagugcaacgagaagcacgacgaggaguucugcgacaugcugagacuguucgacuucaacaagcaggccauccagagacugaaggccgaggcccagaugagcauccagcugaucaacaaggccgugaacgcccugaucaacgaccagcugaucaugaagaaccaccugagagacaucaugugcauccccuacugcaacuacagcaaguacugguaccugaaccacaccgugaccggcaagaccagccugcccaagugcuggcuggugagcaacggcagcuaccugaacgagacccacuucagcgacgacaucgagcagcaggccgacaacaugaucaccgagaugcugcagaaggaguacauggagagacagggcaagaccccccugggccugguggaccuguucguguucagcaccagcuucuaccugaucagcaucuuccugcaccuggugaagauccccacccacagacacguggugggcaagcccugccccaagccccacagacugaaccacaugggcaucugcagcugcggcuucuacaagcagcccggcgugcccgugagauggaagagaugaggacuagucccuguucccagagcccacuuuuuuuucuuuuuuugaaauaaaauagccugucuuucagaucucaaaggcucuuuucagagccaccaaaaaaaaaaaaaaaaaaaaaaaaaaaaaaaaaaaaaaaaaaaaaaaaaaaaaaaaaaaaaaaaaaaaaaaaaaaaaaaaaaaaaaaaaaaaaaaaaaaaa

SEQ ID NO: 35204 - RNA, 1748 nt, Artificial Sequence
  mRNA product Design a-1 (hSL-A100) comprising derived and/or modified sequence from LASV(Z0947-SLE-2011;Clade IV)__AIT17840__GPCmut9 (opt4)
aggagagucccgcagucggcguccagcggcucugcuuguucgugugugugucguugcaggccuuauucaagcuuaccaugggccagaucgugaccuucuuccaggaggugccccacgugaucgaggaggugaugaacaucgugcugaucgcccugagcauccuggccgugcugaagggccuguacaacuucgccaccugcggccuggugggccuggugaccuuccugcugcugugcggcagaagcugcaccaucagccuguacaagggcguguacgagcugcagacccuggagcugaacauggagacccugaacaugaccaugccccugagcugcaccaagaacaacagccaccacuacaucauggugggcaacgagaccggccuggagcugacccugaccaacaccagcaucaucaaccacaaguucugcaaccugagcgacgcccacaagaagaaccuguacgaccacgcccugaugagcaucaucagcaccuuccaccugagcauccccaacuucaaccaguacgaggccaugagcugcgacuucaacggcggcaagaucagcgugcaguacaaccugagccacagcuacgccggcgacgccgccaaccacugcggcaccguggccaacggcgugcugcagaccuucaugagaauggccuggggcggcagcuacaucgcccuggacagcggcugcgacagaugggacugcaucaugaccagcuaccaguaccugaucauccagaacaccaccugggaggaccacugccaguucagcagacccagccccaucggcuaccugggccugcugagccagagaaccagagacaucuacaucagcagaagacugcugggcaccuucaccuggacccugagcgacagcgagggcaaggacacccccggcggcuacugccugaccagauggaugcugaucgaggccgagcugaagugcuucggcaacaccgccguggccaagugcaacgagaagcacgacgaggaguucugcgacaugcugagacuguucgacuucaacaagcaggccauccagagacugaaggccgaggcccagaugagcauccagcugaucaacaaggccgugaacgcccugaucaacgaccagcugaucaugaagaaccaccugagagacaucaugugcauccccuacugcaacuacagcaaguacugguaccugaaccacaccaccaccggcaagaccagccugcccaagugcuggcuggugagcaacggcagcuaccugaacgagacccacuucagcgacgacaucgagcagcaggccgacaacaugaucaccgagaugcugcagaaggaguacauggagagacagggcaagaccccccugggccugguggaccuguucguguucagcaccagcuucuaccugaucagcaucuuccugcaccuggugaagauccccacccacagacacaucgugggcaagcccugccccaagccccacagacugaaccacaugggcaucugcagcugcggccuguacaagcagcccggcgugcccgugaaguggaagagaugaggacuagucccuguucccagagcccacuuuuuuuucuuuuuuugaaauaaaauagccugucuuucagaucucaaaggcucuuuucagagccaccaaaaaaaaaaaaaaaaaaaaaaaaaaaaaaaaaaaaaaaaaaaaaaaaaaaaaaaaaaaaaaaaaaaaaaaaaaaaaaaaaaaaaaaaaaaaaaaaaaaaa

SEQ ID NO: 35205 - RNA, 1748 nt, Artificial Sequence
  mRNA product Design a-1 (hSL-A100) comprising derived and/or modified sequence from LASV(Josiah;Clade IV)__NP_694870__GPCmut9 (opt5)
aggagagucccgcagucggcguccagcggcucugcuuguucgugugugugucguugcaggccuuauucaagcuuaccaugggccagaucgugaccuucuuucaagaggucccccacguuauugaagaggugaugaacaucgugcugauugcccucagcguccuggcugugcuuaaggggcuguacaauuucgccacaugcggacucguuggccuggugacguuucuucugcucugugggagauccugcaccacaucucuguauaaaggagucuacgaacugcagacccucgagcugaacauggaaacacuuaauaugaccaugccucugagcuguacaaagaacaauucccaucacuauaucauggugggcaacgagaccgggcucgagcugacgcuuaccaauacaucuauuaucaaccauaaauucugcaaucugagcgacgcgcacaagaaaaaccucuacgaucaugcucugauguccaucauuucuaccuuucaccugagcaucccgaauuucaaccaguaugaagccauguccugugacuuuaauggaggcaagauuagcguucaguacaaccucucucacuccuaugccggcgaugcugccaaucauugcgggacaguggcuaacggaguccugcaaaccuucaugcggauggccuggggcgggagcuacaucgcgcuugacucuggauguggcaacugggauugcauuaugacguccuaccaguaucugaucauucagaauacaaccugggaggaccacugucaguuuagccgccccucuccuaucggguaccucggacugcuuucccaaagaacacgggauaucuauauuagccgcagacugcucggcaccuucaccuggacacuguccgacucugaaggcaaggauacgcccgggggauacugccugacccgguggaugcucaucgaggccgagcugaaauguuuuggcaacacagcuguggccaagugcaaugaaaaacaugacgaggaguucugcgauaugcuucgccuguuugacuucaacaagcaggcuauucagagacucaaagccgaagcgcagaugagcauccaacugauuaauaaggccgugaacgcucuuaucaaugaucagcugaucaugaagaaccaccuccgggacauuauguguaucccuuauugcaauuacuccaaauauugguaccugaaccacaccacaaccgggcgcacgagccugcccaaguguuggcucgucucuaauggauccuaccugaacgaaacacauuucagcgacgauauugagcagcaagccgacaauaugaucaccgagaugcuucagaaagaauauauggagagacagggcaagaccccucuggggcucguugaucuguuuguguucucuaccagcuuuuaccugauuuccaucuuccuucaccucgugaaaaucccgacacaucggcacauugucggaaagucuugccccaaaccucaucgccugaaccacaugggcaucuguagcugcggccuguauaagcagcccggggugccuguuaaguggaaaagaugaggacuagucccuguucccagagcccacuuuuuuuucuuuuuuugaaauaaaauagccugucuuucagaucucaaaggcucuuuucagagccaccaaaaaaaaaaaaaaaaaaaaaaaaaaaaaaaaaaaaaaaaaaaaaaaaaaaaaaaaaaaaaaaaaaaaaaaaaaaaaaaaaaaaaaaaaaaaaaaaaaaaa

SEQ ID NO: 35206 - RNA, 1745 nt, Artificial Sequence
  mRNA product Design a-1 (hSL-A100) comprising derived and/or modified sequence from LASV(LP;Clade I)__AAF86701__GPCmut9 (opt5)
aggagagucccgcagucggcguccagcggcucugcuuguucgugugugugucguugcaggccuuauucaagcuuaccaugggccagaucauuaccuucuuucaagaggugccccacgucaucgaagagguuaugaacauugugcugaucgcccucagccugcuugcuauucugaaggggcucuacaauaucgccacaugcggaaucauuggccugguggcguuccuuuuucugugugggaaauccugcucucucacgcugaagggaggcuaugaacugcagacccucgagcugaacauggaaacacuuaauaugaccaugccucugagcuguaccaaaaacuccucucaucacuacaucagagucgggaaugagacaggacucgagcugacacuuaccaacacgagcauuaucaaucauaaguucugcaaccuguccgacgcucacaaaaagaaucucuaugaucaugcccugaugucuauuaucagcaccuuucaccuguccauuccgaacuucaaucaguacgaagccaugagcugugacuuuaacggcggcaagaucucugugcaguauaaucucucccacagcuacgcuggggaugccgcugagcauugcggaacaguugccaacggcgugcugcaaaccuucaugcggauggcguggggagggcgcuauaucgcccuugacucuggcugugggaauugggauugcauuaugacauccuaccaguaccugaucauucagaacaccacgugggaagaccacugucaguuuagcagacccucuccuaucggauaucucggccugcuuucccaacggacacgcgauauuuacaucagcagacggcugcucggcaccuucacauggacccuguccgacucugaggggaacgagacccccggaggcuauugccugacacgcuggaugcucaucgaagcugagcugaaauguuuugggaauacggccgucgcuaagugcaacgaaaaacaugaugaggaguucugcgacaugcuuagacuguuugauuucaauaagcaggccauucggcgccucaaagcggaagcccagaugagcauccagcugauuaacaaggcugugaaugcccuuaucaacgaccaacugauuaugaagaaucaccucagagauaucauguguaucccuuacugcaacuauuccaaauacugguaucugaaucacaccagcucuggacggacaucccugcccaaguguuggcucauuagcaacggcucuuaccugaaugagacccaguucagcgacgacaucgaacagcaagcugauaacaugauuacagagaugcuucagaaagaauacaucgagcgccaggggaagaccccucugggacucguugacauuuuuaucuucuccacgucuuuuuaucugauuagcaucuuccugcaucuuaucaaaauuccgacacacagacauaucgugggcaagcccugcccuaaaccccaccggcucaaucauaugggcgucuguuccugcgggcuguacaagcacccuggagugcccaccaaguggaaacgcugaggacuagucccuguucccagagcccacuuuuuuuucuuuuuuugaaauaaaauagccugucuuucagaucucaaaggcucuuuucagagccaccaaaaaaaaaaaaaaaaaaaaaaaaaaaaaaaaaaaaaaaaaaaaaaaaaaaaaaaaaaaaaaaaaaaaaaaaaaaaaaaaaaaaaaaaaaaaaaaaaaaaa

SEQ ID NO: 35207 - RNA, 1745 nt, Artificial Sequence
  mRNA product Design a-1 (hSL-A100) comprising derived and/or modified sequence from LASV(803213;Clade II)__AAF86703__GPCmut9 (opt5)
aggagagucccgcagucggcguccagcggcucugcuuguucgugugugugucguugcaggccuuauucaagcuuaccaugggccagaucauuaccuucuuucaagaggugccccacgucaucgaagagguuaugaacauugugcugaucgcccucagccugcuugcuauucugaaggggaucuacaauguggccacaugcggacucuucggccugaucuccuuucuucugcucugugggagaucuugcagcgucacguauaaaggaguguacgaacugcagacccuggagcucaacauggcgaaucugaacaugacaaugccucuuuccuguaccaagaauaacucucaucacuauauuaugguuggcaaugaaacagggcuggagcucacccugacaaacaccagcaucauuaaucauaaauucugcaaccuuuccgacgcucacaagaaaaaucuguacgaucaugcccucaugucuaucauuagcacguuucaccuguccaucccgaacuucaaucaguaugaggccaugagcugugacuuuaacggaggcaagauuucugugcaguacaaucugucccacagcuucgcugucgaugccgcuaaccauugcggcaccaucgccaacggggugcuccaaacauuuaugcggauggcguggggaggcucuuauaucgcccuggacuccggguguggaaauugggauugcauuaugaccagcuaccaguaccuuaucauucagaacacaaccugggaagaccacugucaguucucucgccccuccccuaucggcuaucuggggcuccugagccaaagaacgcgggauauuuacaucucccgcagacuucugggaacauuuaccuggacacucucugacagcgagggcaaugaagcucccggcggguauugccugacccgguggaugcugaucgaggccgagcucaaguguuucggaaacaccgcuguugccaaaugcaaugaaaagcaugaugaggaauuuugcgacaugcugcgccuuuucgauuucaacaaacaggcgauuaagagacugaaaacagaggcccagauguccauccagcucauuaauaaggcugugaacgcccugaucaaugaccaacuuauuaugaagaaccaucugcgggauaucauguguaucccuuacugcaauuauagccgcuacugguaucucaaccacacggucaccggcaaaacaucucugcccagauguuggcugguguccaaugggagcuaccucaacgaaacccacuuuucugacgacauugagcagcaggcugauaauaugaucacagagaugcugcaaaaggaauacauggaccggcagggaaaaaccccucuuggccugguggaucucuucgucuuuagcacguccuucuaucugauuucuaucuuucugcaccuuguuaagauuccgacacaucgccacaucguggggaaacccugcccuaagccccauagacucaaccacaugggaauuuguagcugcggccuguacaaacacccuggcgugcccgucaaguggaagcggugaggacuagucccuguucccagagcccacuuuuuuuucuuuuuuugaaauaaaauagccugucuuucagaucucaaaggcucuuuucagagccaccaaaaaaaaaaaaaaaaaaaaaaaaaaaaaaaaaaaaaaaaaaaaaaaaaaaaaaaaaaaaaaaaaaaaaaaaaaaaaaaaaaaaaaaaaaaaaaaaaaaaa

SEQ ID NO: 35208 - RNA, 1745 nt, Artificial Sequence
  mRNA product Design a-1 (hSL-A100) comprising derived and/or modified sequence from LASV(GA391;Clade III)__CAA36645__GPCmut9 (opt5)
aggagagucccgcagucggcguccagcggcucugcuuguucgugugugugucguugcaggccuuauucaagcuuaccaugggccagaucgugaccuucuuucaagaggucccccacguuauugaagaggugaugaacaucgugcugauugcccucagcauccuggcuauucuuaaggggcuguacaaugucgccacaugcggacucaucggccuggugacguuccuucugcucuccgggagaucuuguagccugaucuauaaaggaaccuacgaacugcagacacucgagcugaacauggaaacccuuaauaugacaaugccucuguccugcaccaagaacaauucucaucacuauauucggguuggcaacgagacagggcucgagcugacccuuacgaauaccagcauccugaaccauaaauuuuguaaucucuccgacgcgcacaagcgcaaccuguacgaucauucucugaugagcauuaucuccacauuccaccucagcauuccgaauuuuaaccaguaugaagcuaugucuugcgacuucaauggaggcaaaaucaccgugcaguacaaccugucccacagcuuugccgucgaugccgcuggccauugugggacacuugccaauggagugcugcaaaccuucaugagaauggcuuggggcgggucuuauauugcccucgacuccggaugcggcaacugggauuguaucaugacgagcuaccaguaccugaucauucagaacacaaccugggacgaucacugccaguuuucucggcccuccccuaucggguaucuuggacugcucagccaacgcacaagagacauuuacaucucccggcgccugcugggcaccuucaccuggacacucucugauagcgagggcaaugaaacgcccgggggauauugucugaccagauggaugcuuauugaggcggagcugaagugcuuuggcaacacagccguugcuaaguguaaugaaaaacaugacgaggaguucugcgauaugcuccggcuguuugacuucaacaagcaggccauccgcagacuuaaaaccgaagcucagauguccauccagcugauuaauaaggccgugaacgcgcucaucaaugaucaacugauuaugaaaaaccaucugcgggacaucaugugcauuccuuacuguaauuauagccgcuacugguaucucaaccacacaucuaccgggaagacgucccugcccagaugcuggcuuaucagcaauggaucuuaccugaacgaaacaaaguucagcgacgauaucgagcagcaggccgacaauaugauuaccgagaugcuccaaaaagaauacaucgaucggcagggcaagaccccucuggggcuggucgaccuuuuuguguucuccacaucuuuuuaucucauuagcaucuuccugcaccuggugaaaauuccgacccaccgccauaucgucggaaagcccuguccuaaaccccacagacucaaccauaugggcauuugcuccuguggccuguacaagcagccugggguucccgugcgguggaaaagaugaggacuagucccuguucccagagcccacuuuuuuuucuuuuuuugaaauaaaauagccugucuuucagaucucaaaggcucuuuucagagccaccaaaaaaaaaaaaaaaaaaaaaaaaaaaaaaaaaaaaaaaaaaaaaaaaaaaaaaaaaaaaaaaaaaaaaaaaaaaaaaaaaaaaaaaaaaaaaaaaaaaaa

SEQ ID NO: 35209 - RNA, 1748 nt, Artificial Sequence
  mRNA product Design a-1 (hSL-A100) comprising derived and/or modified sequence from LASV(AV;Clade V)__CCA30314__GPCmut9 (opt5)
aggagagucccgcagucggcguccagcggcucugcuuguucgugugugugucguugcaggccuuauucaagcuuaccaugggccagaucgugaccuucuuucaagaggucccccacguuauugaagaggugaugaacaucgugcugauugcccucagcauccuggcuguccuuaaggggcuguacaauauugccacaugcggacucaucggccugaucacguuccuucugcucugugggagauccugcucuagcaaccuguauaaaggaguguacgaacugcagucccucgaccugaauauggagacccuuaacaugacaaugccucugucuuguaccaagaauaacagccaucacuauauucggguuggcaaugauacagggcucgaacugacccuuacaaacaccuccauccugaaucauaaauuuugcaaccucucugacgcgcacaagaaagaucuguacgaccaugcucugaugagcauuaucuccacguuccaccucagcauuccgaauuuuaaccaguaugaggccaugucuugugauuucaauggaggcaagaucuccgugcaguacaaccugagccacucuuaugccauugacgcugccaaucauugcggcaccgucgcuaacgggauccuucaaacauuuaugcgcauggccuggggaggcuccuacaucgcgcuggauagcggguguggaaacugggacugcauuaugaccucuuaccaguaucucaucauucagaauacaaccugggagaaccacugucaguucuccagacccagcccuaucggcuaccuggggcuucugucccaacggacgcgcgauauuuauaucucuagacggcuccugggaacauuuaccuggacacugagcgacuccgaaggcaaugccacccccggcggguacugccucacccgcuggaugcugaucgaggcugaacuuaaguguuucggaaacacagccguggcuaaaugcaaugagaagcaugaugaggaauuuugcgacaugcugagacucuucgauuuuaacaaacaggccauuagccggcugaagucugaggcgcagauguccauccagcuuauuaauaaagccguuaacgcucugaucaaugaccaacucauuaugaagaaccaucugcgcgacaucauguguaucccuuauugcaauuacagcaaguauugguaccugaaccacacgauuaccggcaaaacaucucuccccaaguguuggcuggugagcaauggguccuaccuuaacgaaacccacuucucugaugacaucgagcagcaggccgauaauaugauuacagaaaugcugcaaaaagaguauauggagagacagggaaagaccccucucggccuggucgaccuguucguguuuagcacguccuucuaccuuaucagcauuuuucuccggcuggugaaaaucccgacacaccgccauauugucgggaagcccugcccuaaaccccacagacugaaccauaugggaaucuguucuugcggccucuauaagcagccuggcguucccgugcgguggaagcgcugaggacuagucccuguucccagagcccacuuuuuuuucuuuuuuugaaauaaaauagccugucuuucagaucucaaaggcucuuuucagagccaccaaaaaaaaaaaaaaaaaaaaaaaaaaaaaaaaaaaaaaaaaaaaaaaaaaaaaaaaaaaaaaaaaaaaaaaaaaaaaaaaaaaaaaaaaaaaaaaaaaaaa

SEQ ID NO: 35210 - RNA, 1745 nt, Artificial Sequence
  mRNA product Design a-1 (hSL-A100) comprising derived and/or modified sequence from LASV(Togo/2016/7082;Clade VI)__AMR44577__GPCmut9 (opt5)
aggagagucccgcagucggcguccagcggcucugcuuguucgugugugugucguugcaggccuuauucaagcuuaccaugggccagaucauuaccuucuuucaagaggugccccacgucaucgaagagguuaugaacauugugcugaucgcccucagccugcuugcuauucugaaggggguguacaaugucgccacaugcggaaucaucggccucgugacguuccuguuucuuugugggagauccugcucucugauuuauaaaggaagcuacgaacuccagacccuggagcugaacauggaaacacucaauaugaccaugccucuguccuguacaaagaacucuagccaucacuauauccggguuggcaaugagaccgggcuugagcugacacucaccaacacguccauuaucaaucauaaauucugcaaccugucugacgcgcacaagcgcaaucuuuacgaucaugcucugaugagcauucucuccaccuuucaccugagcaucccgaacuucaaucaguaugaagccaugucuugugacuuuaacggaggcaaaauuuccgugcaguacaaucugagccacgccuaugcugucgaugccgcugagcauugcggcacaguggccaacgggguucuccaaaccuucaugagaauggcguggggaggcucuuacaucgcccuggacuccggguguggaaauugggauugcaucaugacaagcuaccaguaucuuauuauccagaacaccacgugggaagaccacugucaguuuucucggcccuccccuauuggcuaccuggggcuccugagccaacgcacaagagauaucuauauuucccggcgccuucugggaaccuucacauggacccucucugacagcgagggcaacgagacccccggcggguacugccugacaagauggaugcugaucgaagcugagcucaaguguuuuggaaauacggccguggcuaagugcaacgaaaaacaugaugaggaguucugcgacaugcugcggcuuuuugauuucaauaagcaggccauccagcgccugaaauccgaagcgcagaugagcauucaacucaucaacaaggccgucaaugcucugauuaacgaccagcuuaucaugaaaaaucaccugagagauaugauguguauuccuuauugcaacuacucuaaguauugguaccucaaucacaccuccagcggccggacaucucugcccaaguguuggcuggugagcaacggguccuaccucaaugagacccauuucucugacgacaucgaacagcaagccgauaacaugaucacagagaugcugcagaaagaauauauugaccgccagggaaagaccccucuuggccugguggaucucuuugucuucagcacguccuuuuaccugaucagcauuuuccugcaccuuaucaaaauuccgacacauagacacaucguugggaagcccugcccuaaaccccaucggcucaaucacaugggaauuuguucuugcggccuguauaagcagccuggcgugcccacccgcuggaaaagaugaggacuagucccuguucccagagcccacuuuuuuuucuuuuuuugaaauaaaauagccugucuuucagaucucaaaggcucuuuucagagccaccaaaaaaaaaaaaaaaaaaaaaaaaaaaaaaaaaaaaaaaaaaaaaaaaaaaaaaaaaaaaaaaaaaaaaaaaaaaaaaaaaaaaaaaaaaaaaaaaaaaaa

SEQ ID NO: 35211 - RNA, 1745 nt, Artificial Sequence
  mRNA product Design a-1 (hSL-A100) comprising derived and/or modified sequence from LASV(KAK-428;Clade n.d. (VII))__ANH09740__GPCmut9 (opt5)
aggagagucccgcagucggcguccagcggcucugcuuguucgugugugugucguugcaggccuuauucaagcuuaccaugggccagaucgugaccuucuuucaagaggucccccacguuauugaagaggugaugaacaucgugcugauugcccucagccugcuugcuauccugaaggggcucuacaauuucgccacaugcggagucauuggccugaucacguuucuucugcucugugggagauccugcucugcgaccuauaaaggacaguacgaacugcagacacuggagcucaacauggaaagccugaauaugaccaugccucuuuccuguacaaagaacaauucucaucacuauauccgggcuggcaacaauaccgggcuggagcucacacugaccaacacgagcauuaucucccauaaauucugcaaucuuucugacgcccacaagaaaaaccuguacgaucauacccucaugagcauuaucacaaccuuucaccuguccauuccgaauuucaaccaguaugaggccaugagcugugacuuuaauggaggcaagaucucuauucaauacaaccugucccacagcuaugcuggcgaugccgcucagcauugcgggacaguggccaauggaguucuccagaccuucaugcgcauggcguggggcgggucuuaccuggcccuugacuccggauguagaggcugggauugcaucaucagcucuuaccaguaucugauuauccaaaacacgacaugggacgaucacugucaguuuucccggcccagcccuauuggguaccucggauucgugucccagaagacccgcgacaucuauauuucuagacggcugcuuggcacauuuaccuggacccugagcgauuccgaaggccaugacaugcccgggggauacugccucacacgcuggaugcugaucgaggcugaucugaaauguuucggcaacacggccgucgcuaagugcaaugaaaaacacgacgaggaguuuugcgauauguggagacucuucgacuucaacaagcaggccauccaacggcugaaagcggaagcccagaugaauauucagcuuaucaacaaggcugugaaugcccugauuaacgaccaacucaugaugaagaaucaucugcgcgauaucauguguauuccuuauugcaacuacagcaaauuuugguaucuuaauaacaccacaaccgggagaacaucucugccccgguguuggcucaucuccaauggaagcuaccugaacgagacccacuucucugacgauaucgaacagcaggcugacaauaugauuacggagaugcugcagaaggaauacauggaucgccaaggcaaaacaccucucgggcugguugaccuuuuuguguucagcaccuccuuuuaucugaucaccauuuuccuccaccuggucaagaucccgacacauagacacauugugggaaaacccugcccuaagccccaucggcugaaccacaugggcaucuguucuugcggccuuuacaaacagccuggggugcccguccgcuggaagagaugaggacuagucccuguucccagagcccacuuuuuuuucuuuuuuugaaauaaaauagccugucuuucagaucucaaaggcucuuuucagagccaccaaaaaaaaaaaaaaaaaaaaaaaaaaaaaaaaaaaaaaaaaaaaaaaaaaaaaaaaaaaaaaaaaaaaaaaaaaaaaaaaaaaaaaaaaaaaaaaaaaaaa

SEQ ID NO: 35212 - RNA, 1745 nt, Artificial Sequence; identical to SEQ ID NO: 35206
  mRNA product Design a-1 (hSL-A100) comprising derived and/or modified sequence from LASV(Pinneo-NIG-1969;Clade I)__AIT17836__GPCmut9 (opt5)

SEQ ID NO: 35213 - RNA, 1745 nt, Artificial Sequence
  mRNA product Design a-1 (hSL-A100) comprising derived and/or modified sequence from LASV(ISTH0009-NIG-2011;Clade II)__AIT17404__GPCmut9 (opt5)
aggagagucccgcagucggcguccagcggcucugcuuguucgugugugugucguugcaggccuuauucaagcuuaccaugggccagaucauuaccuucuuucaagaggugccccacgucaucgaagagguuaugaacauugugcugaucgcccucagccugcuugcuauucugaaggggaucuacaauguggccacaugcggacucuucggccuggucuccuuucuucugcucugugggagaucuugcagcacgaccuauaaaggaguguacgaacugcagacacuggagcucgacauggcgucccugaacaugaccaugccucuuucuuguacaaagaauaacagccaucacuauaucaugguuggcaaugaaaccgggcuggagcucacacugaccaacacguccauuaucaaucauaaauucugcaaccuuucugaugcucacaagaaaaaucuguacgaccaugcccucaugagcauuaucuccaccuuucaccugagcauuccgaacuucaaucaguaugaggccaugucuugugauuuuaacggaggcaagaucuccgugcaguacaaucugagccacgcuuaugccgucgacgcugccaaccauugcggcacaauugcgaauggggugcuccaaaccuucaugcggauggccuggggaggcucuuacaucgcucuggauuccggguguggaagcugggacugcaucaugacaucuuaccaguaucuuauuauccagaacaccacgugggaagaucacugucaguuuucccgccccagcccuauuggcuaccuggggcuccugucccaaagaacacgggacaucuauauuucucgcagacuucugggaaccuucacauggacccucagcgauuccgagggcaacgaaacccccggcggguacugccugacacgguggaugcugaucgaggccgagcucaaguguuuuggaaauacggcuguugccaaaugcaacgaaaagcaugacgaggaguucugcgauaugcugcgccuuuuugacuucaauaaacaggcgaucagacggcugaagaccgaagcccagaugagcauucagcucaucaacaaagcugugaaugcccugauuaacgaucaacuuaucaugaagaaucaucugcgcgacauuauguguaucccuuauugcaacuacucuaaguauugguaccucaaucacacagucaccggcaaaacaucccugcccagauguuggcuggugagcaacgggucuuaccucaaugaaacccacuucagcgacgauaucgagcagcaggcugacaacaugauuacggagcugcuucaaaaggaauauauggaucggcagggaaaaacaccucugggccucguggaccuguuugucuucuccaccucuuuuuaccugaucagcauuuuccuucaccucaucaagauuccgacccaucgccacaucacagggaaacccugcccuaagccccauagacugaaucacaugggaauuuguuccugcggccuguauaaacacccuggcguucccgugaaguggaagcggugaggacuagucccuguucccagagcccacuuuuuuuucuuuuuuugaaauaaaauagccugucuuucagaucucaaaggcucuuuucagagccaccaaaaaaaaaaaaaaaaaaaaaaaaaaaaaaaaaaaaaaaaaaaaaaaaaaaaaaaaaaaaaaaaaaaaaaaaaaaaaaaaaaaaaaaaaaaaaaaaaaaaa

SEQ ID NO: 35214 - RNA, 1745 nt, Artificial Sequence
  mRNA product Design a-1 (hSL-A100) comprising derived and/or modified sequence from LASV(ISTH2010-NIG-2012;Clade II)__AIT17482__GPCmut9 (opt5)
aggagagucccgcagucggcguccagcggcucugcuuguucgugugugugucguugcaggccuuauucaagcuuaccaugggccagaucauuaccuucuuucaagaggugccccacgucaucgaagagguuaugaacauugugcugaucgcccucagccugcuugcuauucugaaggggaucuacaauguggccacaugcggacucuucggccuggucuccuuucuucugcucugugggagaucuugcagcacgaccuauaaaggaguguacgaacugcagacacuggagcucgacauggcgucccugaacaugaccaugccucuuucuuguacaaagaauaacagccaucacuauaucaugguuggcaaugaaaccgggcuggagcucacacugaccaacacguccauuaucaaucauaaauucugcaaccuuucugaugcucacaagaaaaaucuguacgaccaugcccucaugagcauuaucuccaccuuucaccugagcauuccgaacuucaaucaguaugaggccaugucuugugauuuuaacggaggcaagaucuccgugcaguacaaucugagccacgcuuaugccgucgacgcugccaaccauugcggcacaauugcgaauggggugcuccaaaccuucaugcggauggccuggggaggcucuuacaucgcucuggauuccggguguggaagcugggacugcaucaugacaucuuaccaguaucuuauuauccagaacauuaccugggaagaucacugucaguuuucccgccccagcccuaucggcuaccuggggcuccugucccaaagaacgcgggacauuuauaucucucgcagacuucugggaacauucaccuggacacucagcgauuccgagggcaacgaaacccccggcggguacugccugacccgguggaugcugaucgaggccgagcucaaguguuuuggaaauacagcuguugccaaaugcaacgaaaagcaugacgaggaguucugcgauaugcugcgccuuuuugacuucaauaaacaggcgauuagacggcugaagacggaagcccagaugagcauccagcucauuaacaaagcugugaaugcccugaucaacgaucaacuuauuaugaagaaucaucugcgcgacaucauguguaucccuuauugcaacuacucuaaguauugguaccucaaucacaccgucacaggcaaaaccucccugcccagauguuggcuggugagcaacgggucuuaccucaaugaaacacacuucagcgacgauauugagcagcaggcugacaacaugaucaccgagcugcuucaaaaggaauauauugaucggcagggaaaaacgccucugggccucguggaccuguuugucuucuccacaucuuuuuaccugaucagcauuuuccuucaccucguuaagaucccgacccaucgccacgugguggggaaacccugcccuaagccccauagacugaaucacaugggaauuuguuccugcggccuguauaaacacccuggcguccccgugaaguggaagcggugaggacuagucccuguucccagagcccacuuuuuuuucuuuuuuugaaauaaaauagccugucuuucagaucucaaaggcucuuuucagagccaccaaaaaaaaaaaaaaaaaaaaaaaaaaaaaaaaaaaaaaaaaaaaaaaaaaaaaaaaaaaaaaaaaaaaaaaaaaaaaaaaaaaaaaaaaaaaaaaaaaaaa

SEQ ID NO: 35215 - RNA, 1745 nt, Artificial Sequence
  mRNA product Design a-1 (hSL-A100) comprising derived and/or modified sequence from LASV(Lassa virus/H.sapiens-wt/NGA/2015/ISTH_0543;Clade II)__AVO03639__GPCmut9 (opt5)
aggagagucccgcagucggcguccagcggcucugcuuguucgugugugugucguugcaggccuuauucaagcuuaccaugggccagaucauuaccuucuuucaagaggugccccacgucaucgaagagguuaugaacauugugcugaucgcccucagccugcuugcuauucugaaggggaucuacaauguggccacaugcggacucuucggccuggucuccuuucuucugcucugugggagaucuugcagcacgaccuauaaaggaguguacgaacugcagacacuggagcucgacauggcgaaccugaauaugaccaugccucuuuccuguacaaagaacaauucucaucacuauaucaugguuggcaacgaaaccgggcuggagcucacacugaccaauacgagcauuaucaaccauaaauucugcaaucuuuccgaugcucacaagaaaaaccuguacgaccaugcccucaugucuauuaucagcaccuuucaccuguccauuccgaauuucaaccaguaugaggccaugagcugugauuuuaauggaggcaagaucucugugcaguacaaccugucccacacauaugcugucgacgccgcuaaucauugcggcaccauugccaacggggugcuccaaacauucaugcggauggcguggggaggcagcuacaucgcccuggauucuggguguggauccugggacugcaucaugaccagcuaccaguaucuuguuauucagaacacgacaugggaagaucacugucaguuuucucgccccuccccuaucggcuaccuggggcuccugagccaaagaacccgggacauuuauaucucccgcagacuucugggaacauucaccuggacccucucugauagcgagggcaaugaaacacccggcggguacugccugacgcgguggaugcugauugaggcugagcucaaguguuuuggaaacaccgccguggcuaaaugcaaugaaaagcaugacgaggaguucugcgauaugcugcgccuuuuugacuucaacaaacaggccaucagacggcugaagacagaagcgcagauguccauccagcucauuaauaaagccgucaacgcucugaucaaugaucaacuuauuaugaagaaccaucugcgcgacaucauguguauuccuuauugcaauuacagcaaguauugguaccucaaccacaccgugacaggcaaaaccucucugcccagauguuggcugguguccaaugggagcuaccucaacgaaacgcacuucucugacgauaucgagcagcaggccgacaauaugaucacagagcugcuucaaaaggaauauauugaucggcagggaaaaaccccucugggccucgucgaccuguuuguuuucagcaccuccuuuuaccugaucucuauuuuccuucaccucgugaagaucccgacacaucgccacauuaccgggaaacccugcccuaagccccauagacugaaccacaugggaaucuguagcugcggccuguauaaacacccuggcgugcccgucaaguggaagcggugaggacuagucccuguucccagagcccacuuuuuuuucuuuuuuugaaauaaaauagccugucuuucagaucucaaaggcucuuuucagagccaccaaaaaaaaaaaaaaaaaaaaaaaaaaaaaaaaaaaaaaaaaaaaaaaaaaaaaaaaaaaaaaaaaaaaaaaaaaaaaaaaaaaaaaaaaaaaaaaaaaaaa

SEQ ID NO: 35216 - RNA, 1745 nt, Artificial Sequence
  mRNA product Design a-1 (hSL-A100) comprising derived and/or modified sequence from LASV(Lassa virus/H.sapiens-wt/NGA/2016/ISTH_0009;Clade II)__AVO03571__GPCmut9 (opt5)
aggagagucccgcagucggcguccagcggcucugcuuguucgugugugugucguugcaggccuuauucaagcuuaccaugggccagaucauuaccuucuuucaagaggugccccacgucaucgaagagguuaugaacauugugcugaucgcccucagccugcuugcuauucugaaggggaucuacaauguggccacaugcggacuccugggccuugucuccuuccugcuccugugugggagaucuugcagcacgaccuauaaaggaguguacgaacugcagacacucgagcuggacauggcgucccuuaacaugaccaugccucugucuuguacaaagaauaacagccaucacuauaucaugguuggcaaugaaaccgggcucgagcugacacuuaccaacacguccauuaucaaucauaaauuuugcaaccugucugaugcucacaagaaaaaucucuacgaccaugcccugaugagcauuaucuccaccuuccaccugagcauuccgaacuuuaaucaguaugaggccaugucuugugauuucaacggaggccggaucuccgugcaguacaaucucagccacucuuaugcugucgacgccgcuaaccauugcggcacaauugccaauggggugcugcaaaccuuuaugcgcauggcguggggaggcuccuacaucgcccuugauagcggguguggaucuugggacugcaucaugacauccuaccaguaucugauuauccagaacaccacgugggaagaucacugucaguucagcagacccuccccuauuggcuaccucgggcugcuuucucaacggacacgcgacaucuauauuagcagacggcugcucggaaccuuuacauggacccuguccgauagcgagggcaacgaaacccccggcggguacugccugacacgcuggaugcucaucgaggcugagcugaaguguuucggaaauacggccguugcuaagugcaacgaaaaacaugacgaggaauuuugcgauaugcuuagacuguucgacuuuaauaagcaggccauccggcgccucaaaaccgaggcgcagaugucuauucagcugaucaacaaggccgugaaugcucuuauuaacgaucaacugaucaugaaaaaucaccucagagacauuauguguaucccuuauugcaacuacuccaaguauugguaccugaaucacacagucaccggcaagacaagccugccccgguguuggcucgugucuaacgggagcuaccugaaugaaacccauuucuccgacgauaucgagcagcaggccgacaacaugauuacggagcuucugcaaaaagaauauaucgaucgccagggaaagacaccucucggccugguggaccuguucgucuuuucuaccagcuucuaccuuauuuccaucuuucuccaccugguuaaaauuccgacccauagacacaucacagggaagcccugcccuaaaccccaucggcugaaucacaugggaauuuguagcugcggccucuauaaccacccuggcgugcccgugaaguggaaacgcugaggacuagucccuguucccagagcccacuuuuuuuucuuuuuuugaaauaaaauagccugucuuucagaucucaaaggcucuuuucagagccaccaaaaaaaaaaaaaaaaaaaaaaaaaaaaaaaaaaaaaaaaaaaaaaaaaaaaaaaaaaaaaaaaaaaaaaaaaaaaaaaaaaaaaaaaaaaaaaaaaaaaa

SEQ ID NO: 35217 - RNA, 1745 nt, Artificial Sequence
  mRNA product Design a-1 (hSL-A100) comprising derived and/or modified sequence from LASV(Lassa virus/H.sapiens-wt/NGA/2016/ISTH_0017;Clade II)__AVO03567__GPCmut9 (opt5)
aggagagucccgcagucggcguccagcggcucugcuuguucgugugugugucguugcaggccuuauucaagcuuaccaugggccagaucauuaccuucuuucaagaggugccccacgucaucgaagagguuaugaacauugugcugaucgcccucagccugcuugcuauucugaaggggaucuacaauguggccacaugcggacucuucggccuggucuccuuucuucugcucugugggagaucuugcagcacgaccuauaaaggaguguacgaacugcagacacuggagcucgacauggcgucccugaacaugaccaugccucuuucuuguacaaagaauaacagccaucacuauaucaugguuggcaaugaaaccgggcuggagcucacacugaccaacacguccauuaucaaucauaaauucugcaaccuuucugaugcucacaagaaaaaucuguacgaccaugcccucaugagcauuaucuccaccuuucaccugagcauuccgaacuucaaucaguaugaggccaugucuugugauuuuaacggaggcaagaucuccgugcaguacaaucugagccacacauaugcuauugacgccgcuaaccauugcggcaccaucgccaaugggguccuccaaacauucaugcggauggcguggggaggcucuuacaucgcccuggauuccggguguggaagcugggacugcauuaugaccucuuaccaguaucuuaucauucagaacacgacaugggaagaucacugucaguuuucccgccccagcccuaucggcuaccuggggcuccugucccaaagaacccgggacauuuauaucucucgcagacuucugggaacauucaccuggacccucagcgauuccgagggcaacgaaacacccggcggguacugccugacgcgguggaugcugaucgaggcugagcucaaguguuuuggaaauaccgccguggcuaaaugcaacgaaaagcaugacgaggaguucugcgauaugcugcgccuuuuugacuucaauaaacaggccauuagacggcugaagacagaagcgcagaugagcauccagcucauuaacaaagccguuaaugcucugaucaacgaucaacuuauuaugaagaaucaucugcgcgacaucauguguaucccuuauugcaacuacucuaaguauugguaccucaaucacaccgugacaggcaaaaccucccugcccagauguuggcuggucagcaacgggucuuaccucaaugaaacgcacuucagcgacgauauugagcagcaggccgacaacaugaucacagagcugcuucaaaaggaauauauggaucggcagggaaaaaccccucugggccucguggaccuguuuguguucuccaccucuuuuuaccugauuagcaucuuccuucaccucguccgcauuccgacacauagacacguuaucgggaagcccugcccuaaaccccaucggcugaaucacaugggaauuuguuccugcggccuguauaagcacccuggcgugcccgugaaauggaagcgcugaggacuagucccuguucccagagcccacuuuuuuuucuuuuuuugaaauaaaauagccugucuuucagaucucaaaggcucuuuucagagccaccaaaaaaaaaaaaaaaaaaaaaaaaaaaaaaaaaaaaaaaaaaaaaaaaaaaaaaaaaaaaaaaaaaaaaaaaaaaaaaaaaaaaaaaaaaaaaaaaaaaaa

SEQ ID NO: 35218 - RNA, 1745 nt, Artificial Sequence
  mRNA product Design a-1 (hSL-A100) comprising derived and/or modified sequence from LASV(Lassa virus/H.sapiens-wt/NGA/2018/ISTH_0959;Clade II)__AVV65099__GPCmut9 (opt5)
aggagagucccgcagucggcguccagcggcucugcuuguucgugugugugucguugcaggccuuauucaagcuuaccaugggccagaucauuaccuucuuucaagaggugccccacgucaucgaagagguuaugaacauugugcugaucgcccucagccugcuugcuauucugaaggggaucuacaauguggucacaugcggacucuucggccugguguccuuucuucugcucugugggagaucuugcagcacgaccuauaaaggaguuuacgaacugcagacacuggagcucgacauggccucccugaacaugaccaugccucuuucuuguacaaagaauaacagccaucacuauaucauggugggcaaugaaaccgggcuggagcucacacugaccaacacguccauuaucaaucauaaauucugcaaccuuucugaugcgcacaagaaaaaucuguacgaccaugcucucaugagcauuaucuccaccuuucaccugagcauuccgaacuucaaucaguaugaggccaugucuugugauuuuaacggaggcaagaucuccguccaguacaaucugagccacgccuaugcuauugacgccgcuaaccauugcggcacaaucgccaauggggugcuccaaaccuucaugcggauggcguggggaggcucuuacaucgcccuggauuccggguguggaagcugggacugcauuaugacaucuuaccaguaucuuaucauucagaacaccacgugggaagaucacugucaguuuucccgccccagcccuaucggcuaccuggggcuccugucccaaagaacacgggacauuuauaucucucgcagacuucugggaaccuucacauggacccucagcgauuccgagggcaacgaaacccccggcggguacugccugacacgguggaugcugaucgaggcugagcucaaguguuuuggaaauacggccguugcuaaaugcaacgaaaagcaugacgaggaguucugcgauaugcugcgccuuuuugacuucaauaaacaggccauuagacggcugaagaccgaagcgcagaugagcauccagcucauuaacaaagccgugaaugcucugaucaacgaucaacuuauuaugaagaaucaucugcgcgacaucauguguaucccuuauugcaacuacucuaaguauugguaccucaaucacacagucaccggcaaaacaucccugcccagauguuggcuggugagcaacgggucuuaccucaaugaaacccacuucagcgacgauauugagcagcaggccgacaacaugaucacggagcugcuucaaaaggaauauauugaucggcagggaaaaacaccucugggccucguggaccuguuugucuucuccaccucuuuuuaccugaucagcauuuuccuucaccucguuaagaucccgacccaucgccacgugauugggaaacccugcccuaagccccauagacugaaucacaugggaaucuguuccugcggccuguauaaacacccuggcgugcccgucaaguggaagcggugaggacuagucccuguucccagagcccacuuuuuuuucuuuuuuugaaauaaaauagccugucuuucagaucucaaaggcucuuuucagagccaccaaaaaaaaaaaaaaaaaaaaaaaaaaaaaaaaaaaaaaaaaaaaaaaaaaaaaaaaaaaaaaaaaaaaaaaaaaaaaaaaaaaaaaaaaaaaaaaaaaaaa

SEQ ID NO: 35219 - RNA, 1745 nt, Artificial Sequence
  mRNA product Design a-1 (hSL-A100) comprising derived and/or modified sequence from LASV(LASV003-NIG-2008;Clade II)__AIT17580__GPCmut9 (opt5)
aggagagucccgcagucggcguccagcggcucugcuuguucgugugugugucguugcaggccuuauucaagcuuaccaugggccagaucauuaccuucuuucaagaggugccccacgucaucgaagagguuaugaacauugugcugaucgcccucagccugcuugcuauucugaaggggaucuacaauguggccacaugcggacucuucggccuggucuccuuucuucugcucugugggagaucuugcagcacgaccuauaaaggaguguacgaacugcagacacuggagcucgacauggcgucccugaacaugaccaugccucuuucuuguacaaagaauaacagccaucacuauaucaugguuggcaaugaaaccgggcuggagcucacacugaccaacacguccauuaucaaucauaaauucugcaaccuuucugaugcucacaagaaaaaucuguacgaccaugcccucaugagcauuaucuccaccuuucaccugagcauuccgaacuucaaucaguaugaggccaugucuugugauuuuaacggaggcaagaucuccgugcaguacaaucugagccacacauaugcugucgacgccgcuaaccauugcggcaccauugccaauggggugcuccaaacauucaugcggauggcguggggaggcucuuacaucgcccuggauuccggguguggaagcugggacugcaucaugaccucuuaccaguaucuuauuauccagaacacgacaugggaagaucacugucaguuuucccgccccagcccuauuggcuaccuggggcuccugucccaaagaacccgggacaucuauauuucucgcagacuucugggaacauucaccuggacccucagcgauuccgagagcaacgaaacacccggcggcuacugccugacgcgguggaugcugaucgaggcugagcucaaguguuuugggaauaccgccguugcuaaaugcaacgaaaagcaugacgaggaguucugcgauaugcugcgccuuuuugacuucaauaaacaggccaucagacggcugaaggcggaagcccagaugucuauucagcucaucaacaaagcugugaaugcccugauuaacgaucaacuuaucaugaagaaucaucugcgcgacauuauguguaucccuuauugcaacuacuccaaguauugguaccucaaucacacagucaccggaagaacaagccugccccgguguuggcuggugucuaacggcagcuaccucaaugaaacccacuucuccgacgauaucgagcagcaggcugacaacaugauuacggagcugcuucaaaaagaauauauggaucgccaggggaagacaccucugggacucguggaccuguuugucuucucuaccagcuuuuaccugaucuccauuuuccuucaccucguuaaaaucccgacccauagacacgugauuggcaagcccugcccuaaaccccaucggcugaaucacauggggaucuguagcugcggacuguauaagcacccuggcgugcccgucaaauggaagcgcugaggacuagucccuguucccagagcccacuuuuuuuucuuuuuuugaaauaaaauagccugucuuucagaucucaaaggcucuuuucagagccaccaaaaaaaaaaaaaaaaaaaaaaaaaaaaaaaaaaaaaaaaaaaaaaaaaaaaaaaaaaaaaaaaaaaaaaaaaaaaaaaaaaaaaaaaaaaaaaaaaaaaa

SEQ ID NO: 35220 - RNA, 1745 nt, Artificial Sequence
  mRNA product Design a-1 (hSL-A100) comprising derived and/or modified sequence from LASV(LASV035-NIG-2009;Clade II)__AIT17588__GPCmut9 (opt5)
aggagagucccgcagucggcguccagcggcucugcuuguucgugugugugucguugcaggccuuauucaagcuuaccaugggccagaucauuaccuucuuucaagaggugccccacgucaucgaagagguuaugaacauugugcugaucgcccucagccugcuugcuauucugaaggggaucuacaauguggccacaugcggacucuucggccuggucuccuuucuucugcucugugggagaucuugcagcacgaccuauaaaggaguguacgaacugcagacacuggagcucgacauggcgucccugaacaugaccaugccucuuucuuguacaaagaauaacagccaucacuauaucaugguuggcaaugaaaccgggcuggagcucacacugaccaacacguccauuaucaaucauaaauucugcaaccuuucugaugcucacaagaaaaaucuguacgaccaugcccucaugagcauuaucuccaccuuucaccugagcauuccgaacuucaaucaguaugaggccaugucuugugauuuuaacggaggcaagaucuccgugcaguacaaucugagccacgcuuaugccgucgacgcugccaaccauugcggcacaauugcgaauggggugcuccaaaccuucaugcggauggccuggggaggcucuuacaucgcucuggauuccggguguggaagcugggacugcaucaugacaucuuaccaguaucuuauuauccagaacaccacgugggaagaucacugucaguuuucccgccccagcccuauuggcuaccuggggcuccugucccaaagaacacgggacaucuauauuucucgcagacuucugggaaccuucacauggacccucagcgauuccgagggcaacgaaacccccggcggguacugccugacacgguggaugcugaucgaggccgagcucaaguguuuuggaaauacggcuguugccaaaugcaacgaaaagcaugacgaggaguucugcgauaugcugcgccuuuuugacuucaauaaacaggcgaucagacggcugaaggccgaagcucagaugagcauucagcucaucaacaaagccgugaaugcucugauuaacgaucaacuuaucaugaagaaucaucugcgcgacauuauguguaucccuuauugcaacuacucuaaguauugguaccucaaucacaccgucacaggcaaaaccucccugcccagauguuggcuggugagcaacgggucuuaccucaaugaaacacacuucagcgacgauaucgagcagcaggccgacaacaugauuaccgagcugcuucaaaaggaauauaucgaucggcagggaaaaacgccucugggccucguggaccuguuugucuucuccacaucuuuuuaccugauuagcaucuuccuucaccucguuaagauuccgacccaucgccacgugaucgggaaacccugcccuaagccccauagacugaaucacaugggaauuuguuccugcggccuguauaaacacccuggcgugcccgucaaguggaagcggugaggacuagucccuguucccagagcccacuuuuuuuucuuuuuuugaaauaaaauagccugucuuucagaucucaaaggcucuuuucagagccaccaaaaaaaaaaaaaaaaaaaaaaaaaaaaaaaaaaaaaaaaaaaaaaaaaaaaaaaaaaaaaaaaaaaaaaaaaaaaaaaaaaaaaaaaaaaaaaaaaaaaa

SEQ ID NO: 35221 - RNA, 1745 nt, Artificial Sequence
  mRNA product Design a-1 (hSL-A100) comprising derived and/or modified sequence from LASV(LASV1000-NIG-2009;Clade II)__AIT17782__GPCmut9 (opt5)
aggagagucccgcagucggcguccagcggcucugcuuguucgugugugugucguugcaggccuuauucaagcuuaccaugggccagaucauuaccuucuuucaagaggugccccacgucaucgaagagguuaugaacauugugcugaucgcccucagccugcuugcuauucugaaggggaucuacaauguggccacaugcggacucuucggccuggucuccuuucuucugcucugugggagaucuugcagcacgaccuauaaaggaguguacgaacugcagacacuggagcucgacauggcgucccugaacaugaccaugccucuuucuuguacaaagaauaacagccaucacuauaucaugguuggcaaugaaaccgggcuggagcucacacugaccaacacguccauuaucaaucauaaauucugcaaccuuucugaugcucacaagaaaaaucuguacgaccaugcccucaugagcauuaucuccaccuuucaccugagcauuccgaacuucaaucaguaugaggccaugucuugugauuuuaacggaggcaagaucuccgugcaguacaaucugagccacacauaugcugucgacgccgcuaaccauugcggcaccauugccaauggggugcuccaaacauucaugcggauggcguggggaggcucuuacaucgcccuggauuccggguguggaagcugggacugcaucaugaccucuuaccaguaucuuauuauccagaacacgacaugggaagaucacugucaguuuucccgccccagcccuauuggcuaccuggggcuccugucccaaagaacccgggacaucuauauuucucgcagacuucugggaacauucaccuggacccucagcgauuccgagggcaacgaaacacccggcggguacugccugacgcgguggaugcugaucgaggcugagcucaaguguuuuggaaauaccgccguugcuaaaugcaacgaaaagcaugacgaggaguucugcgauaugcugcgccuuuuugacuucaauaaacaggccaucaagagacugaaaacagaagcgcagaugagcauucagcucaucaacaaggccgugaaugcucugauuaacgaucaacuuaucaugaagaaucaucugcgggacauuauguguaucccuuauugcaacuacucuaaauauugguaccucaaucacaccgucacaggcaagaccucccugccccgcuguuggcuggugagcaacgggucuuaccucaaugaaacgcacuucagcgacgauaucgagcagcaggccgacaacaugauuacagagcugcuucaaaaagaauauaucgauagacagggaaagaccccucugggccucguggaccuguuugucuucuccaccucuuuuuaccugauuagcaucuuccuucaccucguuaaaauuccgacacaucggcacgugguggggaagcccugcccuaaaccccaucgccugaaucacaugggaaucuguuccugcggccuguauaagcacccuggcguccccgugaaguggaaaagaugaggacuagucccuguucccagagcccacuuuuuuuucuuuuuuugaaauaaaauagccugucuuucagaucucaaaggcucuuuucagagccaccaaaaaaaaaaaaaaaaaaaaaaaaaaaaaaaaaaaaaaaaaaaaaaaaaaaaaaaaaaaaaaaaaaaaaaaaaaaaaaaaaaaaaaaaaaaaaaaaaaaaa

SEQ ID NO: 35222 - RNA, 1745 nt, Artificial Sequence
  mRNA product Design a-1 (hSL-A100) comprising derived and/or modified sequence from LASV(LASV221-NIG-2010;Clade II)__AIT17624__GPCmut9 (opt5)
aggagagucccgcagucggcguccagcggcucugcuuguucgugugugugucguugcaggccuuauucaagcuuaccaugggccagaucauuaccuucuuucaagaggugccccacgucaucgaagagguuaugaacauugugcugaucgcccucagccugcuugcuauucugaaggggaucuacaauguggccacaugcggacucuucggccuggucuccuuucuucugcucugugggagaucuugcagcacgaccuauaaaggaguguacgaacugcagacacuggagcucgacauggcgucccugaacaugaccaugccucuuucuuguacaaagaauaacagccaucacuauaucaugguuggcaaugaaaccgggcuggagcucacacugaccaacacguccauuaucaaucauaaauucugcaaccuuucugaugcucacaagaaaaaucuguacgaccaugcccucaugagcauuaucuccaccuuucaccugagcauuccgaacuucaaucaguaugaggccaugucuugugauuuuaacggaggcaagaucuccgugcaguacaaucugagccacacauaugcuauugacgccgcuaaccauugcggcaccaucgccaaugggguccuccaaacauucaugcggauggcguggggaggcucuuacaucgcccuggauuccggguguggaagcugggacugcauuaugaccucuuaccaguaucuuaucauucagaacacgacaugggaagaucacugucaguuuucccgccccagcccuaucggcuaccuggggcuccugucccaaagaacccgggacauuuauaucucucgcagacuucugggaacauucaccuggacccucagcgauuccgagggcaacgaaacacccggcggguacugccugacgcgguggaugcugaucgaggcugagcucaaguguuuuggaaauaccgccguggcuaaaugcaacgaaaagcaugacgaggaguucugcgauaugcugcgccuuuuugacuucaauaaacaggccauuagacggcugaagacagaagcgcagaugagcauccagcucauuaacaaagccguuaaugcucugaucaacgaucaacuuauuaugaagaaucaucugcgcgacaucauguguaucccuuauugcaacuacucuaaguauugguaccucaaucacaccgugacaggcaaaaccucccugcccagauguuggcuggucagcaacgggucuuaccucaaugaaacgcacuucagcgacgauauugagcagcaggccgacaacaugaucacagagaugcugcaaaaggaauauauggaucggcagggaaaaaccccucuuggccugguggaccucuuuguguucuccaccucuuuuuaccugauuagcaucuuccugcaccuugucaagauuccgacacaucgccacguuaucgggaaacccugcccuaagccccauagacucaaucacaugggaauuuguuccugcggccuguauaaacacccuggcgugcccgugaaguggaagcggugaggacuagucccuguucccagagcccacuuuuuuuucuuuuuuugaaauaaaauagccugucuuucagaucucaaaggcucuuuucagagccaccaaaaaaaaaaaaaaaaaaaaaaaaaaaaaaaaaaaaaaaaaaaaaaaaaaaaaaaaaaaaaaaaaaaaaaaaaaaaaaaaaaaaaaaaaaaaaaaaaaaaa

SEQ ID NO: 35223 - RNA, 1745 nt, Artificial Sequence
  mRNA product Design a-1 (hSL-A100) comprising derived and/or modified sequence from LASV(LASV237-NIG-2010;Clade II)__AIT17638__GPCmut9 (opt5)
aggagagucccgcagucggcguccagcggcucugcuuguucgugugugugucguugcaggccuuauucaagcuuaccaugggccagaucauuaccuucuuucaagaggugccccacgucaucgaagagguuaugaacauugugcugaucgcccucagccugcuugcuauucugaaggggaucuacaauguggccacaugcggacucuucggccuggucuccuuucuucugcucugugggagaucuugcagcacgaccuauaaaggaguguacgaacugcagacacuggagcucgacauggcgucccugaacaugaccaugccucuuucuuguacaaagaauaacagccaucacuauaucaugguuggcaaugaaaccgggcuggagcucacacugaccaacacguccauuaucaaucauaaauucugcaaccuuucugaugcucacaagaaagaccuguacgaucaugcccucaugagcauuaucuccaccuuucaccugagcauuccgaauuucaaccaguaugaggccaugucuugugacuuuaauggaggcaagaucuccgugcaguacaaccugagccacacauaugcugucgaugccgcuaaucauugcggcaccauugccaacggggugcuccaaacauucaugcggauggcguggggaggcucuuacaucgcccuggacuccggguguggaagcugggauugcaucaugaccucuuaccaguaucuuauuauccagaauacgacaugggaagaccacugucaguuuucccgccccagcccuauuggcuaccuggggcuccugucccaaagaacccgggauaucuauauuucucgcagacuucugggaacauucaccuggacccucagcgacuccgagggcaacgaaacacccggcggguacugccugacgcgguggaugcugaucgaggcugagcucaaguguuuuggaaacaccgccguugcuaaaugcaaugaaaagcaugaugaggaguucugcgacaugcugcgccuuuuugauuucaacaaacaggccaucagacggcugaagacagaagcgcagaugagcauucagcucaucaauaaagccgugaacgcucugauuaaugaccaacuuaucaugaagaaccaucugcgcgacauuauguguaucccuuauugcaauuacucuaaguauugguaccucaaccacaccgucacaggcaaaaccucccugcccagauguuggcuggugagcaaugggucuuaccucaacgaaacgcacuucagcgaugacaucgagcagcaggccgauaauaugauuacagagcugcuucaaaaggaauauauggaccggcagggaaaaaccccucugggccucguggaucuguuugucuucuccaccucuuuuuaccugaucagcauuuuccuucaccucaucaagauuccgacacaucgccacaucaccgggaaacccugcccuaagccccauagacugaaccacaugggaauuuguuccugcggccuguauaaacacccuggcguucccgugaaguggaagcggugaggacuagucccuguucccagagcccacuuuuuuuucuuuuuuugaaauaaaauagccugucuuucagaucucaaaggcucuuuucagagccaccaaaaaaaaaaaaaaaaaaaaaaaaaaaaaaaaaaaaaaaaaaaaaaaaaaaaaaaaaaaaaaaaaaaaaaaaaaaaaaaaaaaaaaaaaaaaaaaaaaaaa

SEQ ID NO: 35224 - RNA, 1745 nt, Artificial Sequence
  mRNA product Design a-1 (hSL-A100) comprising derived and/or modified sequence from LASV(LASV253-NIG-2011;Clade II)__AIT17670__GPCmut9 (opt5)
aggagagucccgcagucggcguccagcggcucugcuuguucgugugugugucguugcaggccuuauucaagcuuaccaugggccagaucauuaccuucuuucaagaggugccccacgucaucgaagagguuaugaacauugugcugaucgcccucagccugcuugcuauucugaaggggaucuacaauguggccacaugcggacucuucggccuggucuccuuucuucugcucugugggagaucuugcagcacgaccuauaaaggaguguacgaacugcagacacuggagcucgacauggcgucccugaacaugaccaugccucuuucuuguacaaagaauaacagccaucacuauaucaugguuggcaaugaaaccgggcuggagcucacacugaccaacacguccauuaucaaucauaaauucugcaaccuuucugaugcucacaagaaaaaucuguacgaccaugcccucaugagcauuaucuccaccuuucaccugagcauuccgaacuucaaucaguaugaggccaugucuugugauuuuaacggaggcaagaucuccgugcaguacaaucugagccacacauaugcugucgacgccgcuaaccauugcggcaccauugccaauggggugcuccaaacauucaugcggauggcguggggaggcucuuacaucgcccuggauuccggguguggaagcugggacugcaucaugaccucuuaccaguaucuuauuauccagaacacgacaugggaagaucacugucaguuuucccgccccagcccuauuggcuaccuggggcuccugucccaaagaacccgggacaucuauauuucucgcagacuucugggaacauucaccuggacccucagcgauuccgagggcaacgaaacacccggcggguacugccugacgcgguggaugcugaucgaggcugagcucaaguguuuuggaaauaccgccguugcuaaaugcaacgaaaagcaugacgaggaguucugcgauaugcugcgccuuuuugacuucaauaaacaggccaucagacggcugaaggcggaagcccagaugagcauucagcucaucaacaaagcugugaaugcccugauuaacgaucaacuuaucaugaagaaucaucugcgcgacauuauguguaucccuuauugcaacuacucuaaguauugguaccucaaucacacagucaccggcagaacaucccugccccgguguuggcuggugagcaacgggucuuaccucaaugaaacccacuucagcgacgauaucgagcagcaggcugacaacaugauuacggagcugcuucaaaaagaauauaucgaucgccagggaaagacaccucugggccucguggaccuguuugucuucuccaccucuuuuuaccugauuagcaucuuccuucaccucguuaaaauuccgacccauagacacaucauugggaagcccugcccuaaaccccaucggcugaaucacaugggaaucuguuccugcggccuguauaagcacccuggcgugcccgugaaauggaagcgcugaggacuagucccuguucccagagcccacuuuuuuuucuuuuuuugaaauaaaauagccugucuuucagaucucaaaggcucuuuucagagccaccaaaaaaaaaaaaaaaaaaaaaaaaaaaaaaaaaaaaaaaaaaaaaaaaaaaaaaaaaaaaaaaaaaaaaaaaaaaaaaaaaaaaaaaaaaaaaaaaaaaaa

SEQ ID NO: 35225 - RNA, 1745 nt, Artificial Sequence
  mRNA product Design a-1 (hSL-A100) comprising derived and/or modified sequence from LASV(LASV254-NIG-2011;Clade II)__AIT17674__GPCmut9 (opt5)
aggagagucccgcagucggcguccagcggcucugcuuguucgugugugugucguugcaggccuuauucaagcuuaccaugggccagaucauuaccuucuuucaagaggugccccacgucaucgaagagguuaugaacauugugcugaucgcccucagccugcuugcuauucugaaggggaucuacaauguggccacaugcggacucuucggccuggucuccuuucuucugcucugugggagaucuugcagcacgaccuauaaaggaguguacgaacugcagacacuggagcucgacaugaccaaccugaauaugacaaugccucuuuccuguaccaagaacaauucucaucacuauaucaugguuggcaacgaaacagggcuggagcucacccugacgaauaccagcauuaucaaccauaaauucugcaaucuuuccgaugcgcacaagaaaaaccuguacaaucaugcucucaugucuauuaucagcacauuucaccuguccauuccgaacuucaaucaguaugaggccaugagcugugacuuuaacggaggcaagaucucugugcaguacaaucugucccacagcuaugccgucgaugcugccaaccauugcggcaccauugcuaacggggugcuccaaacauucaugcggauggccuggggaggcucuuacaucgcgcuggacuccggguguggaaauugggauugcaucaugaccagcuaccaguaucuuauuauccagaacacgacaugggaagaccacugucaguuuucucgccccuccccuauuggcuaccuggggcuccugagccaaagaacccgggauaucuauauuucccgcagacuucugggaacauucaccuggacccucucugacagcgagggcaaugaaacacccggcggguacugccugacgcgguggaugcugaucgaggccgagcucaaguguuuuggaaacaccgcuguugccaaaugcaaugaaaagcaugaugaggaguucugcgacaugcugcgccuuuuugauuucaacaaacaggcuaucagacggcugaagacagaagcccaggcgaauauucagcucaucaacaaagccgugaaugcucugauuaacgaccaacuuaucaugaagaaucaucugcgcgauauuauguguaucccuuauugcaacuacuccaaguauugguaccucaaucacaccgucacaggcaaaaccagccugcccagauguuggcuggugucuaacggguccuaccucaaugaaacgcacuucagcgacgacaucgagcagcaggccgauaacaugauuacagagcugcuucaaaaggaauauauggaccggcagggaaaaaccccucugggccucguggaucuguuugucuucucuaccagcuuuuaccugaucuccauuuuccuucaccucguuaagaucccgacacaucgccacgugauugggaaacccugcccuaagccccauagacugaaccacaugggaaucuguucuugcggccuguauaaacacccuggcgugcccgucaaguggaagcggugaggacuagucccuguucccagagcccacuuuuuuuucuuuuuuugaaauaaaauagccugucuuucagaucucaaaggcucuuuucagagccaccaaaaaaaaaaaaaaaaaaaaaaaaaaaaaaaaaaaaaaaaaaaaaaaaaaaaaaaaaaaaaaaaaaaaaaaaaaaaaaaaaaaaaaaaaaaaaaaaaaaaa

SEQ ID NO: 35226 - RNA, 1745 nt, Artificial Sequence
  mRNA product Design a-1 (hSL-A100) comprising derived and/or modified sequence from LASV(Nig08-A19;Clade III)__ADU56618__GPCmut9 (opt5)
aggagagucccgcagucggcguccagcggcucugcuuguucgugugugugucguugcaggccuuauucaagcuuaccaugggccagaucgugaccuucuuucaagaggucccccacguuauugaagaggugaugaacaucgugcugauugcccucagcauccuggcuauucuuaaggggcuguacaauaucgccacaugcggacucaucggccuggucacguuccuucugcucuccgggagaucuuguagcaugaccuauaaaggaguguacgaacugcagacacuggagcucaacaugaauacccugaacaugacaaugccucuuuccugcaccaagaauaacucucaucacuauauuaugguuggcaaugaaacagggcuggagcucacccugacgaacaccagccuucugcaucacaaauuuuguaaucucuccgacgcgcauaagaaaaaccuguacgaucacacacugaugucuaucauuagcaccuuccaccucuccaucccgaauuuuaaccaguaugaggcuaugagcugcgacuucaauggaggcaagauuacagugcaguacaaccugucucauuccuaugccaucgaugccgcuaaucacuguggcaccgucgccaacggggugcuucaaacguuuaugcggauggcuuggggaggcagcuacauugcccuggacucugggugcggaaagugggauuguaucaugacauccuaccaguaucucaucauucagaacaccacaugggaagaccauugccaguucagccgccccucuccuaucggcuaccuggggcuucugucccaaagaacccgggauauuuauaucagccgcagacuccugggaaccuuuacauggacgcuguccgacucugagggcaaugaaacccccggcggguacugucucacacgguggaugcugauugaggcggagcuuaaaugcuucggaaacaccgccguugcuaaguguaaugaaaaacacgaugaggaauuuugcgacaugcugcgccucuucgauuuuaacaagcaggccaucagacggcugaaagcugaggcccagaugagcauccagcuuauuaauaaggcggugaacgcccugaucaaugaccaacucauuaugaagaaccaucugcgcgauaucaugugcauuccuuauuguaauuacuccaaauauugguaccugaaccacacaagcaccggcagaacgucucucccccggugcuggcuggucuccaaugggagcuaccuuaacgaaacacacuucucugacgacaucgagcagcaggcugauaauaugaucaccgagaugcugcaaaaggaauaucucgaccgccagggaaaaaccccucugggccugguggaucuuuucguguuuagcacauccuucuaccucauuucuaucuuucugcaucuggucaagauuccgacccacagacauaucguugggaaacccuguccuaagccccaccggcucaaccacaugggaauuugcagcuguggccuguauaaacagccuggcgugcccgugcgcuggaagagaugaggacuagucccuguucccagagcccacuuuuuuuucuuuuuuugaaauaaaauagccugucuuucagaucucaaaggcucuuuucagagccaccaaaaaaaaaaaaaaaaaaaaaaaaaaaaaaaaaaaaaaaaaaaaaaaaaaaaaaaaaaaaaaaaaaaaaaaaaaaaaaaaaaaaaaaaaaaaaaaaaaaaa

SEQ ID NO: 35227 - RNA, 1748 nt, Artificial Sequence
  mRNA product Design a-1 (hSL-A100) comprising derived and/or modified sequence from LASV(G1180-SLE-2010;Clade IV)__AIT17168__GPCmut9 (opt5)
aggagagucccgcagucggcguccagcggcucugcuuguucgugugugugucguugcaggccuuauucaagcuuaccaugggccagaucgugaccuucuuucaagaggucccccacguuauugaagaggugaugaacaucgugcugauugcccucagcauccuggcuguccuuaaggggcuguacaauuucgccacaugcggacucgugggccugcuuacguuucugcuccugugugggagauccugcaccgcgucucgguauaaaggaguuuacgaacugcagacacucgagcugaacauggaaacccuuaauaugacaaugccucugagcuguaccaagaacaauucccaucacuauauuauggugggcaacgagacagggcucgagcugacccuuacgaauaccucuaucaucaaccauaaauucugcaaucugagcgacgcucacaagaaaaaccucuacgaucaugcccugauguccauuaucucuacauuucaccugagcauuccgaauuucaaccaguaugaagccauguccugugacuuuaauggaggcaagaucagcguccaguacaaccucucucacuccuaugcuggcgaugccgcuaaucauugcgggaccguggccaacggaguucugcaaacauucaugcgcauggcguggggcgggagcuacauugcccuugacucuggauguggcuccugggauugcaucaugaccagcuaccaguaucugauuauccagaacacgacaugggaggaccacugucaguuuucuagacccuccccuaucggguaccucggacugcuuagccaacggacccgcgauauuuauaucuccagacggcugcucggcacauucaccuggacccugucugacagcgaaggcaaggauacacccgggggauacugccugacgcgcuggaugcucauugaggcugagcugaaauguuuuggcaauaccgccguggcuaagugcaacgaaaaacaugacgaggaguucugcgauaugcuuagacuguuugacuucaauaagcaggccauccagcggcucaaagcggaagcccagauguccauucaacugaucaacaaggcugucaaugcccuuaucaacgaucagcugauuaugaagaaucaccuccgcgacaucauguguauuccuuauugcaacuacagcaaauauugguaccugaaucacacaaccacagggaagaccucucugcccaaauguuggcucguguccaacggaagcuaccugaaugaaacgcauuucucugacgauaucgagcagcaagcugacaacaugauuacagagaugcuucagaaggaauauauggagagacagggcaaaaccccucuggggcucguggaucuguuugucuucagcaccuccuuuuaccugaucucuaucuuccuucaccucguuaagauuccgacacaucggcacaucgugggaaaaagcugccccaagccucaucgccugaaucacaugggcauuuguuccugcggccuguauaagcagcccggggugccugucaaauggaagagaugaggacuagucccuguucccagagcccacuuuuuuuucuuuuuuugaaauaaaauagccugucuuucagaucucaaaggcucuuuucagagccaccaaaaaaaaaaaaaaaaaaaaaaaaaaaaaaaaaaaaaaaaaaaaaaaaaaaaaaaaaaaaaaaaaaaaaaaaaaaaaaaaaaaaaaaaaaaaaaaaaaaaa

SEQ ID NO: 35228 - RNA, 1748 nt, Artificial Sequence
  mRNA product Design a-1 (hSL-A100) comprising derived and/or modified sequence from LASV(G1442-SLE-2011;Clade IV)__AIT17180__GPCmut9 (opt5)
aggagagucccgcagucggcguccagcggcucugcuuguucgugugugugucguugcaggccuuauucaagcuuaccaugggccagaucgugaccuucuuucaagaggucccccacguuauugaagaggugaugaacaucgugcugauugcccucagcauccuggcuguccuuaaggggcuguacaauguggccacaugcggacucauuggccugguuacguuccuucugcucugugggagauccugcaccacaacccuguauaaaggaguguacgaacugcagacacucgagcugaacauggaaacccuuaauaugacaaugccucugucuuguaccaagaacaauagccaucacuauauccgggucggcaacgagacggggcucgagcugacccuuacaaauaccuccaucauuaaccauaaauuuugcaaucugucugacgcgcacaagaaaaaccucuacgaucaugcucugaugagcaucauuuccacauuccaccugucuaucccgaauuuuaaccaguaugaagccaugagcugugacuucaauggaggcaagauuuccgugcaguacaaccucagccacucuuaugccggcgaugcugccaaucauugcgggaccguugcuaacggagugcugcaaacguuuaugcgcauggccuggggcggguccuacaucgcgcuugacagcggauguggcaacugggauugcauuaugacaucuuaccaguaucugaucauccagaauaccacaugggacgaucacugucaguucuccagacccagcccuauuggguaccucggacugcuuucucaacggacccgcgacgucuauaucuccagacggcugcucggcaccuuuacauggacgcugagcgauuccgagggcaaggacacccccgggggauacugccugacacgcuggaugcucauugaagccgagcugaaauguuucggcaacaccgcuguggccaagugcaaugagaaacaugaugaagaguuuugcgacaugcuuagacuguucgauuuuaacaagcaggcuauccagcggcucaaagccgaagcgcagaugucuauucaacugaucaauaaggccgugaacgcucuuaucaaugaccagcugauuaugaagaaccaccuccgcgacaucauguguauuccuuauugcaauuacagcaaauauugguaccugaacaauacagccaccgggaagacgucccugcccaaauguuggcucaucagcaacggaucuuaccugaaugagacacacuucuccgaugacauugaacaggaggcugauaacaugaucaccgagaugcuucaaaaggaauauauggagagacagggcaaaaccccucuggggcucgucgaccuguucguuuuuagcacaucuuucuaccugaucagcauuuuucuucaucucgugaagaucccgacccaccggcauauugugggaaaauccugccccaagccucaccgccugaaucauaugggcaucuguucuugcggccuguauaagcagcccggggucccugugagauggaaacggugaggacuagucccuguucccagagcccacuuuuuuuucuuuuuuugaaauaaaauagccugucuuucagaucucaaaggcucuuuucagagccaccaaaaaaaaaaaaaaaaaaaaaaaaaaaaaaaaaaaaaaaaaaaaaaaaaaaaaaaaaaaaaaaaaaaaaaaaaaaaaaaaaaaaaaaaaaaaaaaaaaaaa

SEQ ID NO: 35229 - RNA, 1748 nt, Artificial Sequence
  mRNA product Design a-1 (hSL-A100) comprising derived and/or modified sequence from LASV(G3010-SLE-2013;Clade IV)__AIT17344__GPCmut9 (opt5)
aggagagucccgcagucggcguccagcggcucugcuuguucgugugugugucguugcaggccuuauucaagcuuaccaugggccagaucgugaccuucuuucaagaggucccccacguuauugaagaggugaugaacaucgugcugauugcccucagcauccuggcuguccuuaaggggcuguacaauuucgccacaugcggacucgugggccugguuacguuucuucugcucugugggagauccugcaccacaucucuguauaaaggaguguacgaacugcagacccucgagcugaacauggaaacacuuaauaugaccaugccucugagcuguacaaagaacaauucccaucacuauauuauggucggcaacgagaccgggcucgagcugacgcuuaccaauacaucuaucaucaaccauaaauucugcaaucugagcgacgcgcacaagaaaaaccucuacaaucaugcucugauguccauuaucucuaccuuucaccugagcauuccgaacuucaaucaguaugaagccauguccugugauuuuaacggaggcaagaucagcgugcaguacaaucucucucacuccuaugccggcgacgcugccagccauugcgggacaguugcuaacggagugcugcaaaccuucaugcggauggccuggggcgggucuuacauugcgcuugauuccggauguggcaagugggacugcaucaugacgagcuaccaguaucugauuauccagaacacaaccugggaggaucacugucaguuuucucgccccuccccuaucggguaccucggacugcuuagccaaagaacacgggacauuuauaucucccgcagacugcucggcaccuucaccuggacacugucugauagcgaaggcaaagacacgcccgggggauacugccugacccgguggaugcucauugaggccgagcugaaguguuuuggcaauacagcugucgccaaaugcaacgaaaagcaugaugaggaguucugcgacaugcuucgccuguuugauuucaauaaacaggcuauccagagacucaagaccgaagcccagauguccauucaacugaucaacaaggcggugaaugcccuuaucaacgaccagcugauuaugaaaaaucaccuccgggauaucauguguauuccuuauugcaacuacagcaaguauugguaccugaaucacacaaccacggggaaaacaucucugcccaaguguuggcucguguccaacggaagcuaccugaaugaaacccauuucucugacgacaucgagcagcaagcugauaacaugauuaccgagaugcuucagaaagaauauauggagcgccagggcaagacaccucuggggcucgucgaccuguuuguuuucagcaccuccuuuuaccugaucucuaucuuccuucaccucgugaaaauuccgacacauagacacaucgugggaaagagcugccccaagccucaucggcugaaucacaugggcauuuguuccugcggccuguauaaacagcccggggucccugugcgcuggaagagaugaggacuagucccuguucccagagcccacuuuuuuuucuuuuuuugaaauaaaauagccugucuuucagaucucaaaggcucuuuucagagccaccaaaaaaaaaaaaaaaaaaaaaaaaaaaaaaaaaaaaaaaaaaaaaaaaaaaaaaaaaaaaaaaaaaaaaaaaaaaaaaaaaaaaaaaaaaaaaaaaaaaaa

SEQ ID NO: 35230 - RNA, 1748 nt, Artificial Sequence
  mRNA product Design a-1 (hSL-A100) comprising derived and/or modified sequence from LASV(G502-SLE-2009;Clade IV)__AIT17126__GPCmut9 (opt5)
aggagagucccgcagucggcguccagcggcucugcuuguucgugugugugucguugcaggccuuauucaagcuuaccaugggccagaucgugaccuucuuucaagaggucccccacguuauugaagaggugaugaacaucgugcugauugcccucagcauccuggcuguccuuaaggggcuguacaauuucgccacaugcggacucgugggccugcuuacguuucugcuccugugugggagauccugcaccacaggacuguauaaaggcguuuacgaacuccagacccuggagcuuaacauggaaacacugaauaugaccaugccucucucuuguacaaagaacaauagccaucacuauauuaugguggggaacgagaccggacuggagcuuacgcugaccaauacauccaucaucaaccauaaauucugcaaucucucugacgcgcacaagaaaaaccuguacgaucaugcucugaugagcauuaucuccaccuuucaccucucuauuccgaauuucaaccaguaugaagccaugagcugugacuuuaauggcggcaagaucuccguccaguacaaccugagccacucuuaugccggggaugcugccgaccauugcggaacaguggcuaauggcguucuucaaaccuucaugcggauggccuggggaggguccuacauugcgcuggauagcggcugugggcgcugggacugcaucaugacgucuuaccaguaucucauuauccagaacacaaccugggaggaucacugucaguuuuccagacccagcccuaucggauaccugggccuucugucucaacggacacgcgacauuuauaucuccagacggcuccugggcaccuucaccuggacacugagcgauuccgaagggaaggacacgcccggaggcuacugccucacccgcuggaugcugauugaggccgagcuuaaauguuuugggaacacagcuguggccaagugcaaugaaaaacaugaugaggaguucugcgacaugcugagacucuuugauuucaacaagcaggcuauccagcggcugaaagccgaagcgcagaugucuauucaacuuaucaauaaggccgucaacgcucugaucaaugaccagcucgugaugaagaaccaucugcgcgacauuauguguaucccuuauugcaauuacagcagauauugguaccugaaccacaccacaaccggacggacgucccuccccaaauguuggcuggugagcaauggcucuuaccuuaacgaaacacacuucuccgaugacauugagcagcaagccgauaauaugaucaccgagaugcugcagaaggaauauauggagcgccaggggaaaaccccucucggacuggucgaccuguuuguuuucagcacaucuuuuuaccuuauuagcaucuuccuccaccuggugaagaucccgacccauagacacauugugggcaaauccugccccaagccucaucggcugaaccacaugggcaucuguucuugcgggcucuauaaacagcccggagucccugugaaguggaagcgcugaggacuagucccuguucccagagcccacuuuuuuuucuuuuuuugaaauaaaauagccugucuuucagaucucaaaggcucuuuucagagccaccaaaaaaaaaaaaaaaaaaaaaaaaaaaaaaaaaaaaaaaaaaaaaaaaaaaaaaaaaaaaaaaaaaaaaaaaaaaaaaaaaaaaaaaaaaaaaaaaaaaaa

SEQ ID NO: 35231 - RNA, 1748 nt, Artificial Sequence
  mRNA product Design a-1 (hSL-A100) comprising derived and/or modified sequence from LASV(G733-SLE-2010;Clade IV)__AIT17154__GPCmut9 (opt5)
aggagagucccgcagucggcguccagcggcucugcuuguucgugugugugucguugcaggccuuauucaagcuuaccaugggccagaucgugaccuucuuucaagaggucccccacguuauugaagaggugaugaacaucgugcugauugcccucagcauccuggcuguccuuaaggggcuguacaauuucgccacaugcggaauugugggccucguuuccuuucugcuucugugugggagaucuugcacgaccagccucuauaaaggaguguacgaacugcagacacuggagcucaacauggaaacccugaauaugacaaugccucuuuccuguaccaagaacaauucucaucacuauaucauggucggcaacgagacagggcuggagcucacccugacgaauaccagcaucauuaaccauaaauucugcaaucuuuccgacgcgcacaagaaaaaccuguacgaucaugcucucaugucuaucauuagcacauuucaccuguccaucccgaauuucaaccaguaugaagccaugagcugugacuuuaauggaggcaagauuucugugcaguacaaccugucccacagcuaugccggcgaugcugccaaucauugcgggaccaucgcuaacggaguucuccaaacauucaugcggauggccuggggcgggucuuacauugcgcuggacuccggaugugaucgcugggacugcaucaugaccagcuaccaguaucuuaucauucagaacacgacaugggaggaucacugucaguuuucuagacccuccccuaucggcuaccuggggcuccugagccaacggacccgcgacauuuauaucuccagacggcuucugggaacauucaccuggacccucucugauagcgaaggcaaggacacacccggcggguacugccugacgcgcuggaugcugauugaggccgagcucaaauguuuuggaaauaccgcuguggccaagugcaacgaaaaacaugaugaggaguucugcgacaugcugagacuuuuugauuucaauaagcaggcuauccagcggcugaaagccgaagcgcagauguccauccaacucauuaacaaggccgucaaugcucugaucaacgaccagcuuauuaugaagaaucaucugcgcgacaucauguguauuccuuauugcaacuacagcaaauauugguaccucaaucacacaaccacaggcaagaccucucugcccaaauguuggcugguguccaacgggagcuaccucaaugaaacgcacuucucugaugacaucgagcagcaagccgauaacaugaucacagagaugcugcagaaggaauauauggagagacagggaaaaaccccucuuggccugguggaccucuuugucuucagcaccuccuuuuaccugauuucuaucuuccugcaccuuguuaagauuccgacacaucggcacgugguggggaaaagcugccccaagccucaucgccucaaucacaugggaaucuguuccugcggccuguauggccagcccggggucccugugaaguggaaaagaugaggacuagucccuguucccagagcccacuuuuuuuucuuuuuuugaaauaaaauagccugucuuucagaucucaaaggcucuuuucagagccaccaaaaaaaaaaaaaaaaaaaaaaaaaaaaaaaaaaaaaaaaaaaaaaaaaaaaaaaaaaaaaaaaaaaaaaaaaaaaaaaaaaaaaaaaaaaaaaaaaaaaa

SEQ ID NO: 35232 - RNA, 1748 nt, Artificial Sequence
  mRNA product Design a-1 (hSL-A100) comprising derived and/or modified sequence from MOPV/LASV reassortant(IGS-1;Clade IV)__AFY05576__GPCmut9 (opt5)
aggagagucccgcagucggcguccagcggcucugcuuguucgugugugugucguugcaggccuuauucaagcuuaccaugggccagaucgugaccuucuuucaagaggucccccacguuauugaagaggugaugaacaucgugcugauugcccucagcguccuggcugugcuuaaggggcuguacaauuucgccacaugcggacucguuggccuggugacguuucuucugcucugugggagauccugcaccacaucucuguauaaaggagucuacgaacugcagacccucgagcugaacauggaaacacuuaauaugaccaugccucugagcuguacaaagaacaauucccaucacuauaucauggugggcaacgagaccgggcucgagcugacgcuuaccaauacaucuauuaucaaccauaaauucugcaaucugagcgacgcgcacaagaaaaaccucuacgaucaugcucugauguccaucauuucuaccuuucaccugagcaucccgaauuucaaccaguaugaagccauguccugugacuuuaauggaggcaagauuagcguucaguacaaccucucucacuccuaugccggcgaugcugccaaucauugcgggacaguggcuaacggaguccugcaaaccuucaugcggauggccuggggcgggagcuacaucgcgcuugacucuggauguggcaacugggauugcauuaugacguccuaccaguaucugaucauucagaauacaaccugggaggaccacugucaguuuagccgccccucuccuaucggguaccucggacugcuuucccaaagaacacgggauaucuauauuagccgcagacugcucggcaccuucaccuggacacuguccgacucugaaggcgaggauacgcccgggggauacugccugacccgguggaugcucaucgaggccgaacugaaguguuuuggcaacacagcuguggccaaaugcaaugagaagcaugacgaagaguucugcgauaugcuucgccuguuugacuucaacaaacaggcuauucagagacucaaggccgaagcgcagaugagcauccaacugauuaauaaagccgugaacgcucuuaucaaugaucagcugaucaugaagaaccaccuccgggacauuauguguaucccuuauugcaauuacuccaaguauugguaccugaaccacaccacaaccgggcgcacgagccugcccaaauguuggcucgucucuaauggauccuaccugaacgagacacauuucagcgacgauauugagcagcaagccgacaauaugaucaccgaaaugcuucagaaggaguauauggaaagacagggcaaaaccccucuggggcucguugaucuguuuguguucucuaccagcuuuuaccugauuuccaucuuccuucaccucgugaagaucccgacacaucggcacauugucggaaaaucuugccccaagccucaucgccugaaccacaugggcaucuguagcugcggccuguauaaacagcccggggugccuguuaaguggaagagaugaggacuagucccuguucccagagcccacuuuuuuuucuuuuuuugaaauaaaauagccugucuuucagaucucaaaggcucuuuucagagccaccaaaaaaaaaaaaaaaaaaaaaaaaaaaaaaaaaaaaaaaaaaaaaaaaaaaaaaaaaaaaaaaaaaaaaaaaaaaaaaaaaaaaaaaaaaaaaaaaaaaaa

SEQ ID NO: 35233 - RNA, 1748 nt, Artificial Sequence
  mRNA product Design a-1 (hSL-A100) comprising derived and/or modified sequence from LASV(LM765-SLE-2012;Clade IV)__AIT17814__GPCmut9 (opt5)
aggagagucccgcagucggcguccagcggcucugcuuguucgugugugugucguugcaggccuuauucaagcuuaccaugggccagaucgugaccuucuuucaagaggucccccacguuauugaagaggugaugaacaucgugcugauugcccucagcauccuggcuguccuuaaggggcuguacaauuucgccacaugcggacucgugggccugguuacguuucuucugcucugugggagauccugcaccacaucucuguauaaaggaguguacgaacugcagacccucgagcugaacauggaaacacuuaauaugaccaugccucugagcuguacaaagaacaauucccaucacuauauuauggucggcaacgagaccgggcucgagcugacgcuuaccaauacaucuaucaucgaccauaaauucugcaaccugagcgaugcgcaccggaagaaucucuacgaccaugcucugauguccauuaucucuaccuuucaccugagcauuccgaacuucaaucaguaugaagccauguccugugauuuuaacggaggcaaaaucagcgugcaguacaaucucucucacuccuaugccaaggacgcugccgaucauugcggcacaguugcuaacggggugcugcaaaccuucaugcgcauggccuggggaggcagcuacauugcgcuugacucuggguguggaagaugggauugcaucaugacguccuaccaguaucugauuauccagaauacaaccugggaggaccacugucaguuuagccggcccucuccuaucggcuaccucgggcugcuuucccaacgcacaagagauauuuauaucagccggcgccugcucggaaccuucaccuggacacuguccgacucugaaggcaaggauacgcccggcggguacugccugaccagauggaugcucauugaggccgagcugaaauguuuuggaaacacagcugucgccaagugcaacgaaaaacaugacgaggaguucugcgauaugcuucggcuguuugacuucaauaagcaggcuauccagcgccucaaagccgaagcgcagaugagcauucaacugaucaacaaggccgugaaugcucuuaucaacgaccagcugauuaugaagaaucaccucagagauaucauguguauuccuuauugcaacuacuccaaauauugguaccugaaucacaccacaaccggcaagacgagccugcccaaauguuggcucgugucuaacggguccuaccugaaugaaacacauuucagcgacgauaucgagcagcaagccgacaacaugauuaccgagaugcuucagaaggaauauauggagcggcagggaaaaaccccucugggccucgucgaucuguuuguuuucucuaccagcuuuuaccugaucuccaucuuccuucaccucgugaagauuccgacacaucgccacaucguggggaaacccugcccuaagccccauagacugaaucacaugggaauuuguucuugcggccuguauaagcagccuggcguccccgugaaauggaagcggugaggacuagucccuguucccagagcccacuuuuuuuucuuuuuuugaaauaaaauagccugucuuucagaucucaaaggcucuuuucagagccaccaaaaaaaaaaaaaaaaaaaaaaaaaaaaaaaaaaaaaaaaaaaaaaaaaaaaaaaaaaaaaaaaaaaaaaaaaaaaaaaaaaaaaaaaaaaaaaaaaaaaa

SEQ ID NO: 35234 - RNA, 1748 nt, Artificial Sequence
  mRNA product Design a-1 (hSL-A100) comprising derived and/or modified sequence from LASV(LM776-SLE-2012;Clade IV)__AIT17824__GPCmut9 (opt5)
aggagagucccgcagucggcguccagcggcucugcuuguucgugugugugucguugcaggccuuauucaagcuuaccaugggccagaucgugaccuucuuucaagaggucccccacguuauugaagaggugaugaacaucgugcugauugcccucagcauccuggcuguccuuaaggggcuguacaauuucgccacaugcggacucgugggccugguuacguuucuucugcucugugggagauccugcaccacaucuguguauaaaggagucuacgaacugcagacccuggagcucaacauggaaacacugaauaugaccaugccucuuagcuguacaaagaacaauucccaucacuauauuauggugggcaacgagaccgggcuggagcucacgcugaccaauacaucuaucaucaaccauaaauucugcaaucuuagcgacgcgcacaagaaaaaccuguacgaucaugcucucauguccauuaucucuaccuuucaccugagcauuccgaauuucaaccaguaugaagccauguccugugacuuuaauggaggcaagaucagcguucaguacaaccugucucacuccuaugccggcgaugcugccaaucauugcgggacaguggcuaacggaguccuccaaaccuucaugcggauggccuggggcgggagcuacauugcgcuggacucuggauguggcaagugggauugcaucaugacguccuaccaguaucuuauuauccagaacacaaccugggaggaccacugucaguuuagccgccccucuccuaucggguaccugggacuccugucccaaagaacacgggauauuuauaucagccgcagacuucugggcaccuucaccuggacacucuccgacucugaaggcaaagauacgcccgggggauacugccugacccgguggaugcugauugaggccgagcucaaguguuuuggcaauacagcuguggccaaaugcaacgaaaagcaugacgaggaguucugcgauaugcugcgccuuuuugacuucaauaaacaggcuauccagagacugaaggccgaagcgcagaugagcauucaacucaucaacaaggccgugaaugcucugaucaacgaucagcuuauuaugaaaaaucaucugcgggacaucauguguauuccuuauugcaacuacuccaaguauugguaccucaaucacaccacaaccgggaaaacgagccugcccaaguguuggcuggucucuaacggauccuaccucaaugaaacacacuucagcgacgauaucgagcagcaagccgacaacaugauuaccgagaugcugcagaaagaauauauggagcgccagggcaagaccccucuugggcugguugaucucuuuguguucucuaccagcuuuuaccugaucuccaucuuccugcaccuugugaaaauuccgacacauagacacaucgucggaaagucuugccccaagccucaucggcucaaucacaugggcauuuguagcugcggccuguauaaacagcccggggugccuguucgcuggaagagaugaggacuagucccuguucccagagcccacuuuuuuuucuuuuuuugaaauaaaauagccugucuuucagaucucaaaggcucuuuucagagccaccaaaaaaaaaaaaaaaaaaaaaaaaaaaaaaaaaaaaaaaaaaaaaaaaaaaaaaaaaaaaaaaaaaaaaaaaaaaaaaaaaaaaaaaaaaaaaaaaaaaaa

SEQ ID NO: 35235 - RNA, 1748 nt, Artificial Sequence
  mRNA product Design a-1 (hSL-A100) comprising derived and/or modified sequence from LASV(Mad39;Clade IV)__ANH09722__GPCmut9 (opt5)
aggagagucccgcagucggcguccagcggcucugcuuguucgugugugugucguugcaggccuuauucaagcuuaccaugggccagaucgugaccuucuuucaagaggucccccacguuauugaagaggugaugaacaucgugcugauugcccucagcauccuggcuguccuuaaggggcuguacaauguggccacaugcggacucauuggccugguuacguuccuucugcucugugggagauccugcaccacaacccuguauaaaggaguguacgaacugcaggcgcucgagcugaacauggaaacacuuaauaugaccaugccucugucuuguacaaagaacaauagccaucacuauauccgggucggcaacgagaccgggcucgagcugacgcuuaccaauacaucccugaucaaccauaaauuuugcaaucucucugacgcucacaagaaaaaccuguacgaucaugcccugaugagcauuaucuccaccuuccaccucucuauuccgaauuuuaaccaguaugaagccaugagcugugacuucaaugauggaaagaucuccgugcaguacaaccugagccacacauaugcuggcgacaccgccaaucauugcggcacgguugcuaacggggugcuucaaacauuuaugcgcauggccuggggaggcucuuacauugcgcuggauuccggguguggaggcugggacugcaucaugaccagcuaccaguaucucauuauccagaacacaaccugggaggaucacugucaguucucuagacccuccccuaucggguaccugggacuucugagccaacggacccgcgacauuuauaucucuagacggcuccugggcacauuuacguggacccuguccgauagcgaaggcaaggacacacccgggggauacugccucacccgcuggaugcugauugaggccgagcuuaaauguuucggcaauacagcugucgccaagugcaacgaaaaacaugaugaggaauuuugcgacaugcugagacucuucgauuuuaauaagcaggcuauccagcggcugaaagccgaggcgcagauguccauucaacuuaucaacaaggccgugaaugcucugaucaacgaccagcucauuaugaagaaucaucugcgcgacaucauguguauuccuuauugcaacuacucuaaauauugguaccugaaucacaccgugacggggaagacaagccuccccaaauguuggcuggucuccaacggaagcuaccuuaaugaaacccacuucucugaugacaucgagcagcaagccgauaacaugauuaccgagaugcugcagaaggaauauauggagagacagggcaaaacaccucucgggcugguugaccuguucguguuuuccaccagcuucuaccuuaucucuaucuuucuccaccuggugaagauuccgacacaucggcacgucgugggaaaacccugcccuaagccccaucgccugaaucacaugggcaucuguagcugcggcuucuauaagcagccugggguucccgugagauggaaacggugaggacuagucccuguucccagagcccacuuuuuuuucuuuuuuugaaauaaaauagccugucuuucagaucucaaaggcucuuuucagagccaccaaaaaaaaaaaaaaaaaaaaaaaaaaaaaaaaaaaaaaaaaaaaaaaaaaaaaaaaaaaaaaaaaaaaaaaaaaaaaaaaaaaaaaaaaaaaaaaaaaaaa

SEQ ID NO: 35236 - RNA, 1748 nt, Artificial Sequence
  mRNA product Design a-1 (hSL-A100) comprising derived and/or modified sequence from LASV(Z0947-SLE-2011;Clade IV)__AIT17840__GPCmut9 (opt5)
aggagagucccgcagucggcguccagcggcucugcuuguucgugugugugucguugcaggccuuauucaagcuuaccaugggccagaucgugaccuucuuucaagaggucccccacguuauugaagaggugaugaacaucgugcugauugcccucagcauccuggcuguccuuaaggggcuguacaauuucgccacaugcggacucgugggccugguuacguuucuucugcucugugggagauccugcaccauuucucuguauaaaggaguguacgaacugcagacacucgagcugaacauggaaacccuuaauaugacaaugccucugagcuguaccaagaacaauucccaucacuauaucauggucggcaacgagacagggcucgagcugacccuuacgaauaccucuaucauuaaccauaaauucugcaaucugagcgacgcgcacaagaaaaaccucuacgaucaugcucugauguccaucauuucuacauuucaccugagcaucccgaauuucaaccaguaugaagccauguccugugacuuuaauggaggcaagauuagcgugcaguacaaccucucucacuccuaugccggcgaugcugccaaucauugcgggaccguugcuaacggagugcugcaaacauucaugcggauggccuggggcgggagcuacaucgcgcuugacucuggaugugaucgcugggacugcauuaugaccuccuaccaguaucugaucauccagaacacgacaugggaggaucacugucaguuuagcagacccucuccuauuggcuaccucgggcugcuuucccaacggacccgcgacaucuauauuagcagacggcugcucggaacauucaccuggacccuguccgauucugaaggcaaggacacacccggcggguacugccugacgcgcuggaugcucaucgaggccgagcugaaauguuuuggaaauaccgcugucgccaagugcaacgaaaaacaugaugaggaguucugcgacaugcuuagacuguuugauuucaauaagcaggcuauucagcggcucaaagccgaagcgcagaugagcauccaacugaucaacaaggccgugaaugcucuuauuaacgaccagcugaucaugaagaaucaccuccgcgacauuauguguaucccuuauugcaacuacuccaaauauugguaccugaaucacacaaccacaggcaagaccagccugcccaaauguuggcucgugucuaacggguccuaccugaaugaaacgcauuucagcgaugacauugagcagcaagccgauaacaugaucacagagaugcuucagaaggaauauauggagagacagggaaaaaccccucugggccucgucgaccuguuuguuuucucuaccagcuuuuaccugaucuccauuuuccuucaccucgugaagaucccgacacaucggcacauuguggggaaacccugcccuaagccccaucgccugaaucacaugggaaucuguucuugcggccuguauaagcagccuggcguccccgugaaauggaagagaugaggacuagucccuguucccagagcccacuuuuuuuucuuuuuuugaaauaaaauagccugucuuucagaucucaaaggcucuuuucagagccaccaaaaaaaaaaaaaaaaaaaaaaaaaaaaaaaaaaaaaaaaaaaaaaaaaaaaaaaaaaaaaaaaaaaaaaaaaaaaaaaaaaaaaaaaaaaaaaaaaaaaa

SEQ ID NO: 35237 - RNA, 1724 nt, Artificial Sequence
  mRNA product Design a-1 (A100) comprising derived and/or modified sequence from LASV(Josiah;Clade IV)__NP_694870__GPCmut9 (opt1)
aggagagucccgcagucggcguccagcggcucugcuuguucgugugugugucguugcaggccuuauucaagcuuaccaugggccagaucgugaccuucuuccaggaggucccccacgugaucgaggaggugaugaacaucguccugaucgcccucagcgugcuggccgugcugaaggggcucuacaacuucgcgaccugcggccuggucgggcuggugacguuccuccugcugugcggccgcuccugcaccaccagccucuacaaggggguguacgagcugcagacccuggagcucaacauggagacgcugaacaugaccaugccgcuguccugcaccaagaacaacagccaccacuacaucauggucggcaacgagaccggccucgagcugacgcugaccaacaccuccaucaucaaccacaaguucugcaaccucagcgacgcccacaagaagaaccuguacgaccacgcccugauguccaucaucagcaccuuccaccucuccauccccaacuucaaccaguacgaggccaugagcugcgacuucaacgggggcaagaucuccgugcaguacaaccugagccacuccuacgccggggacgcggccaaccacugcggcacgguggccaacgggguccugcagaccuucaugcggauggccuggggcggcagcuacaucgcgcucgacuccgggugcggcaacugggacugcaucaugaccagcuaccaguaccugaucauccagaacaccacgugggaggaccacugccaguucucccggcccagccccaucggguaccugggccuccugucccagcgcacccgggacaucuacaucagccgccggcugcucggcaccuucaccuggacgcugagcgacuccgaggggaaggacaccccgggcggguacugccugacccgcuggaugcucaucgaggccgagcugaagugcuucggcaacaccgccguggccaagugcaacgagaagcacgacgaggaguucugcgacaugcugcggcuguucgacuucaacaagcaggccauccagcgccugaaggcggaggcccagaugagcauccagcugaucaacaaggccgugaacgcccucaucaacgaccagcugaucaugaagaaccaccuccgggacaucaugugcauccccuacugcaacuacuccaaguacugguaccucaaccacacgaccaccggccgcaccagccugcccaagugcuggcuggucuccaacggcagcuaccucaacgagacgcacuucuccgacgacaucgagcagcaggccgacaacaugaucaccgagaugcugcagaaggaguacauggagcggcaggggaagacgccccugggccucguggaccuguucguguucagcaccuccuucuaccugaucagcaucuuccugcaccucgucaagaucccgacccaccgccacaucguggggaaguccugccccaagccccaccggcugaaccacaugggcaucugcagcugcgggcuguacaagcagcccggcgugccggucaaguggaagcgcugaggacuagucccuguucccagagcccacuuuuuuuucuuuuuuugaaauaaaauagccugucuuucagaucuaaaaaaaaaaaaaaaaaaaaaaaaaaaaaaaaaaaaaaaaaaaaaaaaaaaaaaaaaaaaaaaaaaaaaaaaaaaaaaaaaaaaaaaaaaaaaaaaaaaa

SEQ ID NO: 35238 - RNA, 1721 nt, Artificial Sequence
  mRNA product Design a-1 (A100) comprising derived and/or modified sequence from LASV(LP;Clade I)__AAF86701__GPCmut9 (opt1)
aggagagucccgcagucggcguccagcggcucugcuuguucgugugugugucguugcaggccuuauucaagcuuaccaugggccagaucaucaccuucuuccaggaggugccccacgucaucgaggaggugaugaacaucgugcugaucgcccucagccugcuggccauccucaaggggcuguacaacaucgcgaccugcggcaucaucgggcuggucgccuuccucuuccugugcggcaaguccugcagccugacgcucaagggcggguacgagcugcagacccuggagcucaacauggagacccugaacaugaccaugccgcuguccugcacgaagaacagcucccaccacuacauccgcgugggcaacgagaccgggcucgagcugacccugaccaacacgagcaucaucaaccacaaguucugcaaccucuccgacgcccacaagaagaaccuguacgaccacgcccugaugagcaucaucuccaccuuccaccucagcauccccaacuucaaccaguacgaggccauguccugcgacuucaacggcgggaagaucagcgugcaguacaaccugucccacagcuacgcgggcgacgccgccgagcacugcgggaccgucgccaacggcgugcugcagaccuucaugcggauggcguggggcgggcgcuacaucgcccucgacuccggcugcgggaacugggacugcaucaugacgagcuaccaguaccugaucauccagaacaccaccugggaggaccacugccaguucucccggcccagccccaucggcuaccugggccuccugucccagcgcacccgggacaucuacaucagccgccggcugcucgggacguucaccuggacccugagcgacuccgagggcaacgagacccccgggggcuacugccugacgcgcuggaugcucaucgaggccgagcugaagugcuucgggaacaccgccguggccaagugcaacgagaagcacgacgaggaguucugcgacaugcugcggcuguucgacuucaacaagcaggcgauccgccggcugaaggccgaggcccagaugagcauccagcugaucaacaaggccgucaacgcccucaucaacgaccagcugaucaugaagaaccaccuccgcgacaucaugugcauccccuacugcaacuacuccaaguacugguaccucaaccacaccagcuccggccggaccagccugcccaagugcuggcugaucuccaacgggagcuaccucaacgagacgcaguucuccgacgacaucgagcagcaggcggacaacaugaucaccgagaugcugcagaaggaguacaucgagcgccagggcaagaccccgcuggggcucguggacaucuucaucuucagcaccuccuucuaccugaucagcaucuuccugcaccugaucaagaucccgacgcaccggcacaucgugggcaagcccugccccaagccccaccgccucaaccacaugggggucugcuccugcggccuguacaagcacccgggcgugcccaccaaguggaagcggugaggacuagucccuguucccagagcccacuuuuuuuucuuuuuuugaaauaaaauagccugucuuucagaucuaaaaaaaaaaaaaaaaaaaaaaaaaaaaaaaaaaaaaaaaaaaaaaaaaaaaaaaaaaaaaaaaaaaaaaaaaaaaaaaaaaaaaaaaaaaaaaaaaaaa

SEQ ID NO: 35239 - RNA, 1721 nt, Artificial Sequence
  mRNA product Design a-1 (A100) comprising derived and/or modified sequence from LASV(803213;Clade II)__AAF86703__GPCmut9 (opt1)
aggagagucccgcagucggcguccagcggcucugcuuguucgugugugugucguugcaggccuuauucaagcuuaccaugggccagaucaucaccuucuuccaggaggugccccacgucaucgaggaggugaugaacaucgugcugaucgcccucagccugcuggccauccucaaggggaucuacaacgucgcgaccugcggccuguucgggcugaucuccuuccuccugcugugcggccgcagcugcuccgugacguacaaggggguguacgagcuccagacccuggagcugaacauggccaaccucaacaugaccaugccgcugagcugcaccaagaacaacucccaccacuacaucauggucggcaacgagacgggccuggagcucacccugaccaacaccagcaucaucaaccacaaguucugcaaccuguccgacgcccacaagaagaaccucuacgaccacgcccugaugagcaucaucuccacguuccaccugagcauccccaacuucaaccaguacgaggccauguccugcgacuucaacgggggcaagaucagcgugcaguacaaccucucccacagcuucgcgguggacgccgccaaccacugcgggaccaucgccaacggcguccugcagaccuucaugcggauggcguggggcggguccuacaucgcccuggacagcggcugcgggaacugggacugcaucaugaccuccuaccaguaccucaucauccagaacacgaccugggaggaccacugccaguucagccgccccucccccaucggcuaccuggggcugcucagccagcggacccgcgacaucuacaucagccggcgccugcugggcaccuucacguggacccucuccgacagcgagggcaacgaggcccccgggggcuacugccugacccgguggaugcugaucgaggccgagcucaagugcuucgggaacaccgccguggcgaagugcaacgagaagcacgacgaggaguucugcgacaugcugcgccuguucgacuucaacaagcaggccaucaagcggcucaagacggaggcccagauguccauccagcugaucaacaaggccgugaacgcccugaucaacgaccagcucaucaugaagaaccaccuccgcgacaucaugugcauccccuacugcaacuacagccgguacugguaccugaaccacaccgucaccgggaagaccucccugccccgcugcuggcuggugagcaacggcuccuaccugaacgagacgcacuucagcgacgacaucgagcagcaggcggacaacaugaucaccgagaugcuccagaaggaguacauggaccggcagggcaagaccccgcuggggcugguggaccucuucgucuucuccaccagcuucuaccugaucuccaucuuccugcaccuggugaagaucccgacgcaccgccacaucgugggcaagcccugccccaagccccaccggcucaaccacauggggaucugcagcugcggccuguacaagcacccggggguccccgugaaguggaagcgcugaggacuagucccuguucccagagcccacuuuuuuuucuuuuuuugaaauaaaauagccugucuuucagaucuaaaaaaaaaaaaaaaaaaaaaaaaaaaaaaaaaaaaaaaaaaaaaaaaaaaaaaaaaaaaaaaaaaaaaaaaaaaaaaaaaaaaaaaaaaaaaaaaaaaa

SEQ ID NO: 35240 - RNA, 1721 nt, Artificial Sequence
  mRNA product Design a-1 (A100) comprising derived and/or modified sequence from LASV(GA391;Clade III)__CAA36645__GPCmut9 (opt1)
aggagagucccgcagucggcguccagcggcucugcuuguucgugugugugucguugcaggccuuauucaagcuuaccaugggccagaucgugaccuucuuccaggaggucccccacgugaucgaggaggugaugaacaucguccugaucgcccucagcauccuggccauccugaaggggcucuacaacguggcgaccugcggccugaucgggcuggugacguuccuccugcuguccggccgcagcugcucccucaucuacaaggggaccuacgagcugcagacccuggagcucaacauggagacccugaacaugacgaugccgcugagcugcaccaagaacaacucccaccacuacauccgggucggcaacgagaccggccucgagcugacccugacgaacaccagcauccucaaccacaaguucugcaaccuguccgacgcccacaagcgcaaccuguacgaccacagccucauguccaucaucagcaccuuccaccuguccauccccaacuucaaccaguacgaggccaugagcugcgacuucaacgggggcaagaucaccgugcaguacaaccugucccacagcuucgccguggacgccgcggggcacugcggcacgcucgccaacgggguccugcagaccuucaugcggauggccuggggcggcuccuacaucgcccuggacagcgggugcggcaacugggacugcaucaugaccuccuaccaguaccucaucauccagaacaccacgugggacgaccacugccaguucagccggcccucccccaucggguaccugggccugcucagccagcgcacccgggacaucuacaucagccgccggcugcugggcaccuucaccuggacgcucuccgacagcgaggggaacgagaccccgggcggguacugccugacccgcuggaugcugaucgaggcggagcucaagugcuucggcaacaccgccguggccaagugcaacgagaagcacgacgaggaguucugcgacaugcugcggcuguucgacuucaacaagcaggccauccgccggcucaagacggaggcccagauguccauccagcugaucaacaaggcggugaacgcccugaucaacgaccagcucaucaugaagaaccaccuccgcgacaucaugugcauccccuacugcaacuacagccgguacugguaccugaaccacaccuccaccggcaagaccagccugccccgcugcuggcugaucuccaacggcagcuaccugaacgagacgaaguucuccgacgacaucgagcagcaggccgacaacaugaucaccgagaugcuccagaaggaguacaucgaccggcaggggaagacgccccugggccuggucgaccuguucguguucagcaccuccuucuaccucaucagcaucuuccugcaccuggugaagaucccgacccaccgccacaucgucgggaagcccugccccaagccccaccggcucaaccacaugggcaucugcuccugcgggcuguacaagcagccgggcgugcccgugcgcuggaagcggugaggacuagucccuguucccagagcccacuuuuuuuucuuuuuuugaaauaaaauagccugucuuucagaucuaaaaaaaaaaaaaaaaaaaaaaaaaaaaaaaaaaaaaaaaaaaaaaaaaaaaaaaaaaaaaaaaaaaaaaaaaaaaaaaaaaaaaaaaaaaaaaaaaaaa

SEQ ID NO: 35241 - RNA, 1724 nt, Artificial Sequence
  mRNA product Design a-1 (A100) comprising derived and/or modified sequence from LASV(AV;Clade V)__CCA30314__GPCmut9 (opt1)
aggagagucccgcagucggcguccagcggcucugcuuguucgugugugugucguugcaggccuuauucaagcuuaccaugggccagaucgugaccuucuuccaggaggucccccacgugaucgaggaggugaugaacaucguccugaucgcccucagcauccuggccgugcugaaggggcucuacaacaucgcgaccugcggccugaucgggcugaucacguuccuccugcugugcggccgcuccugcagcuccaaccucuacaaggggguguacgagcugcagagccuggaccucaacauggagacccugaacaugaccaugccgcuguccugcaccaagaacaacagccaccacuacauccgggucggcaacgacacgggccucgagcugacccugaccaacaccuccauccucaaccacaaguucugcaaccugagcgacgcccacaagaaggaccuguacgaccacgcccucauguccaucaucagcacguuccaccuguccauccccaacuucaaccaguacgaggccaugagcugcgacuucaacgggggcaagaucuccgugcaguacaaccugagccacuccuacgccaucgacgcggccaaccacugcgggaccguggccaacggcauccuccagaccuucaugcgcauggccuggggcgggagcuacaucgcgcuggacuccggcugcgggaacugggacugcaucaugaccagcuaccaguaccugaucauccagaacacgaccugggagaaccacugccaguucucccgccccagccccaucggcuaccucgggcugcugagccagcggacccgcgacaucuacaucucccggcgccuccugggcaccuucacguggacccugagcgacuccgagggcaacgccacccccgggggcuacugccucacccgguggaugcugaucgaggccgagcugaagugcuucgggaacacggccgucgccaagugcaacgagaagcacgacgaggaguucugcgacaugcuccgccuguucgacuucaacaagcaggcgaucagccggcugaaguccgaggcccagaugagcauccagcucaucaacaaggccgugaacgcccugaucaacgaccagcugaucaugaagaaccaccuccgcgacaucaugugcauccccuacugcaacuacuccaaguacugguaccugaaccacaccaucaccgggaagaccagccugcccaagugcuggcucguguccaacggcagcuaccugaacgagacgcacuucuccgacgacaucgagcagcaggccgacaacaugaucaccgagaugcugcagaaggaguacauggagcggcagggcaagaccccgcucgggcuggucgaccuguucguguucagcaccuccuucuaccugaucagcaucuuccuccgccuggugaagaucccgacgcaccggcacaucgucggcaagcccugccccaagccccaccgccugaaccacauggggaucugcuccugcggccucuacaagcagccgggggugcccgugcgguggaagcgcugaggacuagucccuguucccagagcccacuuuuuuuucuuuuuuugaaauaaaauagccugucuuucagaucuaaaaaaaaaaaaaaaaaaaaaaaaaaaaaaaaaaaaaaaaaaaaaaaaaaaaaaaaaaaaaaaaaaaaaaaaaaaaaaaaaaaaaaaaaaaaaaaaaaaa

SEQ ID NO: 35242 - RNA, 1721 nt, Artificial Sequence
  mRNA product Design a-1 (A100) comprising derived and/or modified sequence from LASV(Togo/2016/7082;Clade VI)__AMR44577__GPCmut9 (opt1)
aggagagucccgcagucggcguccagcggcucugcuuguucgugugugugucguugcaggccuuauucaagcuuaccaugggccagaucaucaccuucuuccaggaggugccccacgucaucgaggaggugaugaacaucgugcugaucgcccucagccugcuggccauccucaagggggucuacaacguggcgaccugcggcaucaucgggcuggugacguuccuguuccucugcggccgcuccugcagccugaucuacaagggguccuacgagcugcagacccucgagcugaacauggagacccugaacaugaccaugccgcucagcugcacgaagaacuccagccaccacuacauccgggucggcaacgagaccggccuggagcugacccucaccaacacguccaucaucaaccacaaguucugcaaccugagcgacgcccacaagcgcaaccuguacgaccacgcccucauguccauccugagcaccuuccaccuguccauccccaacuucaaccaguacgaggccaugagcugcgacuucaacgggggcaagaucuccgugcaguacaaccucagccacgccuacgcgguggacgccgccgagcacugcgggaccgucgccaacggcgugcugcagaccuucaugcggauggcguggggcggguccuacaucgcccuggacagcggcugcgggaacugggacugcaucaugacguccuaccaguaccucaucauccagaacaccaccugggaggaccacugccaguucagccggcccucccccaucggcuaccuggggcugcucagccagcgcacccgggacaucuacaucagccgccggcugcugggcacguucaccuggacccucuccgacagcgagggcaacgagacccccgggggcuacugccugacgcgcuggaugcugaucgaggccgagcucaagugcuucgggaacaccgccguggccaagugcaacgagaagcacgacgaggaguucugcgacaugcugcggcuguucgacuucaacaagcaggcgauccagcgccucaaguccgaggcccagaugagcauccagcugaucaacaaggccgucaacgcccugaucaacgaccagcucaucaugaagaaccaccuccgggacaugaugugcauccccuacugcaacuacuccaaguacugguaccugaaccacaccagcuccgggcgcaccagccugcccaagugcuggcugguguccaacggcagcuaccugaacgagacgcacuucuccgacgacaucgagcagcaggccgacaacaugaucaccgagaugcuccagaaggaguacaucgaccggcagggcaagaccccgcuggggcugguggaccucuucgucuucagcaccuccuucuaccugaucagcaucuuccugcaccugaucaagaucccgacgcaccgccacaucgugggcaagcccugccccaagccccaccggcucaaccacauggggaucugcuccugcggccuguacaagcagccgggggugcccacccgcuggaagcggugaggacuagucccuguucccagagcccacuuuuuuuucuuuuuuugaaauaaaauagccugucuuucagaucuaaaaaaaaaaaaaaaaaaaaaaaaaaaaaaaaaaaaaaaaaaaaaaaaaaaaaaaaaaaaaaaaaaaaaaaaaaaaaaaaaaaaaaaaaaaaaaaaaaaa

SEQ ID NO: 35243 - RNA, 1721 nt, Artificial Sequence
  mRNA product Design a-1 (A100) comprising derived and/or modified sequence from LASV(KAK-428;Clade n.d. (VII))__ANH09740__GPCmut9 (opt1)
aggagagucccgcagucggcguccagcggcucugcuuguucgugugugugucguugcaggccuuauucaagcuuaccaugggccagaucgugaccuucuuccaggaggucccccacgugaucgaggaggugaugaacaucguccugaucgcccucagccugcuggccauccucaaggggcuguacaacuucgcgaccugcggcgugaucgggcugaucacguuccuccugcugugcggccgcuccugcagcgccaccuacaaggggcaguacgagcuccagacccuggagcugaacauggagucccucaacaugaccaugccgcugagcugcacgaagaacaacucccaccacuacauccgggccggcaacaacaccggccuggagcucacccugaccaacacgagcaucaucucccacaaguucugcaaccugagcgacgcccacaagaagaaccucuacgaccacacccugauguccaucaucaccaccuuccaccugagcauccccaacuucaaccaguacgaggccauguccugcgacuucaacgggggcaagaucagcauccaguacaaccucucccacagcuacgcgggggacgccgcccagcacugcggcacgguggccaacgggguccugcagaccuucaugcgcauggcguggggcggcuccuaccuggcccucgacagcgggugccgcggcugggacugcaucaucuccagcuaccaguaccugaucauccagaacaccaccugggacgaccacugccaguucucccggcccagccccaucggguaccugggcuucgugagccagaagacgcgcgacaucuacaucucccggcgccuccugggcaccuucaccuggacccugagcgacuccgaggggcacgacaugccgggcggguacugccucacgcgguggaugcugaucgaggccgaccugaagugcuucggcaacaccgccguggccaagugcaacgagaagcacgacgaggaguucugcgacauguggcgccucuucgacuucaacaagcaggcgauccagcggcugaaggccgaggcccagaugaacauccagcugaucaacaaggccgucaacgcccucaucaacgaccagcugaugaugaagaaccaccuccgcgacaucaugugcauccccuacugcaacuacagcaaguucugguaccugaacaacaccaccacgggccggaccucccugccccgcugcuggcugaucagcaacggcuccuaccucaacgagacccacuucagcgacgacaucgagcagcaggcggacaacaugaucaccgagaugcugcagaaggaguacauggaccggcaggggaagacgccccugggccucguggaccuguucguguucuccaccagcuucuaccugaucaccaucuuccuccaccuggucaagaucccgacccaccgccacaucguggggaagcccugccccaagccccaccggcugaaccacaugggcaucugcuccugcgggcuguacaagcagccgggcgugcccguccgcuggaagcggugaggacuagucccuguucccagagcccacuuuuuuuucuuuuuuugaaauaaaauagccugucuuucagaucuaaaaaaaaaaaaaaaaaaaaaaaaaaaaaaaaaaaaaaaaaaaaaaaaaaaaaaaaaaaaaaaaaaaaaaaaaaaaaaaaaaaaaaaaaaaaaaaaaaaa

SEQ ID NO: 35244 - RNA, 1721 nt, Artificial Sequence; identical to SEQ ID NO: 35238
  mRNA product Design a-1 (A100) comprising derived and/or modified sequence from LASV(Pinneo-NIG-1969;Clade I)__AIT17836__GPCmut9 (opt1)

SEQ ID NO: 35245 - RNA, 1721 nt, Artificial Sequence
  mRNA product Design a-1 (A100) comprising derived and/or modified sequence from LASV(ISTH0009-NIG-2011;Clade II)__AIT17404__GPCmut9 (opt1)
aggagagucccgcagucggcguccagcggcucugcuuguucgugugugugucguugcaggccuuauucaagcuuaccaugggccagaucaucaccuucuuccaggaggugccccacgucaucgaggaggugaugaacaucgugcugaucgcccucagccugcuggccauccucaaggggaucuacaacgucgcgaccugcggccuguucgggcugguguccuuccuccugcugugcggccgcagcugcuccacgaccuacaaggggguguacgagcuccagacccuggagcuggacauggccagccucaacaugaccaugccgcuguccugcacgaagaacaacagccaccacuacaucauggucggcaacgagaccggccuggagcucacccugaccaacacguccaucaucaaccacaaguucugcaaccugagcgacgcccacaagaagaaccucuacgaccacgcccugauguccaucaucagcaccuuccaccuguccauccccaacuucaaccaguacgaggccaugagcugcgacuucaacgggggcaagaucuccgugcaguacaaccucagccacgcguacgccguggacgccgccaaccacugcgggaccaucgcgaacggcguccugcagaccuucaugcggauggccuggggcggguccuacaucgcccuggacagcggcugcggguccugggacugcaucaugacgagcuaccaguaccucaucauccagaacaccaccugggaggaccacugccaguucucccgccccagccccaucggcuaccuggggcugcucagccagcggacccgcgacaucuacaucucccggcgccugcugggcacguucaccuggacccucagcgacuccgagggcaacgagacccccgggggcuacugccugacgcgguggaugcugaucgaggccgagcucaagugcuucgggaacaccgccguggcgaagugcaacgagaagcacgacgaggaguucugcgacaugcugcgccuguucgacuucaacaagcaggccauccggcgccucaagaccgaggcccagaugagcauccagcugaucaacaaggccgugaacgcccugaucaacgaccagcucaucaugaagaaccaccuccgggacaucaugugcaucccguacugcaacuacuccaaguacugguaccugaaccacaccgucacggggaagaccagccugccccgcugcuggcugguguccaacggcagcuaccugaacgagacccacuucuccgacgacaucgagcagcaggcggacaacaugaucaccgagcuccugcagaaggaguacauggaccggcagggcaagacgccccuggggcucguggaccuguucgucuucagcaccuccuucuaccugaucagcaucuuccugcaccucaucaagaucccgacccaccgccacaucaccggcaagcccugccccaagccccaccggcugaaccacauggggaucugcuccugcggccuguacaagcacccgggggugcccgugaaguggaagcgcugaggacuagucccuguucccagagcccacuuuuuuuucuuuuuuugaaauaaaauagccugucuuucagaucuaaaaaaaaaaaaaaaaaaaaaaaaaaaaaaaaaaaaaaaaaaaaaaaaaaaaaaaaaaaaaaaaaaaaaaaaaaaaaaaaaaaaaaaaaaaaaaaaaaaa

SEQ ID NO: 35246 - RNA, 1721 nt, Artificial Sequence
  mRNA product Design a-1 (A100) comprising derived and/or modified sequence from LASV(ISTH2010-NIG-2012;Clade II)__AIT17482__GPCmut9 (opt1)
aggagagucccgcagucggcguccagcggcucugcuuguucgugugugugucguugcaggccuuauucaagcuuaccaugggccagaucaucaccuucuuccaggaggugccccacgucaucgaggaggugaugaacaucgugcugaucgcccucagccugcuggccauccucaaggggaucuacaacgucgcgaccugcggccuguucgggcugguguccuuccuccugcugugcggccgcagcugcuccacgaccuacaaggggguguacgagcuccagacccuggagcuggacauggccagccucaacaugaccaugccgcuguccugcacgaagaacaacagccaccacuacaucauggucggcaacgagaccggccuggagcucacccugaccaacacguccaucaucaaccacaaguucugcaaccugagcgacgcccacaagaagaaccucuacgaccacgcccugauguccaucaucagcaccuuccaccuguccauccccaacuucaaccaguacgaggccaugagcugcgacuucaacgggggcaagaucuccgugcaguacaaccucagccacgcguacgccguggacgccgccaaccacugcgggaccaucgcgaacggcguccugcagaccuucaugcggauggccuggggcggguccuacaucgcccuggacagcggcugcggguccugggacugcaucaugacgagcuaccaguaccucaucauccagaacaucaccugggaggaccacugccaguucucccgccccagccccaucggcuaccuggggcugcucagccagcggacccgcgacaucuacaucucccggcgccugcugggcaccuucacguggacccucagcgacuccgagggcaacgagacccccgggggcuacugccugacccgguggaugcugaucgaggccgagcucaagugcuucgggaacacggccguggcgaagugcaacgagaagcacgacgaggaguucugcgacaugcugcgccuguucgacuucaacaagcaggccauccggcgccucaagaccgaggcccagaugagcauccagcugaucaacaaggccgugaacgcccugaucaacgaccagcucaucaugaagaaccaccuccgggacaucaugugcauccccuacugcaacuacuccaaguacugguaccugaaccacaccgucaccgggaagacgagccugccccgcugcuggcugguguccaacggcagcuaccugaacgagacccacuucuccgacgacaucgagcagcaggcggacaacaugaucaccgagcuccugcagaaggaguacaucgaccggcagggcaagaccccgcuggggcucguggaccuguucgucuucagcacguccuucuaccugaucagcaucuuccugcaccucgugaagaucccgacccaccgccacguggucggcaagcccugccccaagccccaccggcugaaccacauggggaucugcuccugcggccuguacaagcacccgggggugcccgugaaguggaagcgcugaggacuagucccuguucccagagcccacuuuuuuuucuuuuuuugaaauaaaauagccugucuuucagaucuaaaaaaaaaaaaaaaaaaaaaaaaaaaaaaaaaaaaaaaaaaaaaaaaaaaaaaaaaaaaaaaaaaaaaaaaaaaaaaaaaaaaaaaaaaaaaaaaaaaa

SEQ ID NO: 35247 - RNA, 1721 nt, Artificial Sequence
  mRNA product Design a-1 (A100) comprising derived and/or modified sequence from LASV(Lassa virus/H.sapiens-wt/NGA/2015/ISTH_0543;Clade II)__AVO03639__GPCmut9 (opt1)
aggagagucccgcagucggcguccagcggcucugcuuguucgugugugugucguugcaggccuuauucaagcuuaccaugggccagaucaucaccuucuuccaggaggugccccacgucaucgaggaggugaugaacaucgugcugaucgcccucagccugcuggccauccucaaggggaucuacaacgucgcgaccugcggccuguucgggcugguguccuuccuccugcugugcggccgcagcugcuccacgaccuacaaggggguguacgagcuccagacccuggagcuggacauggccaaccucaacaugaccaugccgcugagcugcacgaagaacaacucccaccacuacaucauggucggcaacgagaccggccuggagcucacccugaccaacacgagcaucaucaaccacaaguucugcaaccuguccgacgcccacaagaagaaccucuacgaccacgcccugaugagcaucaucuccaccuuccaccugagcauccccaacuucaaccaguacgaggccauguccugcgacuucaacgggggcaagaucagcgugcaguacaaccucucccacaccuacgcgguggacgccgccaaccacugcgggaccaucgccaacggcguccugcagacguucaugcggauggcguggggcgggagcuacaucgcccuggacuccggcugcgggagcugggacugcaucaugaccuccuaccaguaccucgugauccagaacaccaccugggaggaccacugccaguucagccgccccucccccaucggcuaccuggggcugcucagccagcggacgcgcgacaucuacaucagccggcgccugcugggcaccuucaccuggacccucuccgacagcgagggcaacgagacgcccgggggcuacugccugacccgguggaugcugaucgaggccgagcucaagugcuucgggaacaccgccguggccaagugcaacgagaagcacgacgaggaguucugcgacaugcugcgccuguucgacuucaacaagcaggcgauccggcgccucaagaccgaggcccagauguccauccagcugaucaacaaggccgucaacgcccugaucaacgaccagcucaucaugaagaaccaccuccgggacaucaugugcauccccuacugcaacuacagcaaguacugguaccugaaccacacggugaccgggaagaccucccugccccgcugcuggcuggugagcaacggcuccuaccugaacgagacccacuucagcgacgacaucgagcagcaggccgacaacaugaucacggagcuccugcagaaggaguacaucgaccggcagggcaagaccccgcuggggcucgucgaccuguucguguucuccaccagcuucuaccugaucuccaucuuccugcaccucgugaagaucccgacccaccgccacaucacgggcaagcccugccccaagccccaccggcugaaccacauggggaucugcagcugcggccuguacaagcacccggggguccccgugaaguggaagcgcugaggacuagucccuguucccagagcccacuuuuuuuucuuuuuuugaaauaaaauagccugucuuucagaucuaaaaaaaaaaaaaaaaaaaaaaaaaaaaaaaaaaaaaaaaaaaaaaaaaaaaaaaaaaaaaaaaaaaaaaaaaaaaaaaaaaaaaaaaaaaaaaaaaaaa

SEQ ID NO: 35248 - RNA, 1721 nt, Artificial Sequence
  mRNA product Design a-1 (A100) comprising derived and/or modified sequence from LASV(Lassa virus/H.sapiens-wt/NGA/2016/ISTH_0009;Clade II)__AVO03571__GPCmut9 (opt1)
aggagagucccgcagucggcguccagcggcucugcuuguucgugugugugucguugcaggccuuauucaagcuuaccaugggccagaucaucaccuucuuccaggaggugccccacgucaucgaggaggugaugaacaucgugcugaucgcccucagccugcuggccauccucaaggggaucuacaacgucgcgaccugcggccugcuggggcucguguccuuccugcugcucugcggccgcagcugcuccacgaccuacaaggggguguacgagcugcagacccuggagcucgacauggccagccugaacaugaccaugccgcuguccugcacgaagaacaacagccaccacuacaucauggucggcaacgagaccggccucgagcugacccugaccaacacguccaucaucaaccacaaguucugcaaccucagcgacgcccacaagaagaaccuguacgaccacgcccugauguccaucaucagcaccuuccaccucuccauccccaacuucaaccaguacgaggccaugagcugcgacuucaacgggggccggaucuccgugcaguacaaccugagccacuccuacgcgguggacgccgccaaccacugcgggaccaucgccaacggcguccugcagaccuucaugcgcauggcguggggcgggagcuacaucgcccucgacuccggcugcgggagcugggacugcaucaugacguccuaccaguaccugaucauccagaacaccaccugggaggaccacugccaguucagccggcccagccccaucggcuaccuggggcuccugucccagcgcacccgggacaucuacaucagccgccggcugcucggcacguucaccuggacccuguccgacagcgagggcaacgagacccccgggggcuacugccugacgcgcuggaugcucaucgaggccgagcugaagugcuucgggaacaccgccguggccaagugcaacgagaagcacgacgaggaguucugcgacaugcugcggcuguucgacuucaacaagcaggcgauccgccggcugaagaccgaggcccagauguccauccagcugaucaacaaggccgugaacgcccucaucaacgaccagcugaucaugaagaaccaccuccgcgacaucaugugcaucccguacugcaacuacagcaaguacugguaccucaaccacaccgucacggggaagaccucccugccccggugcuggcuggugagcaacggcuccuaccucaacgagacccacuucagcgacgacaucgagcagcaggccgacaacaugaucaccgagcugcugcagaaggaguacaucgaccgccagggcaagacgccccucgggcugguggaccuguucgucuucuccaccagcuucuaccugaucuccaucuuccuccaccuggugaagaucccgacccaccggcacaucaccggcaagcccugccccaagccccaccgccugaaccacauggggaucugcagcugcggccucuacaaccacccgggggugcccgucaaguggaagcggugaggacuagucccuguucccagagcccacuuuuuuuucuuuuuuugaaauaaaauagccugucuuucagaucuaaaaaaaaaaaaaaaaaaaaaaaaaaaaaaaaaaaaaaaaaaaaaaaaaaaaaaaaaaaaaaaaaaaaaaaaaaaaaaaaaaaaaaaaaaaaaaaaaaaa

SEQ ID NO: 35249 - RNA, 1721 nt, Artificial Sequence
  mRNA product Design a-1 (A100) comprising derived and/or modified sequence from LASV(Lassa virus/H.sapiens-wt/NGA/2016/ISTH_0017;Clade II)__AVO03567__GPCmut9 (opt1)
aggagagucccgcagucggcguccagcggcucugcuuguucgugugugugucguugcaggccuuauucaagcuuaccaugggccagaucaucaccuucuuccaggaggugccccacgucaucgaggaggugaugaacaucgugcugaucgcccucagccugcuggccauccucaaggggaucuacaacgucgcgaccugcggccuguucgggcugguguccuuccuccugcugugcggccgcagcugcuccacgaccuacaaggggguguacgagcuccagacccuggagcuggacauggccagccucaacaugaccaugccgcuguccugcacgaagaacaacagccaccacuacaucauggucggcaacgagaccggccuggagcucacccugaccaacacguccaucaucaaccacaaguucugcaaccugagcgacgcccacaagaagaaccucuacgaccacgcccugauguccaucaucagcaccuuccaccuguccauccccaacuucaaccaguacgaggccaugagcugcgacuucaacgggggcaagaucuccgugcaguacaaccucagccacaccuacgcgaucgacgccgccaaccacugcgggaccaucgccaacggcgugcugcagacguucaugcggauggcguggggcggguccuacaucgcccuggacagcggcugcggguccugggacugcaucaugaccagcuaccaguaccucaucauccagaacaccaccugggaggaccacugccaguucucccgccccagccccaucggcuaccuggggcugcucagccagcggacgcgcgacaucuacaucucccggcgccugcugggcaccuucaccuggacccucagcgacuccgagggcaacgagacgcccgggggcuacugccugacccgguggaugcugaucgaggccgagcucaagugcuucgggaacaccgccgucgccaagugcaacgagaagcacgacgaggaguucugcgacaugcugcgccuguucgacuucaacaagcaggcgauccggcgccucaagaccgaggcccagaugagcauccagcugaucaacaaggccgugaacgcccugaucaacgaccagcucaucaugaagaaccaccuccgggacaucaugugcauccccuacugcaacuacuccaaguacugguaccugaaccacacggugaccgggaagaccagccugccccgcugcuggcuggucuccaacggcagcuaccugaacgagacccacuucuccgacgacaucgagcagcaggccgacaacaugaucacggagcuccugcagaaggaguacauggaccggcagggcaagaccccgcuggggcucguggaccuguucguguucagcaccuccuucuaccugaucagcaucuuccugcaccucguccgcaucccgacccaccggcacgugaucggcaagcccugccccaagccccaccgccugaaccacauggggaucugcuccugcggccuguacaagcacccgggggugcccgucaaguggaagcggugaggacuagucccuguucccagagcccacuuuuuuuucuuuuuuugaaauaaaauagccugucuuucagaucuaaaaaaaaaaaaaaaaaaaaaaaaaaaaaaaaaaaaaaaaaaaaaaaaaaaaaaaaaaaaaaaaaaaaaaaaaaaaaaaaaaaaaaaaaaaaaaaaaaaa

SEQ ID NO: 35250 - RNA, 1721 nt, Artificial Sequence
  mRNA product Design a-1 (A100) comprising derived and/or modified sequence from LASV(Lassa virus/H.sapiens-wt/NGA/2018/ISTH_0959;Clade II)__AVV65099__GPCmut9 (opt1)
aggagagucccgcagucggcguccagcggcucugcuuguucgugugugugucguugcaggccuuauucaagcuuaccaugggccagaucaucaccuucuuccaggaggugccccacgucaucgaggaggugaugaacaucgugcugaucgcccucagccugcuggccauccucaaggggaucuacaacgucgugaccugcggccuguucgggcugguguccuuccuccugcugugcggccgcagcugcuccacgaccuacaagggggucuacgagcuccagacccuggagcuggacauggcgagccucaacaugaccaugccgcuguccugcacgaagaacaacagccaccacuacaucauggugggcaacgagaccggccuggagcucacccugaccaacacguccaucaucaaccacaaguucugcaaccugagcgacgcccacaagaagaaccucuacgaccacgcccugauguccaucaucagcaccuuccaccuguccauccccaacuucaaccaguacgaggccaugagcugcgacuucaacgggggcaagaucuccgugcaguacaaccucagccacgccuacgcgaucgacgccgccaaccacugcgggaccaucgccaacggcguccugcagaccuucaugcggauggcguggggcggguccuacaucgcccuggacagcggcugcggguccugggacugcaucaugacgagcuaccaguaccucaucauccagaacaccaccugggaggaccacugccaguucucccgccccagccccaucggcuaccuggggcugcucagccagcggacccgcgacaucuacaucucccggcgccugcugggcacguucaccuggacccucagcgacuccgagggcaacgagacccccgggggcuacugccugacgcgguggaugcugaucgaggccgagcucaagugcuucgggaacaccgccguggccaagugcaacgagaagcacgacgaggaguucugcgacaugcugcgccuguucgacuucaacaagcaggcgauccggcgccucaagaccgaggcccagaugagcauccagcugaucaacaaggccgugaacgcccugaucaacgaccagcucaucaugaagaaccaccuccgggacaucaugugcaucccguacugcaacuacuccaaguacugguaccugaaccacaccgucacggggaagaccagccugccccgcugcuggcugguguccaacggcagcuaccugaacgagacccacuucuccgacgacaucgagcagcaggccgacaacaugaucaccgagcuccugcagaaggaguacaucgaccggcagggcaagacgccccuggggcucguggaccuguucgucuucagcaccuccuucuaccugaucagcaucuuccugcaccucgugaagaucccgacccaccgccacgugaucggcaagcccugccccaagccccaccggcugaaccacauggggaucugcuccugcggccuguacaagcacccggggguccccgugaaguggaagcgcugaggacuagucccuguucccagagcccacuuuuuuuucuuuuuuugaaauaaaauagccugucuuucagaucuaaaaaaaaaaaaaaaaaaaaaaaaaaaaaaaaaaaaaaaaaaaaaaaaaaaaaaaaaaaaaaaaaaaaaaaaaaaaaaaaaaaaaaaaaaaaaaaaaaaa

SEQ ID NO: 35251 - RNA, 1721 nt, Artificial Sequence
  mRNA product Design a-1 (A100) comprising derived and/or modified sequence from LASV(LASV003-NIG-2008;Clade II)__AIT17580__GPCmut9 (opt1)
aggagagucccgcagucggcguccagcggcucugcuuguucgugugugugucguugcaggccuuauucaagcuuaccaugggccagaucaucaccuucuuccaggaggugccccacgucaucgaggaggugaugaacaucgugcugaucgcccucagccugcuggccauccucaaggggaucuacaacgucgcgaccugcggccuguucgggcugguguccuuccuccugcugugcggccgcagcugcuccacgaccuacaaggggguguacgagcuccagacccuggagcuggacauggccagccucaacaugaccaugccgcuguccugcacgaagaacaacagccaccacuacaucauggucggcaacgagaccggccuggagcucacccugaccaacacguccaucaucaaccacaaguucugcaaccugagcgacgcccacaagaagaaccucuacgaccacgcccugauguccaucaucagcaccuuccaccuguccauccccaacuucaaccaguacgaggccaugagcugcgacuucaacgggggcaagaucuccgugcaguacaaccucagccacaccuacgcgguggacgccgccaaccacugcgggaccaucgccaacggcguccugcagacguucaugcggauggcguggggcggguccuacaucgcccuggacagcggcugcggguccugggacugcaucaugaccagcuaccaguaccucaucauccagaacaccaccugggaggaccacugccaguucucccgccccagccccaucggcuaccuggggcugcucagccagcggacgcgcgacaucuacaucucccggcgccugcugggcaccuucaccuggacccucagcgacuccgagagcaacgagacgccgggcggguacugccugacccgguggaugcugaucgaggccgagcucaagugcuucggcaacaccgccguggccaagugcaacgagaagcacgacgaggaguucugcgacaugcugcgccuguucgacuucaacaagcaggcgauccggcgccucaaggccgaggcccagauguccauccagcugaucaacaaggccgugaacgcccugaucaacgaccagcucaucaugaagaaccaccuccgggacaucaugugcauccccuacugcaacuacagcaaguacugguaccugaaccacaccgucacgggccgcaccucccugccccggugcuggcuggugagcaacggguccuaccugaacgagacccacuucagcgacgacaucgagcagcaggcggacaacaugaucaccgagcuccugcagaaggaguacauggaccgccagggcaagacgccccugggccucguggaccuguucgucuucuccaccagcuucuaccugaucuccaucuuccugcaccucgugaagaucccgacccaccggcacgugaucgggaagcccugccccaagccccaccgccugaaccacaugggcaucugcagcugcgggcuguacaagcacccgggcguccccgugaaguggaagcggugaggacuagucccuguucccagagcccacuuuuuuuucuuuuuuugaaauaaaauagccugucuuucagaucuaaaaaaaaaaaaaaaaaaaaaaaaaaaaaaaaaaaaaaaaaaaaaaaaaaaaaaaaaaaaaaaaaaaaaaaaaaaaaaaaaaaaaaaaaaaaaaaaaaaa

SEQ ID NO: 35252 - RNA, 1721 nt, Artificial Sequence
  mRNA product Design a-1 (A100) comprising derived and/or modified sequence from LASV(LASV035-NIG-2009;Clade II)__AIT17588__GPCmut9 (opt1)
aggagagucccgcagucggcguccagcggcucugcuuguucgugugugugucguugcaggccuuauucaagcuuaccaugggccagaucaucaccuucuuccaggaggugccccacgucaucgaggaggugaugaacaucgugcugaucgcccucagccugcuggccauccucaaggggaucuacaacgucgcgaccugcggccuguucgggcugguguccuuccuccugcugugcggccgcagcugcuccacgaccuacaaggggguguacgagcuccagacccuggagcuggacauggccagccucaacaugaccaugccgcuguccugcacgaagaacaacagccaccacuacaucauggucggcaacgagaccggccuggagcucacccugaccaacacguccaucaucaaccacaaguucugcaaccugagcgacgcccacaagaagaaccucuacgaccacgcccugauguccaucaucagcaccuuccaccuguccauccccaacuucaaccaguacgaggccaugagcugcgacuucaacgggggcaagaucuccgugcaguacaaccucagccacgcguacgccguggacgccgccaaccacugcgggaccaucgcgaacggcguccugcagaccuucaugcggauggccuggggcggguccuacaucgcccuggacagcggcugcggguccugggacugcaucaugacgagcuaccaguaccucaucauccagaacaccaccugggaggaccacugccaguucucccgccccagccccaucggcuaccuggggcugcucagccagcggacccgcgacaucuacaucucccggcgccugcugggcacguucaccuggacccucagcgacuccgagggcaacgagacccccgggggcuacugccugacgcgguggaugcugaucgaggccgagcucaagugcuucgggaacaccgccguggcgaagugcaacgagaagcacgacgaggaguucugcgacaugcugcgccuguucgacuucaacaagcaggccauccggcgccucaaggccgaggcccagaugagcauccagcugaucaacaaggccgugaacgcgcugaucaacgaccagcucaucaugaagaaccaccuccgggacaucaugugcauccccuacugcaacuacuccaaguacugguaccugaaccacaccgucaccgggaagacgagccugccccgcugcuggcugguguccaacggcagcuaccugaacgagacccacuucuccgacgacaucgagcagcaggccgacaacaugaucaccgagcuccugcagaaggaguacaucgaccggcagggcaagaccccgcuggggcucguggaccuguucgucuucagcacguccuucuaccugaucagcaucuuccugcaccucgugaagaucccgacccaccgccacgugaucggcaagcccugccccaagccccaccggcugaaccacauggggaucugcuccugcggccuguacaagcacccggggguccccgugaaguggaagcgcugaggacuagucccuguucccagagcccacuuuuuuuucuuuuuuugaaauaaaauagccugucuuucagaucuaaaaaaaaaaaaaaaaaaaaaaaaaaaaaaaaaaaaaaaaaaaaaaaaaaaaaaaaaaaaaaaaaaaaaaaaaaaaaaaaaaaaaaaaaaaaaaaaaaaa

SEQ ID NO: 35253 - RNA, 1721 nt, Artificial Sequence
  mRNA product Design a-1 (A100) comprising derived and/or modified sequence from LASV(LASV1000-NIG-2009;Clade II)__AIT17782__GPCmut9 (opt1)
aggagagucccgcagucggcguccagcggcucugcuuguucgugugugugucguugcaggccuuauucaagcuuaccaugggccagaucaucaccuucuuccaggaggugccccacgucaucgaggaggugaugaacaucgugcugaucgcccucagccugcuggccauccucaaggggaucuacaacgucgcgaccugcggccuguucgggcugguguccuuccuccugcugugcggccgcagcugcuccacgaccuacaaggggguguacgagcuccagacccuggagcuggacauggccagccucaacaugaccaugccgcuguccugcacgaagaacaacagccaccacuacaucauggucggcaacgagaccggccuggagcucacccugaccaacacguccaucaucaaccacaaguucugcaaccugagcgacgcccacaagaagaaccucuacgaccacgcccugauguccaucaucagcaccuuccaccuguccauccccaacuucaaccaguacgaggccaugagcugcgacuucaacgggggcaagaucuccgugcaguacaaccucagccacaccuacgcgguggacgccgccaaccacugcgggaccaucgccaacggcguccugcagacguucaugcggauggcguggggcggguccuacaucgcccuggacagcggcugcggguccugggacugcaucaugaccagcuaccaguaccucaucauccagaacaccaccugggaggaccacugccaguucucccgccccagccccaucggcuaccuggggcugcucagccagcggacgcgcgacaucuacaucucccggcgccugcugggcaccuucaccuggacccucagcgacuccgagggcaacgagacgcccgggggcuacugccugacccgguggaugcugaucgaggccgagcucaagugcuucgggaacaccgccguggccaagugcaacgagaagcacgacgaggaguucugcgacaugcugcgccuguucgacuucaacaagcaggcgaucaagcggcucaagaccgaggcccagaugagcauccagcugaucaacaaggccgugaacgcccugaucaacgaccagcucaucaugaagaaccaccuccgcgacaucaugugcauccccuacugcaacuacuccaaguacugguaccugaaccacacggucaccgggaagaccagccugccccggugcuggcugguguccaacggcagcuaccugaacgagacccacuucuccgacgacaucgagcagcaggccgacaacaugaucacggagcuccugcagaaggaguacaucgaccgccagggcaagaccccgcuggggcucguggaccuguucgucuucagcaccuccuucuaccugaucagcaucuuccugcaccucgugaagaucccgacccaccggcacguggucggcaagcccugccccaagccccaccgccugaaccacauggggaucugcuccugcggccuguacaagcacccgggggugcccgugaaguggaagcggugaggacuagucccuguucccagagcccacuuuuuuuucuuuuuuugaaauaaaauagccugucuuucagaucuaaaaaaaaaaaaaaaaaaaaaaaaaaaaaaaaaaaaaaaaaaaaaaaaaaaaaaaaaaaaaaaaaaaaaaaaaaaaaaaaaaaaaaaaaaaaaaaaaaaa

SEQ ID NO: 35254 - RNA, 1721 nt, Artificial Sequence
  mRNA product Design a-1 (A100) comprising derived and/or modified sequence from LASV(LASV221-NIG-2010;Clade II)__AIT17624__GPCmut9 (opt1)
aggagagucccgcagucggcguccagcggcucugcuuguucgugugugugucguugcaggccuuauucaagcuuaccaugggccagaucaucaccuucuuccaggaggugccccacgucaucgaggaggugaugaacaucgugcugaucgcccucagccugcuggccauccucaaggggaucuacaacgucgcgaccugcggccuguucgggcugguguccuuccuccugcugugcggccgcagcugcuccacgaccuacaaggggguguacgagcuccagacccuggagcuggacauggccagccucaacaugaccaugccgcuguccugcacgaagaacaacagccaccacuacaucauggucggcaacgagaccggccuggagcucacccugaccaacacguccaucaucaaccacaaguucugcaaccugagcgacgcccacaagaagaaccucuacgaccacgcccugauguccaucaucagcaccuuccaccuguccauccccaacuucaaccaguacgaggccaugagcugcgacuucaacgggggcaagaucuccgugcaguacaaccucagccacaccuacgcgaucgacgccgccaaccacugcgggaccaucgccaacggcgugcugcagacguucaugcggauggcguggggcggguccuacaucgcccuggacagcggcugcggguccugggacugcaucaugaccagcuaccaguaccucaucauccagaacaccaccugggaggaccacugccaguucucccgccccagccccaucggcuaccuggggcugcucagccagcggacgcgcgacaucuacaucucccggcgccugcugggcaccuucaccuggacccucagcgacuccgagggcaacgagacgcccgggggcuacugccugacccgguggaugcugaucgaggccgagcucaagugcuucgggaacaccgccgucgccaagugcaacgagaagcacgacgaggaguucugcgacaugcugcgccuguucgacuucaacaagcaggcgauccggcgccucaagaccgaggcccagaugagcauccagcugaucaacaaggccgugaacgcccugaucaacgaccagcucaucaugaagaaccaccuccgggacaucaugugcauccccuacugcaacuacuccaaguacugguaccugaaccacacggugaccgggaagaccagccugccccgcugcuggcuggucuccaacggcagcuaccugaacgagacccacuucuccgacgacaucgagcagcaggccgacaacaugaucacggagaugcuccagaaggaguacauggaccggcagggcaagaccccgcuggggcugguggaccucuucguguucagcaccuccuucuaccugaucagcaucuuccugcaccuggucaagaucccgacccaccgccacgugaucggcaagcccugccccaagccccaccggcucaaccacauggggaucugcuccugcggccuguacaagcacccgggggugcccgucaaguggaagcgcugaggacuagucccuguucccagagcccacuuuuuuuucuuuuuuugaaauaaaauagccugucuuucagaucuaaaaaaaaaaaaaaaaaaaaaaaaaaaaaaaaaaaaaaaaaaaaaaaaaaaaaaaaaaaaaaaaaaaaaaaaaaaaaaaaaaaaaaaaaaaaaaaaaaaa

SEQ ID NO: 35255 - RNA, 1721 nt, Artificial Sequence
  mRNA product Design a-1 (A100) comprising derived and/or modified sequence from LASV(LASV237-NIG-2010;Clade II)__AIT17638__GPCmut9 (opt1)
aggagagucccgcagucggcguccagcggcucugcuuguucgugugugugucguugcaggccuuauucaagcuuaccaugggccagaucaucaccuucuuccaggaggugccccacgucaucgaggaggugaugaacaucgugcugaucgcccucagccugcuggccauccucaaggggaucuacaacgucgcgaccugcggccuguucgggcugguguccuuccuccugcugugcggccgcagcugcuccacgaccuacaaggggguguacgagcuccagacccuggagcuggacauggccagccucaacaugaccaugccgcuguccugcacgaagaacaacagccaccacuacaucauggucggcaacgagaccggccuggagcucacccugaccaacacguccaucaucaaccacaaguucugcaaccugagcgacgcccacaagaaggaccucuacgaccacgcccugauguccaucaucagcaccuuccaccuguccauccccaacuucaaccaguacgaggccaugagcugcgacuucaacgggggcaagaucuccgugcaguacaaccucagccacaccuacgcgguggacgccgccaaccacugcgggaccaucgccaacggcguccugcagacguucaugcggauggcguggggcggguccuacaucgcccuggacagcggcugcggguccugggacugcaucaugaccagcuaccaguaccucaucauccagaacaccaccugggaggaccacugccaguucucccgccccagccccaucggcuaccuggggcugcucagccagcggacgcgcgacaucuacaucucccggcgccugcugggcaccuucaccuggacccucagcgacuccgagggcaacgagacgcccgggggcuacugccugacccgguggaugcugaucgaggccgagcucaagugcuucgggaacaccgccguggccaagugcaacgagaagcacgacgaggaguucugcgacaugcugcgccuguucgacuucaacaagcaggcgauccggcgccucaagaccgaggcccagaugagcauccagcugaucaacaaggccgugaacgcccugaucaacgaccagcucaucaugaagaaccaccuccgggacaucaugugcauccccuacugcaacuacuccaaguacugguaccugaaccacacggucaccgggaagaccagccugccccgcugcuggcugguguccaacggcagcuaccugaacgagacccacuucuccgacgacaucgagcagcaggccgacaacaugaucacggagcuccugcagaaggaguacauggaccggcagggcaagaccccgcuggggcucguggaccuguucgucuucagcaccuccuucuaccugaucagcaucuuccugcaccucaucaagaucccgacccaccgccacaucacgggcaagcccugccccaagccccaccggcugaaccacauggggaucugcuccugcggccuguacaagcacccgggggugcccgugaaguggaagcgcugaggacuagucccuguucccagagcccacuuuuuuuucuuuuuuugaaauaaaauagccugucuuucagaucuaaaaaaaaaaaaaaaaaaaaaaaaaaaaaaaaaaaaaaaaaaaaaaaaaaaaaaaaaaaaaaaaaaaaaaaaaaaaaaaaaaaaaaaaaaaaaaaaaaaa

SEQ ID NO: 35256 - RNA, 1721 nt, Artificial Sequence
  mRNA product Design a-1 (A100) comprising derived and/or modified sequence from LASV(LASV253-NIG-2011;Clade II)__AIT17670__GPCmut9 (opt1)
aggagagucccgcagucggcguccagcggcucugcuuguucgugugugugucguugcaggccuuauucaagcuuaccaugggccagaucaucaccuucuuccaggaggugccccacgucaucgaggaggugaugaacaucgugcugaucgcccucagccugcuggccauccucaaggggaucuacaacgucgcgaccugcggccuguucgggcugguguccuuccuccugcugugcggccgcagcugcuccacgaccuacaaggggguguacgagcuccagacccuggagcuggacauggccagccucaacaugaccaugccgcuguccugcacgaagaacaacagccaccacuacaucauggucggcaacgagaccggccuggagcucacccugaccaacacguccaucaucaaccacaaguucugcaaccugagcgacgcccacaagaagaaccucuacgaccacgcccugauguccaucaucagcaccuuccaccuguccauccccaacuucaaccaguacgaggccaugagcugcgacuucaacgggggcaagaucuccgugcaguacaaccucagccacaccuacgcgguggacgccgccaaccacugcgggaccaucgccaacggcguccugcagacguucaugcggauggcguggggcggguccuacaucgcccuggacagcggcugcggguccugggacugcaucaugaccagcuaccaguaccucaucauccagaacaccaccugggaggaccacugccaguucucccgccccagccccaucggcuaccuggggcugcucagccagcggacgcgcgacaucuacaucucccggcgccugcugggcaccuucaccuggacccucagcgacuccgagggcaacgagacgcccgggggcuacugccugacccgguggaugcugaucgaggccgagcucaagugcuucgggaacaccgccguggccaagugcaacgagaagcacgacgaggaguucugcgacaugcugcgccuguucgacuucaacaagcaggcgauccggcgccucaaggccgaggcccagaugagcauccagcugaucaacaaggccgugaacgcccugaucaacgaccagcucaucaugaagaaccaccuccgggacaucaugugcaucccguacugcaacuacuccaaguacugguaccugaaccacaccgucacggggcgcaccagccugccccggugcuggcugguguccaacggcagcuaccugaacgagacccacuucuccgacgacaucgagcagcaggcggacaacaugaucaccgagcuccugcagaaggaguacaucgaccgccagggcaagacgccccuggggcucguggaccuguucgucuucagcaccuccuucuaccugaucagcaucuuccugcaccucgugaagaucccgacccaccggcacaucaucggcaagcccugccccaagccccaccgccugaaccacauggggaucugcuccugcggccuguacaagcacccgggggugcccgucaaguggaagcggugaggacuagucccuguucccagagcccacuuuuuuuucuuuuuuugaaauaaaauagccugucuuucagaucuaaaaaaaaaaaaaaaaaaaaaaaaaaaaaaaaaaaaaaaaaaaaaaaaaaaaaaaaaaaaaaaaaaaaaaaaaaaaaaaaaaaaaaaaaaaaaaaaaaaa

SEQ ID NO: 35257 - RNA, 1721 nt, Artificial Sequence
  mRNA product Design a-1 (A100) comprising derived and/or modified sequence from LASV(LASV254-NIG-2011;Clade II)__AIT17674__GPCmut9 (opt1)
aggagagucccgcagucggcguccagcggcucugcuuguucgugugugugucguugcaggccuuauucaagcuuaccaugggccagaucaucaccuucuuccaggaggugccccacgucaucgaggaggugaugaacaucgugcugaucgcccucagccugcuggccauccucaaggggaucuacaacgucgcgaccugcggccuguucgggcugguguccuuccuccugcugugcggccgcagcugcuccacgaccuacaaggggguguacgagcuccagacccuggagcuggacaugaccaaccucaacaugacgaugccgcugagcugcaccaagaacaacucccaccacuacaucauggucggcaacgagaccggccuggagcucacccugacgaacaccagcaucaucaaccacaaguucugcaaccuguccgacgcccacaagaagaaccucuacaaccacgcccugaugagcaucaucuccaccuuccaccugagcauccccaacuucaaccaguacgaggccauguccugcgacuucaacgggggcaagaucagcgugcaguacaaccucucccacagcuacgccguggacgcggccaaccacugcgggaccaucgccaacggcguccugcagacguucaugcggauggccuggggcggguccuacaucgcgcuggacagcggcugcgggaacugggacugcaucaugaccuccuaccaguaccucaucauccagaacaccaccugggaggaccacugccaguucagccgccccucccccaucggcuaccuggggcugcucagccagcggacgcgcgacaucuacaucagccggcgccugcugggcaccuucaccuggacccucuccgacagcgagggcaacgagacgcccgggggcuacugccugacccgguggaugcugaucgaggccgagcucaagugcuucgggaacaccgccguggccaagugcaacgagaagcacgacgaggaguucugcgacaugcugcgccuguucgacuucaacaagcaggccauccggcgccucaagaccgaggcgcaggccaacauccagcugaucaacaaggccgugaacgcccugaucaacgaccagcucaucaugaagaaccaccuccgggacaucaugugcauccccuacugcaacuacuccaaguacugguaccugaaccacacggucaccgggaagaccagccugccccgcugcuggcugguguccaacggcagcuaccugaacgagacccacuucuccgacgacaucgagcagcaggccgacaacaugaucacggagcuccugcagaaggaguacauggaccggcagggcaagaccccgcuggggcucguggaccuguucgucuucagcaccuccuucuaccugaucagcaucuuccugcaccucgugaagaucccgacccaccgccacgugaucggcaagcccugccccaagccccaccggcugaaccacauggggaucugcuccugcggccuguacaagcacccggggguccccgugaaguggaagcgcugaggacuagucccuguucccagagcccacuuuuuuuucuuuuuuugaaauaaaauagccugucuuucagaucuaaaaaaaaaaaaaaaaaaaaaaaaaaaaaaaaaaaaaaaaaaaaaaaaaaaaaaaaaaaaaaaaaaaaaaaaaaaaaaaaaaaaaaaaaaaaaaaaaaaa

SEQ ID NO: 35258 - RNA, 1721 nt, Artificial Sequence
  mRNA product Design a-1 (A100) comprising derived and/or modified sequence from LASV(Nig08-A19;Clade III)__ADU56618__GPCmut9 (opt1)
aggagagucccgcagucggcguccagcggcucugcuuguucgugugugugucguugcaggccuuauucaagcuuaccaugggccagaucgugaccuucuuccaggaggucccccacgugaucgaggaggugaugaacaucguccugaucgcccucagcauccuggccauccugaaggggcucuacaacaucgcgaccugcggccugaucgggcuggugacguuccuccugcuguccggccgcagcugcuccaugaccuacaaggggguguacgagcuccagacccuggagcugaacaugaacacccucaacaugacgaugccgcugagcugcaccaagaacaacucccaccacuacaucauggucggcaacgagaccggccuggagcucacccugacgaacaccagccugcuccaccacaaguucugcaaccuguccgacgcccacaagaagaaccuguacgaccacacccucaugagcaucaucuccaccuuccaccugagcauccccaacuucaaccaguacgaggccauguccugcgacuucaacgggggcaagaucacggugcaguacaaccugagccacuccuacgccaucgacgccgcgaaccacugcgggaccguggccaacggcguccuccagaccuucaugcggauggccuggggcgggagcuacaucgcccuggacuccggcugcgggaagugggacugcaucaugaccagcuaccaguaccugaucauccagaacacgaccugggaggaccacugccaguucucccggcccagccccaucggcuaccucgggcugcugucccagcgcacccgggacaucuacaucagccgccggcuccugggcaccuucacguggacccugagcgacuccgagggcaacgagacccccgggggcuacugccucacccgcuggaugcugaucgaggcggagcugaagugcuucgggaacacggccguggccaagugcaacgagaagcacgacgaggaguucugcgacaugcuccggcuguucgacuucaacaagcaggccauccgccggcugaaggccgaggcgcagaugagcauccagcucaucaacaaggccgugaacgcccugaucaacgaccagcugaucaugaagaaccaccuccgcgacaucaugugcauccccuacugcaacuacuccaaguacugguaccugaaccacaccagcaccgggcggaccucccugccccgcugcuggcucgucagcaacggcuccuaccugaacgagacgcacuucagcgacgacaucgagcagcaggccgacaacaugaucaccgagaugcugcagaaggaguaccucgaccggcagggcaagaccccgcuggggcugguggaccuguucguguucuccaccagcuucuaccucaucuccaucuuccugcaccuggucaagaucccgacgcaccgccacaucgugggcaagcccugccccaagccccaccggcucaaccacauggggaucugcagcugcggccuguacaagcagccgggggugcccguccgcuggaagcggugaggacuagucccuguucccagagcccacuuuuuuuucuuuuuuugaaauaaaauagccugucuuucagaucuaaaaaaaaaaaaaaaaaaaaaaaaaaaaaaaaaaaaaaaaaaaaaaaaaaaaaaaaaaaaaaaaaaaaaaaaaaaaaaaaaaaaaaaaaaaaaaaaaaaa

SEQ ID NO: 35259 - RNA, 1724 nt, Artificial Sequence
  mRNA product Design a-1 (A100) comprising derived and/or modified sequence from LASV(G1180-SLE-2010;Clade IV)__AIT17168__GPCmut9 (opt1)
aggagagucccgcagucggcguccagcggcucugcuuguucgugugugugucguugcaggccuuauucaagcuuaccaugggccagaucgugaccuucuuccaggaggucccccacgugaucgaggaggugaugaacaucguccugaucgcccucagcauccuggccgugcugaaggggcucuacaacuucgcgaccugcggccugguggggcugcucaccuuccugcugcucugcggccgcuccugcaccgccagccgguacaagggggucuacgagcugcagacccuggagcucaacauggagacccugaacaugacgaugccgcuguccugcaccaagaacaacagccaccacuacaucauggugggcaacgagaccggccucgagcugacccugacgaacaccuccaucaucaaccacaaguucugcaaccucagcgacgcccacaagaagaaccuguacgaccacgcccugauguccaucaucagcaccuuccaccucuccauccccaacuucaaccaguacgaggccaugagcugcgacuucaacgggggcaagaucuccgugcaguacaaccugagccacuccuacgcgggggacgccgccaaccacugcggcaccgucgccaacggggugcugcagacguucaugcgcauggcguggggcggcagcuacaucgcccucgacuccgggugcggcagcugggacugcaucaugaccuccuaccaguaccugaucauccagaacaccaccugggaggaccacugccaguucagccggcccucccccaucggguaccugggccuccugagccagcgcacgcgggacaucuacaucagccgccggcugcucggcaccuucaccuggacccuguccgacagcgaggggaaggacacgccgggcggguacugccugacccgcuggaugcucaucgaggccgagcugaagugcuucggcaacaccgccguggccaagugcaacgagaagcacgacgaggaguucugcgacaugcugcggcuguucgacuucaacaagcaggcgauccagcgccugaaggccgaggcccagauguccauccagcugaucaacaaggccgucaacgcccucaucaacgaccagcugaucaugaagaaccaccuccgggacaucaugugcauccccuacugcaacuacagcaaguacugguaccucaaccacaccacgaccggcaagaccucccugcccaagugcuggcuggugagcaacggcuccuaccucaacgagacccacuucagcgacgacaucgagcagcaggcggacaacaugaucacggagaugcugcagaaggaguacauggagcgccaggggaagacgccccugggccucguggaccuguucgucuucuccaccagcuucuaccugaucuccaucuuccugcaccucgugaagaucccgacccaccggcacaucgugggcaagagcugccccaagccccaccgccugaaccacauggggaucugcuccugcgggcuguacaagcagcccggcgucccggugaaguggaagcggugaggacuagucccuguucccagagcccacuuuuuuuucuuuuuuugaaauaaaauagccugucuuucagaucuaaaaaaaaaaaaaaaaaaaaaaaaaaaaaaaaaaaaaaaaaaaaaaaaaaaaaaaaaaaaaaaaaaaaaaaaaaaaaaaaaaaaaaaaaaaaaaaaaaaa

SEQ ID NO: 35260 - RNA, 1724 nt, Artificial Sequence
  mRNA product Design a-1 (A100) comprising derived and/or modified sequence from LASV(G1442-SLE-2011;Clade IV)__AIT17180__GPCmut9 (opt1)
aggagagucccgcagucggcguccagcggcucugcuuguucgugugugugucguugcaggccuuauucaagcuuaccaugggccagaucgugaccuucuuccaggaggucccccacgugaucgaggaggugaugaacaucguccugaucgcccucagcauccuggccgugcugaaggggcucuacaacguggcgaccugcggccugaucgggcuggucacguuccuccugcugugcggccgcuccugcaccaccacccucuacaaggggguguacgagcugcagacgcuggagcucaacauggagacccugaacaugaccaugccgcugagcugcaccaagaacaacucccaccacuacauccgggugggcaacgagacgggccucgagcugacccugaccaacaccagcaucaucaaccacaaguucugcaaccucuccgacgcccacaagaagaaccuguacgaccacgcccugaugagcaucaucuccacguuccaccucagcauccccaacuucaaccaguacgaggccauguccugcgacuucaacgggggcaagaucagcguccaguacaaccugucccacagcuacgccggggacgcggccaaccacugcggcaccguggccaacggggugcugcagaccuucaugcgcauggccuggggcggcuccuacaucgcgcucgacagcgggugcggcaacugggacugcaucaugaccuccuaccaguaccugaucauccagaacacgaccugggacgaccacugccaguucagccgccccucccccaucggguaccugggccuccugagccagcggacccgcgacgucuacaucucccggcgccugcucggcaccuucacguggacccugagcgacagcgaggggaaggacaccccgggcggguacugccugacccgguggaugcucaucgaggccgagcugaagugcuucggcaacacggccguggccaagugcaacgagaagcacgacgaggaguucugcgacaugcugcgccucuucgacuucaacaagcaggccauccagcggcugaaggcggaggcccagauguccauccagcugaucaacaaggccgugaacgcccucaucaacgaccagcugaucaugaagaaccaccuccgcgacaucaugugcauccccuacugcaacuacagcaaguacugguaccugaacaacaccgccaccggcaagaccucccugcccaagugcuggcugaucagcaacggcuccuaccucaacgagacgcacuucagcgacgacaucgagcaggaggcggacaacaugaucaccgagaugcugcagaaggaguacauggagcggcaggggaagacgccccugggccucgucgaccuguucguguucuccaccagcuucuaccugaucuccaucuuccugcaccucgugaagaucccgacccaccgccacaucgucggcaagagcugccccaagccccaccggcugaaccacauggggaucugcuccugcgggcuguacaagcagcccggcgugccggugcgcuggaagcggugaggacuagucccuguucccagagcccacuuuuuuuucuuuuuuugaaauaaaauagccugucuuucagaucuaaaaaaaaaaaaaaaaaaaaaaaaaaaaaaaaaaaaaaaaaaaaaaaaaaaaaaaaaaaaaaaaaaaaaaaaaaaaaaaaaaaaaaaaaaaaaaaaaaaa

SEQ ID NO: 35261 - RNA, 1724 nt, Artificial Sequence
  mRNA product Design a-1 (A100) comprising derived and/or modified sequence from LASV(G3010-SLE-2013;Clade IV)__AIT17344__GPCmut9 (opt1)
aggagagucccgcagucggcguccagcggcucugcuuguucgugugugugucguugcaggccuuauucaagcuuaccaugggccagaucgugaccuucuuccaggaggucccccacgugaucgaggaggugaugaacaucguccugaucgcccucagcauccuggccgugcugaaggggcucuacaacuucgcgaccugcggccugguggggcuggucacguuccuccugcugugcggccgcuccugcaccaccagccucuacaaggggguguacgagcugcagacccuggagcucaacauggagacgcugaacaugaccaugccgcuguccugcaccaagaacaacagccaccacuacaucauggugggcaacgagaccggccucgagcugacgcugaccaacaccuccaucaucaaccacaaguucugcaaccucagcgacgcccacaagaagaaccuguacaaccacgcccugauguccaucaucagcaccuuccaccucuccauccccaacuucaaccaguacgaggccaugagcugcgacuucaacgggggcaagaucuccguccaguacaaccugagccacuccuacgccggggacgcggccagccacugcggcacgguggccaacggggugcugcagaccuucaugcggauggccuggggcggcuccuacaucgcgcucgacagcgggugcggcaagugggacugcaucaugaccuccuaccaguaccugaucauccagaacaccacgugggaggaccacugccaguucagccgccccucccccaucggguaccugggccuccugagccagcggacccgcgacaucuacaucagccggcgccugcucggcaccuucaccuggacgcuguccgacagcgaggggaaggacaccccgggcggguacugccugacccgguggaugcucaucgaggccgagcugaagugcuucggcaacaccgccgucgccaagugcaacgagaagcacgacgaggaguucugcgacaugcugcgccucuucgacuucaacaagcaggccauccagcggcugaagacggaggcgcagauguccauccagcugaucaacaaggccgugaacgcccucaucaacgaccagcugaucaugaagaaccaccuccgcgacaucaugugcauccccuacugcaacuacagcaaguacugguaccugaaccacaccaccaccggcaagacgucccugcccaagugcuggcuggugagcaacggcuccuaccucaacgagacccacuucagcgacgacaucgagcagcaggccgacaacaugaucaccgagaugcugcagaaggaguacauggagcggcaggggaagacgccccugggccucgucgaccuguucguguucuccaccagcuucuaccugaucuccaucuuccugcaccucgugaagaucccgacccaccgccacaucgucggcaagagcugccccaagccccaccggcugaaccacauggggaucugcuccugcgggcuguacaagcagcccggcgugccggugcgcuggaagcggugaggacuagucccuguucccagagcccacuuuuuuuucuuuuuuugaaauaaaauagccugucuuucagaucuaaaaaaaaaaaaaaaaaaaaaaaaaaaaaaaaaaaaaaaaaaaaaaaaaaaaaaaaaaaaaaaaaaaaaaaaaaaaaaaaaaaaaaaaaaaaaaaaaaaa

SEQ ID NO: 35262 - RNA, 1724 nt, Artificial Sequence
  mRNA product Design a-1 (A100) comprising derived and/or modified sequence from LASV(G502-SLE-2009;Clade IV)__AIT17126__GPCmut9 (opt1)
aggagagucccgcagucggcguccagcggcucugcuuguucgugugugugucguugcaggccuuauucaagcuuaccaugggccagaucgugaccuucuuccaggaggucccccacgugaucgaggaggugaugaacaucguccugaucgcccucagcauccuggccgugcugaaggggcucuacaacuucgcgaccugcggccugguggggcugcucacguuccugcugcucugcggccgcuccugcaccaccgggcuguacaagggcgucuacgagcugcagacccucgagcugaacauggagacgcugaacaugaccaugccgcucagcugcaccaagaacaacucccaccacuacaucauggugggcaacgagaccgggcuggagcugacgcucaccaacaccagcaucaucaaccacaaguucugcaaccuguccgacgcccacaagaagaaccuguacgaccacgcccucaugagcaucaucuccaccuuccaccugagcauccccaacuucaaccaguacgaggccauguccugcgacuucaacggcgggaagaucagcgugcaguacaaccugucccacagcuacgccggcgacgcggccgaccacugcgggacggucgccaacggcgugcuccagaccuucaugcggauggccuggggcggguccuacaucgcgcuggacagcggcugcgggcggugggacugcaucaugaccuccuaccaguaccugaucauccagaacaccacgugggaggaccacugccaguucagccgccccucccccaucggcuaccucggccugcugagccagcggacccgcgacaucuacaucucccggcgccuccuggggaccuucaccuggacgcugagcgacagcgagggcaaggacacccccgggggcuacugccucacccgguggaugcugaucgaggccgagcugaagugcuucgggaacaccgccguggccaagugcaacgagaagcacgacgaggaguucugcgacaugcuccgccuguucgacuucaacaagcaggccauccagcggcugaaggcggaggcccagauguccauccagcucaucaacaaggccgucaacgcccugaucaacgaccagcuggugaugaagaaccaccuccgcgacaucaugugcauccccuacugcaacuacagccgguacugguaccugaaccacacgaccaccggccgcaccucccugcccaagugcuggcucgugagcaacggguccuaccugaacgagacgcacuucagcgacgacaucgagcagcaggccgacaacaugaucaccgagaugcugcagaaggaguacauggagcggcagggcaagaccccgcucgggcuggucgaccuguucguguucuccaccagcuucuaccugaucuccaucuuccuccaccuggugaagaucccgacgcaccgccacaucgucggcaagagcugccccaagccccaccggcugaaccacauggggaucugcuccugcggccucuacaagcagcccggcgugccggugaaguggaagcgcugaggacuagucccuguucccagagcccacuuuuuuuucuuuuuuugaaauaaaauagccugucuuucagaucuaaaaaaaaaaaaaaaaaaaaaaaaaaaaaaaaaaaaaaaaaaaaaaaaaaaaaaaaaaaaaaaaaaaaaaaaaaaaaaaaaaaaaaaaaaaaaaaaaaaa

SEQ ID NO: 35263 - RNA, 1724 nt, Artificial Sequence
  mRNA product Design a-1 (A100) comprising derived and/or modified sequence from LASV(G733-SLE-2010;Clade IV)__AIT17154__GPCmut9 (opt1)
aggagagucccgcagucggcguccagcggcucugcuuguucgugugugugucguugcaggccuuauucaagcuuaccaugggccagaucgugaccuucuuccaggaggucccccacgugaucgaggaggugaugaacaucguccugaucgcccucagcauccuggccgugcugaaggggcucuacaacuucgcgaccugcggcaucguggggcuggucuccuuccugcuccugugcggccgcagcugcacgaccucccuguacaaggggguguacgagcuccagacccuggagcugaacauggagacccucaacaugacgaugccgcugagcugcaccaagaacaacucccaccacuacaucauggugggcaacgagaccggccuggagcucacccugacgaacaccagcaucaucaaccacaaguucugcaaccuguccgacgcccacaagaagaaccucuacgaccacgcccugaugagcaucaucuccaccuuccaccugagcauccccaacuucaaccaguacgaggccauguccugcgacuucaacgggggcaagaucagcguccaguacaaccucucccacagcuacgccggggacgcggccaaccacugcggcaccaucgccaacggggugcugcagacguucaugcggauggccuggggcggcuccuacaucgcgcuggacagcgggugcgaccggugggacugcaucaugaccuccuaccaguaccucaucauccagaacaccaccugggaggaccacugccaguucagccgccccucccccaucggcuaccuggggcugcucagccagcggacgcgcgacaucuacaucagccggcgccugcugggcaccuucaccuggacccucuccgacagcgagggcaaggacacgcccgggggcuacugccugacccgguggaugcugaucgaggccgagcucaagugcuucgggaacaccgccguggccaagugcaacgagaagcacgacgaggaguucugcgacaugcugcgccuguucgacuucaacaagcaggccauccagcggcucaaggcggaggcccagauguccauccagcugaucaacaaggccgucaacgcccugaucaacgaccagcucaucaugaagaaccaccuccgcgacaucaugugcauccccuacugcaacuacagcaaguacugguaccugaaccacaccacgaccgggaagaccucccugcccaagugcuggcuggugagcaacggcuccuaccugaacgagacccacuucagcgacgacaucgagcagcaggccgacaacaugaucacggagaugcuccagaaggaguacauggagcggcagggcaagaccccgcuggggcugguggaccucuucgucuucuccaccagcuucuaccugaucuccaucuuccugcaccuggugaagaucccgacccaccgccacguggucggcaagagcugccccaagccccaccggcucaaccacauggggaucugcuccugcggccuguacgggcagcccggcgugccggugaaguggaagcgcugaggacuagucccuguucccagagcccacuuuuuuuucuuuuuuugaaauaaaauagccugucuuucagaucuaaaaaaaaaaaaaaaaaaaaaaaaaaaaaaaaaaaaaaaaaaaaaaaaaaaaaaaaaaaaaaaaaaaaaaaaaaaaaaaaaaaaaaaaaaaaaaaaaaaa

SEQ ID NO: 35264 - RNA, 1724 nt, Artificial Sequence
  mRNA product Design a-1 (A100) comprising derived and/or modified sequence from MOPV/LASV reassortant(IGS-1;Clade IV)__AFY05576__GPCmut9 (opt1)
aggagagucccgcagucggcguccagcggcucugcuuguucgugugugugucguugcaggccuuauucaagcuuaccaugggccagaucgugaccuucuuccaggaggucccccacgugaucgaggaggugaugaacaucguccugaucgcccucagcgugcuggccgugcugaaggggcucuacaacuucgcgaccugcggccuggucgggcuggugacguuccuccugcugugcggccgcuccugcaccaccagccucuacaaggggguguacgagcugcagacccuggagcucaacauggagacgcugaacaugaccaugccgcuguccugcaccaagaacaacagccaccacuacaucauggucggcaacgagaccggccucgagcugacgcugaccaacaccuccaucaucaaccacaaguucugcaaccucagcgacgcccacaagaagaaccuguacgaccacgcccugauguccaucaucagcaccuuccaccucuccauccccaacuucaaccaguacgaggccaugagcugcgacuucaacgggggcaagaucuccgugcaguacaaccugagccacuccuacgccggggacgcggccaaccacugcggcacgguggccaacgggguccugcagaccuucaugcggauggccuggggcggcagcuacaucgcgcucgacuccgggugcggcaacugggacugcaucaugaccagcuaccaguaccugaucauccagaacaccacgugggaggaccacugccaguucucccggcccagccccaucggguaccugggccuccugucccagcgcacccgggacaucuacaucagccgccggcugcucggcaccuucaccuggacgcugagcgacuccgagggggaggacaccccgggcggguacugccugacccgcuggaugcucaucgaggccgagcugaagugcuucggcaacaccgccguggccaagugcaacgagaagcacgacgaggaguucugcgacaugcugcggcuguucgacuucaacaagcaggccauccagcgccugaaggcggaggcccagaugagcauccagcugaucaacaaggccgugaacgcccucaucaacgaccagcugaucaugaagaaccaccuccgggacaucaugugcauccccuacugcaacuacuccaaguacugguaccucaaccacacgaccaccggccgcaccagccugcccaagugcuggcuggucuccaacggcagcuaccucaacgagacgcacuucuccgacgacaucgagcagcaggccgacaacaugaucaccgagaugcugcagaaggaguacauggagcggcaggggaagacgccccugggccucguggaccuguucguguucagcaccuccuucuaccugaucagcaucuuccugcaccucgucaagaucccgacccaccgccacaucguggggaaguccugccccaagccccaccggcugaaccacaugggcaucugcagcugcgggcuguacaagcagcccggcgugccggucaaguggaagcgcugaggacuagucccuguucccagagcccacuuuuuuuucuuuuuuugaaauaaaauagccugucuuucagaucuaaaaaaaaaaaaaaaaaaaaaaaaaaaaaaaaaaaaaaaaaaaaaaaaaaaaaaaaaaaaaaaaaaaaaaaaaaaaaaaaaaaaaaaaaaaaaaaaaaaa

SEQ ID NO: 35265 - RNA, 1724 nt, Artificial Sequence
  mRNA product Design a-1 (A100) comprising derived and/or modified sequence from LASV(LM765-SLE-2012;Clade IV)__AIT17814__GPCmut9 (opt1)
aggagagucccgcagucggcguccagcggcucugcuuguucgugugugugucguugcaggccuuauucaagcuuaccaugggccagaucgugaccuucuuccaggaggucccccacgugaucgaggaggugaugaacaucguccugaucgcccucagcauccuggccgugcugaaggggcucuacaacuucgcgaccugcggccugguggggcuggucacguuccuccugcugugcggccgcuccugcaccaccagccucuacaaggggguguacgagcugcagacccuggagcucaacauggagacgcugaacaugaccaugccgcuguccugcaccaagaacaacagccaccacuacaucauggugggcaacgagaccggccucgagcugacgcugaccaacaccuccaucaucgaccacaaguucugcaaccucagcgacgcccaccggaagaaccuguacgaccacgcccugauguccaucaucagcaccuuccaccucuccauccccaacuucaaccaguacgaggccaugagcugcgacuucaacgggggcaagaucuccguccaguacaaccugagccacuccuacgccaaggacgcggccgaccacugcgggacgguggccaacggcgugcugcagaccuucaugcgcauggccuggggcgggagcuacaucgcgcucgacuccggcugcgggcgcugggacugcaucaugaccagcuaccaguaccugaucauccagaacaccacgugggaggaccacugccaguucucccggcccagccccaucggcuaccuggggcuccugucccagcgcacccgggacaucuacaucagccgccggcugcucggcaccuucaccuggacgcugagcgacuccgagggcaaggacacccccgggggcuacugccugacccgcuggaugcucaucgaggccgagcugaagugcuucgggaacaccgccgucgccaagugcaacgagaagcacgacgaggaguucugcgacaugcugcggcuguucgacuucaacaagcaggccauccagcgccugaaggcggaggcccagaugagcauccagcugaucaacaaggccgugaacgcccucaucaacgaccagcugaucaugaagaaccaccuccgggacaucaugugcauccccuacugcaacuacuccaaguacugguaccucaaccacacgaccaccgggaagaccagccugcccaagugcuggcugguguccaacggcagcuaccucaacgagacgcacuucuccgacgacaucgagcagcaggccgacaacaugaucaccgagaugcugcagaaggaguacauggagcgccagggcaagaccccgcuggggcucgucgaccuguucguguucagcaccuccuucuaccugaucagcaucuuccugcaccucgugaagaucccgacgcaccggcacaucgucggcaagcccugccccaagccccaccgccugaaccacauggggaucugcuccugcggccuguacaagcagccgggggugcccgugaaguggaagcggugaggacuagucccuguucccagagcccacuuuuuuuucuuuuuuugaaauaaaauagccugucuuucagaucuaaaaaaaaaaaaaaaaaaaaaaaaaaaaaaaaaaaaaaaaaaaaaaaaaaaaaaaaaaaaaaaaaaaaaaaaaaaaaaaaaaaaaaaaaaaaaaaaaaaa

SEQ ID NO: 35266 - RNA, 1724 nt, Artificial Sequence
  mRNA product Design a-1 (A100) comprising derived and/or modified sequence from LASV(LM776-SLE-2012;Clade IV)__AIT17824__GPCmut9 (opt1)
aggagagucccgcagucggcguccagcggcucugcuuguucgugugugugucguugcaggccuuauucaagcuuaccaugggccagaucgugaccuucuuccaggaggucccccacgugaucgaggaggugaugaacaucguccugaucgcccucagcauccuggccgugcugaaggggcucuacaacuucgcgaccugcggccugguggggcuggucacguuccuccugcugugcggccgcuccugcaccaccagcguguacaaggggguguacgagcuccagacccuggagcugaacauggagacgcucaacaugaccaugccgcuguccugcaccaagaacaacagccaccacuacaucauggucggcaacgagaccggccuggagcucacgcugaccaacaccuccaucaucaaccacaaguucugcaaccugagcgacgcccacaagaagaaccucuacgaccacgcccugauguccaucaucagcaccuuccaccuguccauccccaacuucaaccaguacgaggccaugagcugcgacuucaacgggggcaagaucuccgugcaguacaaccucagccacuccuacgccggggacgcggccaaccacugcggcacgguggccaacgggguccugcagaccuucaugcggauggccuggggcggcagcuacaucgcgcuggacuccgggugcggcaagugggacugcaucaugaccagcuaccaguaccucaucauccagaacaccacgugggaggaccacugccaguucucccgccccagccccaucggguaccugggccugcucucccagcggacccgcgacaucuacaucagccggcgccugcugggcaccuucaccuggacgcucagcgacuccgaggggaaggacaccccgggcggguacugccugacccgguggaugcugaucgaggccgagcucaagugcuucggcaacaccgccguggccaagugcaacgagaagcacgacgaggaguucugcgacaugcugcgccuguucgacuucaacaagcaggccauccagcggcucaaggcggaggcccagaugagcauccagcugaucaacaaggccgugaacgcccugaucaacgaccagcucaucaugaagaaccaccuccgcgacaucaugugcauccccuacugcaacuacuccaaguacugguaccugaaccacacgaccaccggcaagaccagccugcccaagugcuggcuggucuccaacggcagcuaccugaacgagacgcacuucuccgacgacaucgagcagcaggccgacaacaugaucaccgagaugcuccagaaggaguacauggagcggcaggggaagacgccccugggccugguggaccucuucguguucagcaccuccuucuaccugaucagcaucuuccugcaccuggucaagaucccgacccaccgccacaucguggggaaguccugccccaagccccaccggcucaaccacaugggcaucugcagcugcgggcuguacaagcagcccggcgugccgguccgcuggaagcggugaggacuagucccuguucccagagcccacuuuuuuuucuuuuuuugaaauaaaauagccugucuuucagaucuaaaaaaaaaaaaaaaaaaaaaaaaaaaaaaaaaaaaaaaaaaaaaaaaaaaaaaaaaaaaaaaaaaaaaaaaaaaaaaaaaaaaaaaaaaaaaaaaaaaa

SEQ ID NO: 35267 - RNA, 1724 nt, Artificial Sequence
  mRNA product Design a-1 (A100) comprising derived and/or modified sequence from LASV(Mad39;Clade IV)__ANH09722__GPCmut9 (opt1)
aggagagucccgcagucggcguccagcggcucugcuuguucgugugugugucguugcaggccuuauucaagcuuaccaugggccagaucgugaccuucuuccaggaggucccccacgugaucgaggaggugaugaacaucguccugaucgcccucagcauccuggccgugcugaaggggcucuacaacguggcgaccugcggccugaucgggcuggucacguuccuccugcugugcggccgcuccugcaccaccacccucuacaaggggguguacgagcugcaggcccuggagcucaacauggagacgcugaacaugaccaugccgcugagcugcaccaagaacaacucccaccacuacauccgggugggcaacgagaccggccucgagcugacgcugaccaacaccagccucaucaaccacaaguucugcaaccuguccgacgcccacaagaagaaccuguacgaccacgcccucaugagcaucaucuccaccuuccaccugagcauccccaacuucaaccaguacgaggccauguccugcgacuucaacgacgggaagaucagcguccaguacaaccugucccacacguacgcgggcgacaccgccaaccacugcgggaccguggccaacggcgugcuccagaccuucaugcgcauggccuggggcgggagcuacaucgcgcuggacuccggcugcgggggcugggacugcaucaugacgagcuaccaguaccugaucauccagaacaccaccugggaggaccacugccaguucucccggcccagccccaucggguaccucggccugcugucccagcggacccgcgacaucuacaucagccggcgccuccugggcacguucaccuggacccuguccgacagcgaggggaaggacaccccgggcggguacugccucacgcgguggaugcugaucgaggccgagcugaagugcuucggcaacaccgccgucgccaagugcaacgagaagcacgacgaggaguucugcgacaugcuccgccuguucgacuucaacaagcaggccauccagcggcugaaggcggaggcccagaugagcauccagcucaucaacaaggccgugaacgcccugaucaacgaccagcugaucaugaagaaccaccuccgcgacaucaugugcauccccuacugcaacuacuccaaguacugguaccugaaccacaccgugaccggcaagacgagccugcccaagugcuggcucgucuccaacggcagcuaccugaacgagacccacuucuccgacgacaucgagcagcaggccgacaacaugaucaccgagaugcugcagaaggaguacauggagcggcaggggaagacgccccucggccugguggaccuguucguguucagcaccuccuucuaccugaucagcaucuuccuccaccuggucaagaucccgacccaccgccacgugguggggaagcccugccccaagccccaccggcugaaccacaugggcaucugcuccugcggguucuacaagcagccgggcguccccgugcgcuggaagcggugaggacuagucccuguucccagagcccacuuuuuuuucuuuuuuugaaauaaaauagccugucuuucagaucuaaaaaaaaaaaaaaaaaaaaaaaaaaaaaaaaaaaaaaaaaaaaaaaaaaaaaaaaaaaaaaaaaaaaaaaaaaaaaaaaaaaaaaaaaaaaaaaaaaaa

SEQ ID NO: 35268 - RNA, 1724 nt, Artificial Sequence
  mRNA product Design a-1 (A100) comprising derived and/or modified sequence from LASV(Z0947-SLE-2011;Clade IV)__AIT17840__GPCmut9 (opt1)
aggagagucccgcagucggcguccagcggcucugcuuguucgugugugugucguugcaggccuuauucaagcuuaccaugggccagaucgugaccuucuuccaggaggucccccacgugaucgaggaggugaugaacaucguccugaucgcccucagcauccuggccgugcugaaggggcucuacaacuucgcgaccugcggccugguggggcuggucacguuccuccugcugugcggccgcuccugcaccaucagccucuacaaggggguguacgagcugcagacccuggagcucaacauggagacccugaacaugacgaugccgcuguccugcaccaagaacaacagccaccacuacaucauggugggcaacgagaccggccucgagcugacccugacgaacaccuccaucaucaaccacaaguucugcaaccucagcgacgcccacaagaagaaccuguacgaccacgcccugauguccaucaucagcaccuuccaccucuccauccccaacuucaaccaguacgaggccaugagcugcgacuucaacgggggcaagaucuccguccaguacaaccugagccacuccuacgccggggacgcggccaaccacugcggcaccguggccaacggggugcugcagacguucaugcggauggccuggggcggcagcuacaucgcgcucgacuccgggugcgaccggugggacugcaucaugaccagcuaccaguaccugaucauccagaacaccaccugggaggaccacugccaguucucccgccccagccccaucggcuaccuggggcuccugucccagcggacgcgcgacaucuacaucagccggcgccugcucggcaccuucaccuggacccugagcgacuccgagggcaaggacacgcccgggggcuacugccugacccgguggaugcucaucgaggccgagcugaagugcuucgggaacaccgccgucgccaagugcaacgagaagcacgacgaggaguucugcgacaugcugcgccucuucgacuucaacaagcaggccauccagcggcugaaggcggaggcccagaugagcauccagcugaucaacaaggccgugaacgcccucaucaacgaccagcugaucaugaagaaccaccuccgcgacaucaugugcauccccuacugcaacuacuccaaguacugguaccugaaccacaccacgaccgggaagaccagccugcccaagugcuggcugguguccaacggcagcuaccucaacgagacccacuucuccgacgacaucgagcagcaggccgacaacaugaucacggagaugcugcagaaggaguacauggagcggcagggcaagaccccgcuggggcucgucgaccuguucguguucagcaccuccuucuaccugaucagcaucuuccugcaccucgugaagaucccgacccaccgccacaucgucggcaagcccugccccaagccccaccggcugaaccacauggggaucugcuccugcggccuguacaagcagccgggggugcccgugaaguggaagcgcugaggacuagucccuguucccagagcccacuuuuuuuucuuuuuuugaaauaaaauagccugucuuucagaucuaaaaaaaaaaaaaaaaaaaaaaaaaaaaaaaaaaaaaaaaaaaaaaaaaaaaaaaaaaaaaaaaaaaaaaaaaaaaaaaaaaaaaaaaaaaaaaaaaaaa

SEQ ID NO: 35269 - RNA, 1724 nt, Artificial Sequence
  mRNA product Design a-1 (A100) comprising derived and/or modified sequence from LASV(Josiah;Clade IV)__NP_694870__GPCmut9 (opt1)
aggagagucccgcagucggcguccagcggcucugcuuguucgugugugugucguugcaggccuuauucaagcuuaccaugggccagaucgugaccuucuuccaggaggucccccacgugaucgaggaggugaugaacaucguccugaucgcccucagcgugcuggccgugcugaaggggcucuacaacuucgcgaccugcggccuggucgggcuggugacguuccuccugcugugcggccgcuccugcaccaccagccucuacaaggggguguacgagcugcagacccuggagcucaacauggagacgcugaacaugaccaugccgcuguccugcaccaagaacaacagccaccacuacaucauggucggcaacgagaccggccucgagcugacgcugaccaacaccuccaucaucaaccacaaguucugcaaccucagcgacgcccacaagaagaaccuguacgaccacgcccugauguccaucaucagcaccuuccaccucuccauccccaacuucaaccaguacgaggccaugagcugcgacuucaacgggggcaagaucuccgugcaguacaaccugagccacuccuacgccggggacgcggccaaccacugcggcacgguggccaacgggguccugcagaccuucaugcggauggccuggggcggcagcuacaucgcgcucgacuccgggugcggcaacugggacugcaucaugaccagcuaccaguaccugaucauccagaacaccacgugggaggaccacugccaguucucccgccccagccccaucggguaccugggccuccugucccagcggacccgcgacaucuacaucagccggcgccugcucggcaccuucaccuggacgcugagcgacuccgaggggaaggacaccccgggcggguacugccugacccgguggaugcucaucgaggccgagcugaagugcuucggcaacaccgccguggccaagugcaacgagaagcacgacgaggaguucugcgacaugcugcgccucuucgacuucaacaagcaggccauccagcggcugaaggcggaggcccagaugagcauccagcugaucaacaaggccgugaacgcccucaucaacgaccagcugaucaugaagaaccaccuccgcgacaucaugugcauccccuacugcaacuacuccaaguacugguaccugaaccacacgaccaccgggcggaccagccugcccaagugcuggcuggucuccaacggcagcuaccucaacgagacgcacuucuccgacgacaucgagcagcaggccgacaacaugaucaccgagaugcugcagaaggaguacauggagcgccagggcaagacgccccuggggcugguggaccucuucguguucagcaccuccuucuaccugaucagcaucuuccugcaccucgucaagaucccgacccaccggcacaucgugggcaaguccugccccaagccccaccgccugaaccacauggggaucugcagcugcggccuguacaagcagcccggggugccggucaaguggaagcggugaggacuagucccuguucccagagcccacuuuuuuuucuuuuuuugaaauaaaauagccugucuuucagaucuaaaaaaaaaaaaaaaaaaaaaaaaaaaaaaaaaaaaaaaaaaaaaaaaaaaaaaaaaaaaaaaaaaaaaaaaaaaaaaaaaaaaaaaaaaaaaaaaaaaa

SEQ ID NO: 35270 - RNA, 1721 nt, Artificial Sequence
  mRNA product Design a-1 (A100) comprising derived and/or modified sequence from LASV(LP;Clade I)__AAF86701__GPCmut9 (opt1)
aggagagucccgcagucggcguccagcggcucugcuuguucgugugugugucguugcaggccuuauucaagcuuaccaugggccagaucaucaccuucuuccaggaggugccccacgucaucgaggaggugaugaacaucgugcugaucgcccucagccugcuggccauccucaaggggcuguacaacaucgcgaccugcggcaucaucgggcuggucgccuuccucuuccugugcggcaaguccugcagccugacgcucaagggcggguacgagcugcagacccuggagcucaacauggagacccugaacaugaccaugccgcuguccugcacgaagaacagcucccaccacuacauccgcgugggcaacgagaccgggcucgagcugacccugaccaacacgagcaucaucaaccacaaguucugcaaccucuccgacgcccacaagaagaaccuguacgaccacgcccugaugagcaucaucuccaccuuccaccucagcauccccaacuucaaccaguacgaggccauguccugcgacuucaacggcgggaagaucagcgugcaguacaaccugucccacagcuacgcgggcgacgccgccgagcacugcgggaccgucgccaacggcgugcugcagaccuucaugcggauggcguggggcgggcgcuacaucgcccucgacuccggcugcgggaacugggacugcaucaugacgagcuaccaguaccugaucauccagaacaccaccugggaggaccacugccaguucucccggcccagccccaucggcuaccugggccuccugucccagcgcacccgggacaucuacaucagccgccggcugcucgggacguucaccuggacccugagcgacuccgagggcaacgagacccccgggggcuacugccugacgcgcuggaugcucaucgaggccgagcugaagugcuucgggaacaccgccguggccaagugcaacgagaagcacgacgaggaguucugcgacaugcugcggcuguucgacuucaacaagcaggcgauccgccggcugaaggccgaggcccagaugagcauccagcugaucaacaaggccgucaacgcccucaucaacgaccagcugaucaugaagaaccaccuccgcgacaucaugugcauccccuacugcaacuacuccaaguacugguaccucaaccacaccagcuccggccggaccagccugcccaagugcuggcugaucuccaacggcagcuaccucaacgagacgcaguucuccgacgacaucgagcagcaggcggacaacaugaucaccgagaugcugcagaaggaguacaucgagcgccaggggaagaccccgcugggccugguggacaucuucaucuucagcaccuccuucuaccucaucagcaucuuccugcaccugaucaagaucccgacgcaccggcacaucguggggaagcccugccccaagccccaccgccucaaccacaugggcgucugcuccugcgggcuguacaagcacccgggcgugcccaccaaguggaagcggugaggacuagucccuguucccagagcccacuuuuuuuucuuuuuuugaaauaaaauagccugucuuucagaucuaaaaaaaaaaaaaaaaaaaaaaaaaaaaaaaaaaaaaaaaaaaaaaaaaaaaaaaaaaaaaaaaaaaaaaaaaaaaaaaaaaaaaaaaaaaaaaaaaaaa

SEQ ID NO: 35271 - RNA, 1721 nt, Artificial Sequence
  mRNA product Design a-1 (A100) comprising derived and/or modified sequence from LASV(803213;Clade II)__AAF86703__GPCmut9 (opt1)
aggagagucccgcagucggcguccagcggcucugcuuguucgugugugugucguugcaggccuuauucaagcuuaccaugggccagaucaucaccuucuuccaggaggugccccacgucaucgaggaggugaugaacaucgugcugaucgcccucagccugcuggccauccucaaggggaucuacaacgucgcgaccugcggccuguucgggcugaucuccuuccuccugcugugcggccgcagcugcuccgugacguacaaggggguguacgagcuccagacccuggagcugaacauggccaaccucaacaugaccaugccgcugagcugcaccaagaacaacucccaccacuacaucauggucggcaacgagacgggccuggagcucacccugaccaacaccagcaucaucaaccacaaguucugcaaccuguccgacgcccacaagaagaaccucuacgaccacgcccugaugagcaucaucuccacguuccaccugagcauccccaacuucaaccaguacgaggccauguccugcgacuucaacgggggcaagaucagcgugcaguacaaccucucccacagcuucgcgguggacgccgccaaccacugcgggaccaucgccaacggcguccugcagaccuucaugcggauggcguggggcggguccuacaucgcccuggacagcggcugcgggaacugggacugcaucaugaccuccuaccaguaccucaucauccagaacacgaccugggaggaccacugccaguucagccgccccucccccaucggcuaccuggggcugcucagccagcggacccgcgacaucuacaucagccggcgccugcugggcaccuucacguggacccucuccgacagcgagggcaacgaggcccccgggggcuacugccugacccgguggaugcugaucgaggccgagcucaagugcuucgggaacaccgccguggcgaagugcaacgagaagcacgacgaggaguucugcgacaugcugcgccuguucgacuucaacaagcaggccaucaagcggcucaagacggaggcccagauguccauccagcugaucaacaaggccgugaacgcccugaucaacgaccagcucaucaugaagaaccaccuccgcgacaucaugugcauccccuacugcaacuacagccgguacugguaccugaaccacaccgucaccggcaagaccucccugccccgcugcuggcuggugagcaacggguccuaccugaacgagacgcacuucagcgacgacaucgagcagcaggcggacaacaugaucaccgagaugcuccagaaggaguacauggaccggcagggcaagaccccgcugggccugguggaccuguucgucuucuccaccagcuucuaccucaucuccaucuuccugcaccuggugaagaucccgacgcaccgccacaucguggggaagcccugccccaagccccaccggcucaaccacaugggcaucugcagcugcgggcuguacaagcacccgggcguccccgugaaguggaagcgcugaggacuagucccuguucccagagcccacuuuuuuuucuuuuuuugaaauaaaauagccugucuuucagaucuaaaaaaaaaaaaaaaaaaaaaaaaaaaaaaaaaaaaaaaaaaaaaaaaaaaaaaaaaaaaaaaaaaaaaaaaaaaaaaaaaaaaaaaaaaaaaaaaaaaa

SEQ ID NO: 35272 - RNA, 1721 nt, Artificial Sequence
  mRNA product Design a-1 (A100) comprising derived and/or modified sequence from LASV(GA391;Clade III)__CAA36645__GPCmut9 (opt1)
aggagagucccgcagucggcguccagcggcucugcuuguucgugugugugucguugcaggccuuauucaagcuuaccaugggccagaucgugaccuucuuccaggaggucccccacgugaucgaggaggugaugaacaucguccugaucgcccucagcauccuggccauccugaaggggcucuacaacguggcgaccugcggccugaucgggcuggugacguuccuccugcuguccggccgcagcugcucccucaucuacaaggggaccuacgagcugcagacccuggagcucaacauggagacccugaacaugacgaugccgcugagcugcaccaagaacaacucccaccacuacauccgggucggcaacgagaccggccucgagcugacccugacgaacaccagcauccucaaccacaaguucugcaaccuguccgacgcccacaagcgcaaccuguacgaccacagccucauguccaucaucagcaccuuccaccuguccauccccaacuucaaccaguacgaggccaugagcugcgacuucaacgggggcaagaucaccgugcaguacaaccugucccacagcuucgccguggacgccgcggggcacugcggcacgcucgccaacgggguccugcagaccuucaugcggauggccuggggcggcuccuacaucgcccuggacagcgggugcggcaacugggacugcaucaugaccuccuaccaguaccucaucauccagaacaccacgugggacgaccacugccaguucagccgccccucccccaucggguaccugggccugcucagccagcggacccgcgacaucuacaucagccggcgccugcugggcaccuucaccuggacgcucuccgacagcgaggggaacgagaccccgggcggguacugccugacccgguggaugcugaucgaggcggagcucaagugcuucggcaacaccgccguggccaagugcaacgagaagcacgacgaggaguucugcgacaugcugcgccuguucgacuucaacaagcaggccauccggcgccucaagacggaggcccagauguccauccagcugaucaacaaggcggugaacgcccugaucaacgaccagcucaucaugaagaaccaccuccgggacaucaugugcauccccuacugcaacuacagccgcuacugguaccugaaccacaccuccaccgggaagaccagccugccccggugcuggcugaucuccaacggcagcuaccugaacgagacgaaguucuccgacgacaucgagcagcaggccgacaacaugaucaccgagaugcugcagaaggaguacaucgaccgccagggcaagacgccccucgggcuggucgaccuguucguguucagcaccuccuucuaccucaucagcaucuuccugcaccuggugaagaucccgacccaccggcacaucgucggcaagcccugccccaagccccaccgccucaaccacauggggaucugcuccugcggccuguacaagcagccgggggugcccgugcgguggaagcgcugaggacuagucccuguucccagagcccacuuuuuuuucuuuuuuugaaauaaaauagccugucuuucagaucuaaaaaaaaaaaaaaaaaaaaaaaaaaaaaaaaaaaaaaaaaaaaaaaaaaaaaaaaaaaaaaaaaaaaaaaaaaaaaaaaaaaaaaaaaaaaaaaaaaaa

SEQ ID NO: 35273 - RNA, 1724 nt, Artificial Sequence
  mRNA product Design a-1 (A100) comprising derived and/or modified sequence from LASV(AV;Clade V)__CCA30314__GPCmut9 (opt1)
aggagagucccgcagucggcguccagcggcucugcuuguucgugugugugucguugcaggccuuauucaagcuuaccaugggccagaucgugaccuucuuccaggaggucccccacgugaucgaggaggugaugaacaucguccugaucgcccucagcauccuggccgugcugaaggggcucuacaacaucgcgaccugcggccugaucgggcugaucacguuccuccugcugugcggccgcuccugcagcuccaaccucuacaaggggguguacgagcugcagagccuggaccucaacauggagacccugaacaugaccaugccgcuguccugcaccaagaacaacagccaccacuacauccgggucggcaacgacacgggccucgagcugacccugaccaacaccuccauccucaaccacaaguucugcaaccugagcgacgcccacaagaaggaccuguacgaccacgcccucauguccaucaucagcacguuccaccuguccauccccaacuucaaccaguacgaggccaugagcugcgacuucaacgggggcaagaucuccgugcaguacaaccugagccacuccuacgccaucgacgcggccaaccacugcgggaccguggccaacggcauccuccagaccuucaugcgcauggccuggggcgggagcuacaucgcgcuggacuccggcugcgggaacugggacugcaucaugaccagcuaccaguaccugaucauccagaacacgaccugggagaaccacugccaguucucccggcccagccccaucggcuaccucgggcugcugagccagcgcacccgggacaucuacaucucccgccggcuccugggcaccuucacguggacccugagcgacuccgagggcaacgccacccccgggggcuacugccucacccgcuggaugcugaucgaggccgagcugaagugcuucgggaacacggccgucgccaagugcaacgagaagcacgacgaggaguucugcgacaugcuccggcuguucgacuucaacaagcaggcgaucagccgccugaaguccgaggcccagaugagcauccagcucaucaacaaggccgugaacgcccugaucaacgaccagcugaucaugaagaaccaccuccgggacaucaugugcauccccuacugcaacuacuccaaguacugguaccugaaccacaccaucaccggcaagaccagccugcccaagugcuggcucguguccaacgggagcuaccugaacgagacgcacuucuccgacgacaucgagcagcaggccgacaacaugaucaccgagaugcugcagaaggaguacauggagcgccagggcaagaccccgcugggccucgucgaccuguucguguucagcaccuccuucuaccugaucagcaucuuccuccggcuggugaagaucccgacgcaccgccacaucgucgggaagcccugccccaagccccaccggcugaaccacaugggcaucugcuccugcgggcucuacaagcagccgggcgugcccgugcgcuggaagcggugaggacuagucccuguucccagagcccacuuuuuuuucuuuuuuugaaauaaaauagccugucuuucagaucuaaaaaaaaaaaaaaaaaaaaaaaaaaaaaaaaaaaaaaaaaaaaaaaaaaaaaaaaaaaaaaaaaaaaaaaaaaaaaaaaaaaaaaaaaaaaaaaaaaaa

SEQ ID NO: 35274 - RNA, 1721 nt, Artificial Sequence
  mRNA product Design a-1 (A100) comprising derived and/or modified sequence from LASV(Togo/2016/7082;Clade VI)__AMR44577__GPCmut9 (opt1)
aggagagucccgcagucggcguccagcggcucugcuuguucgugugugugucguugcaggccuuauucaagcuuaccaugggccagaucaucaccuucuuccaggaggugccccacgucaucgaggaggugaugaacaucgugcugaucgcccucagccugcuggccauccucaagggggucuacaacguggcgaccugcggcaucaucgggcuggugacguuccuguuccucugcggccgcuccugcagccugaucuacaagggguccuacgagcugcagacccucgagcugaacauggagacccugaacaugaccaugccgcucagcugcacgaagaacuccagccaccacuacauccgggucggcaacgagaccggccuggagcugacccucaccaacacguccaucaucaaccacaaguucugcaaccugagcgacgcccacaagcgcaaccuguacgaccacgcccucauguccauccugagcaccuuccaccuguccauccccaacuucaaccaguacgaggccaugagcugcgacuucaacgggggcaagaucuccgugcaguacaaccucagccacgccuacgcgguggacgccgccgagcacugcgggaccgucgccaacggcgugcugcagaccuucaugcggauggcguggggcggguccuacaucgcccuggacagcggcugcgggaacugggacugcaucaugacguccuaccaguaccucaucauccagaacaccaccugggaggaccacugccaguucagccgccccucccccaucggcuaccuggggcugcucagccagcggacccgcgacaucuacaucagccggcgccugcugggcacguucaccuggacccucuccgacagcgagggcaacgagacccccgggggcuacugccugacgcgguggaugcugaucgaggccgagcucaagugcuucgggaacaccgccguggccaagugcaacgagaagcacgacgaggaguucugcgacaugcugcgccuguucgacuucaacaagcaggcgauccagcggcucaaguccgaggcccagaugagcauccagcugaucaacaaggccgucaacgcccugaucaacgaccagcucaucaugaagaaccaccuccgcgacaugaugugcauccccuacugcaacuacuccaaguacugguaccugaaccacaccagcuccggccggaccagccugcccaagugcuggcugguguccaacgggagcuaccugaacgagacgcacuucuccgacgacaucgagcagcaggccgacaacaugaucaccgagaugcuccagaaggaguacaucgaccgccagggcaagaccccgcugggccugguggaccuguucgucuucagcaccuccuucuaccucaucagcaucuuccugcaccugaucaagaucccgacgcaccggcacaucguggggaagcccugccccaagccccaccgccucaaccacaugggcaucugcuccugcgggcuguacaagcagccgggcgugcccacccgguggaagcgcugaggacuagucccuguucccagagcccacuuuuuuuucuuuuuuugaaauaaaauagccugucuuucagaucuaaaaaaaaaaaaaaaaaaaaaaaaaaaaaaaaaaaaaaaaaaaaaaaaaaaaaaaaaaaaaaaaaaaaaaaaaaaaaaaaaaaaaaaaaaaaaaaaaaaa

SEQ ID NO: 35275 - RNA, 1721 nt, Artificial Sequence
  mRNA product Design a-1 (A100) comprising derived and/or modified sequence from LASV(KAK-428;Clade n.d. (VII))__ANH09740__GPCmut9 (opt1)
aggagagucccgcagucggcguccagcggcucugcuuguucgugugugugucguugcaggccuuauucaagcuuaccaugggccagaucgugaccuucuuccaggaggucccccacgugaucgaggaggugaugaacaucguccugaucgcccucagccugcuggccauccucaaggggcuguacaacuucgcgaccugcggcgugaucgggcugaucacguuccuccugcugugcggccgcuccugcagcgccaccuacaaggggcaguacgagcuccagacccuggagcugaacauggagucccucaacaugaccaugccgcugagcugcacgaagaacaacucccaccacuacauccgggccggcaacaacaccggccuggagcucacccugaccaacacgagcaucaucucccacaaguucugcaaccugagcgacgcccacaagaagaaccucuacgaccacacccugauguccaucaucaccaccuuccaccugagcauccccaacuucaaccaguacgaggccauguccugcgacuucaacgggggcaagaucagcauccaguacaaccucucccacagcuacgcgggggacgccgcccagcacugcggcacgguggccaacgggguccugcagaccuucaugcgcauggcguggggcggcuccuaccuggcccucgacagcgggugccggggcugggacugcaucaucuccagcuaccaguaccugaucauccagaacaccaccugggacgaccacugccaguucucccgccccagccccaucggguaccugggcuucgugagccagaagacgcgggacaucuacaucucccgccggcuccugggcaccuucaccuggacccugagcgacuccgaggggcacgacaugccgggcggguacugccucacgcgcuggaugcugaucgaggccgaccugaagugcuucggcaacaccgccguggccaagugcaacgagaagcacgacgaggaguucugcgacauguggcggcuguucgacuucaacaagcaggcgauccagcgccugaaggccgaggcccagaugaacauccagcugaucaacaaggccgucaacgcccucaucaacgaccagcugaugaugaagaaccaccuccgggacaucaugugcauccccuacugcaacuacagcaaguucugguaccucaacaacaccaccacggggcgcaccucccugccccggugcuggcugaucagcaacggcuccuaccucaacgagacccacuucagcgacgacaucgagcagcaggcggacaacaugaucaccgagaugcugcagaaggaguacauggaccgccagggcaagacgccccuggggcucguggaccuguucguguucuccaccagcuucuaccugaucaccaucuuccugcaccucgucaagaucccgacccaccggcacaucgugggcaagcccugccccaagccccaccgccugaaccacauggggaucugcuccugcggccuguacaagcagccgggggugcccguccgguggaagcgcugaggacuagucccuguucccagagcccacuuuuuuuucuuuuuuugaaauaaaauagccugucuuucagaucuaaaaaaaaaaaaaaaaaaaaaaaaaaaaaaaaaaaaaaaaaaaaaaaaaaaaaaaaaaaaaaaaaaaaaaaaaaaaaaaaaaaaaaaaaaaaaaaaaaaa

SEQ ID NO: 35276 - RNA, 1721 nt, Artificial Sequence; identical to SEQ ID NO: 35270
  mRNA product Design a-1 (A100) comprising derived and/or modified sequence from LASV(Pinneo-NIG-1969;Clade I)__AIT17836__GPCmut9 (opt1)

SEQ ID NO: 35277 - RNA, 1721 nt, Artificial Sequence
  mRNA product Design a-1 (A100) comprising derived and/or modified sequence from LASV(ISTH0009-NIG-2011;Clade II)__AIT17404__GPCmut9 (opt1)
aggagagucccgcagucggcguccagcggcucugcuuguucgugugugugucguugcaggccuuauucaagcuuaccaugggccagaucaucaccuucuuccaggaggugccccacgucaucgaggaggugaugaacaucgugcugaucgcccucagccugcuggccauccucaaggggaucuacaacgucgcgaccugcggccuguucgggcugguguccuuccuccugcugugcggccgcagcugcuccacgaccuacaaggggguguacgagcuccagacccuggagcuggacauggccagccucaacaugaccaugccgcuguccugcacgaagaacaacagccaccacuacaucauggucggcaacgagaccggccuggagcucacccugaccaacacguccaucaucaaccacaaguucugcaaccugagcgacgcccacaagaagaaccucuacgaccacgcccugauguccaucaucagcaccuuccaccuguccauccccaacuucaaccaguacgaggccaugagcugcgacuucaacgggggcaagaucuccgugcaguacaaccucagccacgcguacgccguggacgccgccaaccacugcgggaccaucgcgaacggcguccugcagaccuucaugcggauggccuggggcggguccuacaucgcccuggacagcggcugcggguccugggacugcaucaugacgagcuaccaguaccucaucauccagaacaccaccugggaggaccacugccaguucucccgccccagccccaucggcuaccuggggcugcucagccagcggacccgcgacaucuacaucucccggcgccugcugggcacguucaccuggacccucagcgacuccgagggcaacgagacccccgggggcuacugccugacgcgguggaugcugaucgaggccgagcucaagugcuucgggaacaccgccguggcgaagugcaacgagaagcacgacgaggaguucugcgacaugcugcgccuguucgacuucaacaagcaggccauccggcgccucaagaccgaggcccagaugagcauccagcugaucaacaaggccgugaacgcccugaucaacgaccagcucaucaugaagaaccaccuccgggacaucaugugcaucccguacugcaacuacuccaaguacugguaccugaaccacaccgucacgggcaagaccagccugccccgcugcuggcugguguccaacgggagcuaccugaacgagacccacuucuccgacgacaucgagcagcaggcggacaacaugaucaccgagcuccugcagaaggaguacauggaccggcagggcaagacgccccugggccugguggaccucuucgucuucagcaccuccuucuaccugaucagcaucuuccugcaccucaucaagaucccgacccaccgccacaucaccgggaagcccugccccaagccccaccggcugaaccacaugggcaucugcuccugcgggcuguacaagcacccgggcgugcccgugaaguggaagcgcugaggacuagucccuguucccagagcccacuuuuuuuucuuuuuuugaaauaaaauagccugucuuucagaucuaaaaaaaaaaaaaaaaaaaaaaaaaaaaaaaaaaaaaaaaaaaaaaaaaaaaaaaaaaaaaaaaaaaaaaaaaaaaaaaaaaaaaaaaaaaaaaaaaaaa

SEQ ID NO: 35278 - RNA, 1721 nt, Artificial Sequence
  mRNA product Design a-1 (A100) comprising derived and/or modified sequence from LASV(ISTH2010-NIG-2012;Clade II)__AIT17482__GPCmut9 (opt1)
aggagagucccgcagucggcguccagcggcucugcuuguucgugugugugucguugcaggccuuauucaagcuuaccaugggccagaucaucaccuucuuccaggaggugccccacgucaucgaggaggugaugaacaucgugcugaucgcccucagccugcuggccauccucaaggggaucuacaacgucgcgaccugcggccuguucgggcugguguccuuccuccugcugugcggccgcagcugcuccacgaccuacaaggggguguacgagcuccagacccuggagcuggacauggccagccucaacaugaccaugccgcuguccugcacgaagaacaacagccaccacuacaucauggucggcaacgagaccggccuggagcucacccugaccaacacguccaucaucaaccacaaguucugcaaccugagcgacgcccacaagaagaaccucuacgaccacgcccugauguccaucaucagcaccuuccaccuguccauccccaacuucaaccaguacgaggccaugagcugcgacuucaacgggggcaagaucuccgugcaguacaaccucagccacgcguacgccguggacgccgccaaccacugcgggaccaucgcgaacggcguccugcagaccuucaugcggauggccuggggcggguccuacaucgcccuggacagcggcugcggguccugggacugcaucaugacgagcuaccaguaccucaucauccagaacaucaccugggaggaccacugccaguucucccgccccagccccaucggcuaccuggggcugcucagccagcggacccgcgacaucuacaucucccggcgccugcugggcaccuucacguggacccucagcgacuccgagggcaacgagacccccgggggcuacugccugacccgguggaugcugaucgaggccgagcucaagugcuucgggaacacggccguggcgaagugcaacgagaagcacgacgaggaguucugcgacaugcugcgccuguucgacuucaacaagcaggccauccggcgccucaagaccgaggcccagaugagcauccagcugaucaacaaggccgugaacgcccugaucaacgaccagcucaucaugaagaaccaccuccgggacaucaugugcauccccuacugcaacuacuccaaguacugguaccugaaccacaccgucaccggcaagacgagccugccccgcugcuggcugguguccaacgggagcuaccugaacgagacccacuucuccgacgacaucgagcagcaggcggacaacaugaucaccgagcuccugcagaaggaguacaucgaccggcagggcaagaccccgcugggccugguggaccucuucgucuucagcacguccuucuaccugaucagcaucuuccugcaccucgugaagaucccgacccaccgccacguggucgggaagcccugccccaagccccaccggcugaaccacaugggcaucugcuccugcgggcuguacaagcacccgggcgugcccgugaaguggaagcgcugaggacuagucccuguucccagagcccacuuuuuuuucuuuuuuugaaauaaaauagccugucuuucagaucuaaaaaaaaaaaaaaaaaaaaaaaaaaaaaaaaaaaaaaaaaaaaaaaaaaaaaaaaaaaaaaaaaaaaaaaaaaaaaaaaaaaaaaaaaaaaaaaaaaaa

SEQ ID NO: 35279 - RNA, 1721 nt, Artificial Sequence
  mRNA product Design a-1 (A100) comprising derived and/or modified sequence from LASV(Lassa virus/H.sapiens-wt/NGA/2015/ISTH_0543;Clade II)__AVO03639__GPCmut9 (opt1)
aggagagucccgcagucggcguccagcggcucugcuuguucgugugugugucguugcaggccuuauucaagcuuaccaugggccagaucaucaccuucuuccaggaggugccccacgucaucgaggaggugaugaacaucgugcugaucgcccucagccugcuggccauccucaaggggaucuacaacgucgcgaccugcggccuguucgggcugguguccuuccuccugcugugcggccgcagcugcuccacgaccuacaaggggguguacgagcuccagacccuggagcuggacauggccaaccucaacaugaccaugccgcugagcugcacgaagaacaacucccaccacuacaucauggucggcaacgagaccggccuggagcucacccugaccaacacgagcaucaucaaccacaaguucugcaaccuguccgacgcccacaagaagaaccucuacgaccacgcccugaugagcaucaucuccaccuuccaccugagcauccccaacuucaaccaguacgaggccauguccugcgacuucaacgggggcaagaucagcgugcaguacaaccucucccacaccuacgcgguggacgccgccaaccacugcgggaccaucgccaacggcguccugcagacguucaugcggauggcguggggcgggagcuacaucgcccuggacuccggcugcgggagcugggacugcaucaugaccuccuaccaguaccucgugauccagaacaccaccugggaggaccacugccaguucagccgccccucccccaucggcuaccuggggcugcucagccagcggacgcgcgacaucuacaucagccggcgccugcugggcaccuucaccuggacccucuccgacagcgagggcaacgagacgcccgggggcuacugccugacccgguggaugcugaucgaggccgagcucaagugcuucgggaacaccgccguggccaagugcaacgagaagcacgacgaggaguucugcgacaugcugcgccuguucgacuucaacaagcaggcgauccggcgccucaagaccgaggcccagauguccauccagcugaucaacaaggccgucaacgcccugaucaacgaccagcucaucaugaagaaccaccuccgggacaucaugugcauccccuacugcaacuacagcaaguacugguaccugaaccacacggugaccggcaagaccucccugccccgcugcuggcuggugagcaacggguccuaccugaacgagacccacuucagcgacgacaucgagcagcaggccgacaacaugaucacggagcuccugcagaaggaguacaucgaccggcagggcaagaccccgcugggccuggucgaccucuucguguucuccaccagcuucuaccugaucuccaucuuccugcaccucgugaagaucccgacccaccgccacaucacggggaagcccugccccaagccccaccggcugaaccacaugggcaucugcagcugcgggcuguacaagcacccgggcguccccgugaaguggaagcgcugaggacuagucccuguucccagagcccacuuuuuuuucuuuuuuugaaauaaaauagccugucuuucagaucuaaaaaaaaaaaaaaaaaaaaaaaaaaaaaaaaaaaaaaaaaaaaaaaaaaaaaaaaaaaaaaaaaaaaaaaaaaaaaaaaaaaaaaaaaaaaaaaaaaaa

SEQ ID NO: 35280 - RNA, 1721 nt, Artificial Sequence
  mRNA product Design a-1 (A100) comprising derived and/or modified sequence from LASV(Lassa virus/H.sapiens-wt/NGA/2016/ISTH_0009;Clade II)__AVO03571__GPCmut9 (opt1)
aggagagucccgcagucggcguccagcggcucugcuuguucgugugugugucguugcaggccuuauucaagcuuaccaugggccagaucaucaccuucuuccaggaggugccccacgucaucgaggaggugaugaacaucgugcugaucgcccucagccugcuggccauccucaaggggaucuacaacgucgcgaccugcggccugcuggggcucguguccuuccugcugcucugcggccgcagcugcuccacgaccuacaaggggguguacgagcugcagacccuggagcucgacauggccagccugaacaugaccaugccgcuguccugcacgaagaacaacagccaccacuacaucauggucggcaacgagaccggccucgagcugacccugaccaacacguccaucaucaaccacaaguucugcaaccucagcgacgcccacaagaagaaccuguacgaccacgcccugauguccaucaucagcaccuuccaccucuccauccccaacuucaaccaguacgaggccaugagcugcgacuucaacgggggccggaucuccgugcaguacaaccugagccacuccuacgcgguggacgccgccaaccacugcgggaccaucgccaacggcguccugcagaccuucaugcgcauggcguggggcgggagcuacaucgcccucgacuccggcugcgggagcugggacugcaucaugacguccuaccaguaccugaucauccagaacaccaccugggaggaccacugccaguucagccggcccagccccaucggcuaccuggggcuccugucccagcgcacccgggacaucuacaucagccgccggcugcucggcacguucaccuggacccuguccgacagcgagggcaacgagacccccgggggcuacugccugacgcgcuggaugcucaucgaggccgagcugaagugcuucgggaacaccgccguggccaagugcaacgagaagcacgacgaggaguucugcgacaugcugcggcuguucgacuucaacaagcaggcgauccgccggcugaagaccgaggcccagauguccauccagcugaucaacaaggccgugaacgcccucaucaacgaccagcugaucaugaagaaccaccuccgcgacaucaugugcaucccguacugcaacuacagcaaguacugguaccucaaccacaccgucacgggcaagaccucccugccccggugcuggcuggugagcaacggguccuaccucaacgagacccacuucagcgacgacaucgagcagcaggccgacaacaugaucaccgagcugcugcagaaggaguacaucgaccgccagggcaagacgccccugggccucguggaccuguucgucuucuccaccagcuucuaccugaucuccaucuuccuccaccuggugaagaucccgacccaccggcacaucaccgggaagcccugccccaagccccaccgccugaaccacaugggcaucugcagcugcgggcucuacaaccacccgggcgugcccgucaaguggaagcggugaggacuagucccuguucccagagcccacuuuuuuuucuuuuuuugaaauaaaauagccugucuuucagaucuaaaaaaaaaaaaaaaaaaaaaaaaaaaaaaaaaaaaaaaaaaaaaaaaaaaaaaaaaaaaaaaaaaaaaaaaaaaaaaaaaaaaaaaaaaaaaaaaaaaa

SEQ ID NO: 35281 - RNA, 1721 nt, Artificial Sequence
  mRNA product Design a-1 (A100) comprising derived and/or modified sequence from LASV(Lassa virus/H.sapiens-wt/NGA/2016/ISTH_0017;Clade II)__AVO03567__GPCmut9 (opt1)
aggagagucccgcagucggcguccagcggcucugcuuguucgugugugugucguugcaggccuuauucaagcuuaccaugggccagaucaucaccuucuuccaggaggugccccacgucaucgaggaggugaugaacaucgugcugaucgcccucagccugcuggccauccucaaggggaucuacaacgucgcgaccugcggccuguucgggcugguguccuuccuccugcugugcggccgcagcugcuccacgaccuacaaggggguguacgagcuccagacccuggagcuggacauggccagccucaacaugaccaugccgcuguccugcacgaagaacaacagccaccacuacaucauggucggcaacgagaccggccuggagcucacccugaccaacacguccaucaucaaccacaaguucugcaaccugagcgacgcccacaagaagaaccucuacgaccacgcccugauguccaucaucagcaccuuccaccuguccauccccaacuucaaccaguacgaggccaugagcugcgacuucaacgggggcaagaucuccgugcaguacaaccucagccacaccuacgcgaucgacgccgccaaccacugcgggaccaucgccaacggcgugcugcagacguucaugcggauggcguggggcggguccuacaucgcccuggacagcggcugcggguccugggacugcaucaugaccagcuaccaguaccucaucauccagaacaccaccugggaggaccacugccaguucucccgccccagccccaucggcuaccuggggcugcucagccagcggacgcgcgacaucuacaucucccggcgccugcugggcaccuucaccuggacccucagcgacuccgagggcaacgagacgcccgggggcuacugccugacccgguggaugcugaucgaggccgagcucaagugcuucgggaacaccgccgucgccaagugcaacgagaagcacgacgaggaguucugcgacaugcugcgccuguucgacuucaacaagcaggcgauccggcgccucaagaccgaggcccagaugagcauccagcugaucaacaaggccgugaacgcccugaucaacgaccagcucaucaugaagaaccaccuccgggacaucaugugcauccccuacugcaacuacuccaaguacugguaccugaaccacacggugaccggcaagaccagccugccccgcugcuggcuggucuccaacgggagcuaccugaacgagacccacuucuccgacgacaucgagcagcaggccgacaacaugaucacggagcuccugcagaaggaguacauggaccggcagggcaagaccccgcugggccugguggaccucuucguguucagcaccuccuucuaccugaucagcaucuuccugcaccucguccgcaucccgacccaccggcacgugaucgggaagcccugccccaagccccaccgccugaaccacaugggcaucugcuccugcgggcuguacaagcacccgggcgugcccgucaaguggaagcggugaggacuagucccuguucccagagcccacuuuuuuuucuuuuuuugaaauaaaauagccugucuuucagaucuaaaaaaaaaaaaaaaaaaaaaaaaaaaaaaaaaaaaaaaaaaaaaaaaaaaaaaaaaaaaaaaaaaaaaaaaaaaaaaaaaaaaaaaaaaaaaaaaaaaa

SEQ ID NO: 35282 - RNA, 1721 nt, Artificial Sequence
  mRNA product Design a-1 (A100) comprising derived and/or modified sequence from LASV(Lassa virus/H.sapiens-wt/NGA/2018/ISTH_0959;Clade II)__AVV65099__GPCmut9 (opt1)
aggagagucccgcagucggcguccagcggcucugcuuguucgugugugugucguugcaggccuuauucaagcuuaccaugggccagaucaucaccuucuuccaggaggugccccacgucaucgaggaggugaugaacaucgugcugaucgcccucagccugcuggccauccucaaggggaucuacaacgucgugaccugcggccuguucgggcugguguccuuccuccugcugugcggccgcagcugcuccacgaccuacaagggggucuacgagcuccagacccuggagcuggacauggcgagccucaacaugaccaugccgcuguccugcacgaagaacaacagccaccacuacaucauggugggcaacgagaccggccuggagcucacccugaccaacacguccaucaucaaccacaaguucugcaaccugagcgacgcccacaagaagaaccucuacgaccacgcccugauguccaucaucagcaccuuccaccuguccauccccaacuucaaccaguacgaggccaugagcugcgacuucaacgggggcaagaucuccgugcaguacaaccucagccacgccuacgcgaucgacgccgccaaccacugcgggaccaucgccaacggcguccugcagaccuucaugcggauggcguggggcggguccuacaucgcccuggacagcggcugcggguccugggacugcaucaugacgagcuaccaguaccucaucauccagaacaccaccugggaggaccacugccaguucucccgccccagccccaucggcuaccuggggcugcucagccagcggacccgcgacaucuacaucucccggcgccugcugggcacguucaccuggacccucagcgacuccgagggcaacgagacccccgggggcuacugccugacgcgguggaugcugaucgaggccgagcucaagugcuucgggaacaccgccguggccaagugcaacgagaagcacgacgaggaguucugcgacaugcugcgccuguucgacuucaacaagcaggcgauccggcgccucaagaccgaggcccagaugagcauccagcugaucaacaaggccgugaacgcccugaucaacgaccagcucaucaugaagaaccaccuccgggacaucaugugcaucccguacugcaacuacuccaaguacugguaccugaaccacaccgucacgggcaagaccagccugccccgcugcuggcugguguccaacgggagcuaccugaacgagacccacuucuccgacgacaucgagcagcaggccgacaacaugaucaccgagcuccugcagaaggaguacaucgaccggcagggcaagacgccccugggccugguggaccucuucgucuucagcaccuccuucuaccugaucagcaucuuccugcaccucgugaagaucccgacccaccgccacgugaucgggaagcccugccccaagccccaccggcugaaccacaugggcaucugcuccugcgggcuguacaagcacccgggcguccccgugaaguggaagcgcugaggacuagucccuguucccagagcccacuuuuuuuucuuuuuuugaaauaaaauagccugucuuucagaucuaaaaaaaaaaaaaaaaaaaaaaaaaaaaaaaaaaaaaaaaaaaaaaaaaaaaaaaaaaaaaaaaaaaaaaaaaaaaaaaaaaaaaaaaaaaaaaaaaaaa

SEQ ID NO: 35283 - RNA, 1721 nt, Artificial Sequence
  mRNA product Design a-1 (A100) comprising derived and/or modified sequence from LASV(LASV003-NIG-2008;Clade II)__AIT17580__GPCmut9 (opt1)
aggagagucccgcagucggcguccagcggcucugcuuguucgugugugugucguugcaggccuuauucaagcuuaccaugggccagaucaucaccuucuuccaggaggugccccacgucaucgaggaggugaugaacaucgugcugaucgcccucagccugcuggccauccucaaggggaucuacaacgucgcgaccugcggccuguucgggcugguguccuuccuccugcugugcggccgcagcugcuccacgaccuacaaggggguguacgagcuccagacccuggagcuggacauggccagccucaacaugaccaugccgcuguccugcacgaagaacaacagccaccacuacaucauggucggcaacgagaccggccuggagcucacccugaccaacacguccaucaucaaccacaaguucugcaaccugagcgacgcccacaagaagaaccucuacgaccacgcccugauguccaucaucagcaccuuccaccuguccauccccaacuucaaccaguacgaggccaugagcugcgacuucaacgggggcaagaucuccgugcaguacaaccucagccacaccuacgcgguggacgccgccaaccacugcgggaccaucgccaacggcguccugcagacguucaugcggauggcguggggcggguccuacaucgcccuggacagcggcugcggguccugggacugcaucaugaccagcuaccaguaccucaucauccagaacaccaccugggaggaccacugccaguucucccgccccagccccaucggcuaccuggggcugcucagccagcggacgcgcgacaucuacaucucccggcgccugcugggcaccuucaccuggacccucagcgacuccgagagcaacgagacgccgggcggguacugccugacccgguggaugcugaucgaggccgagcucaagugcuucggcaacaccgccguggccaagugcaacgagaagcacgacgaggaguucugcgacaugcugcgccuguucgacuucaacaagcaggcgauccggcgccucaaggccgaggcccagauguccauccagcugaucaacaaggccgugaacgcccugaucaacgaccagcucaucaugaagaaccaccuccgggacaucaugugcauccccuacugcaacuacagcaaguacugguaccugaaccacaccgucacggggcgcaccucccugccccggugcuggcuggugagcaacggcuccuaccugaacgagacccacuucagcgacgacaucgagcagcaggcggacaacaugaucaccgagcuccugcagaaggaguacauggaccgccaggggaagacgccccugggccugguggaccucuucgucuucuccaccagcuucuaccugaucuccaucuuccugcaccucgugaagaucccgacccaccggcacgugaucggcaagcccugccccaagccccaccgccugaaccacauggggaucugcagcugcggccuguacaagcacccggggguccccgugaaguggaagcggugaggacuagucccuguucccagagcccacuuuuuuuucuuuuuuugaaauaaaauagccugucuuucagaucuaaaaaaaaaaaaaaaaaaaaaaaaaaaaaaaaaaaaaaaaaaaaaaaaaaaaaaaaaaaaaaaaaaaaaaaaaaaaaaaaaaaaaaaaaaaaaaaaaaaa

SEQ ID NO: 35284 - RNA, 1721 nt, Artificial Sequence
  mRNA product Design a-1 (A100) comprising derived and/or modified sequence from LASV(LASV035-NIG-2009;Clade II)__AIT17588__GPCmut9 (opt1)
aggagagucccgcagucggcguccagcggcucugcuuguucgugugugugucguugcaggccuuauucaagcuuaccaugggccagaucaucaccuucuuccaggaggugccccacgucaucgaggaggugaugaacaucgugcugaucgcccucagccugcuggccauccucaaggggaucuacaacgucgcgaccugcggccuguucgggcugguguccuuccuccugcugugcggccgcagcugcuccacgaccuacaaggggguguacgagcuccagacccuggagcuggacauggccagccucaacaugaccaugccgcuguccugcacgaagaacaacagccaccacuacaucauggucggcaacgagaccggccuggagcucacccugaccaacacguccaucaucaaccacaaguucugcaaccugagcgacgcccacaagaagaaccucuacgaccacgcccugauguccaucaucagcaccuuccaccuguccauccccaacuucaaccaguacgaggccaugagcugcgacuucaacgggggcaagaucuccgugcaguacaaccucagccacgcguacgccguggacgccgccaaccacugcgggaccaucgcgaacggcguccugcagaccuucaugcggauggccuggggcggguccuacaucgcccuggacagcggcugcggguccugggacugcaucaugacgagcuaccaguaccucaucauccagaacaccaccugggaggaccacugccaguucucccgccccagccccaucggcuaccuggggcugcucagccagcggacccgcgacaucuacaucucccggcgccugcugggcacguucaccuggacccucagcgacuccgagggcaacgagacccccgggggcuacugccugacgcgguggaugcugaucgaggccgagcucaagugcuucgggaacaccgccguggcgaagugcaacgagaagcacgacgaggaguucugcgacaugcugcgccuguucgacuucaacaagcaggccauccggcgccucaaggccgaggcccagaugagcauccagcugaucaacaaggccgugaacgcgcugaucaacgaccagcucaucaugaagaaccaccuccgggacaucaugugcauccccuacugcaacuacuccaaguacugguaccugaaccacaccgucaccggcaagacgagccugccccgcugcuggcugguguccaacgggagcuaccugaacgagacccacuucuccgacgacaucgagcagcaggccgacaacaugaucaccgagcuccugcagaaggaguacaucgaccggcagggcaagaccccgcugggccugguggaccucuucgucuucagcacguccuucuaccugaucagcaucuuccugcaccucgugaagaucccgacccaccgccacgugaucgggaagcccugccccaagccccaccggcugaaccacaugggcaucugcuccugcgggcuguacaagcacccgggcguccccgugaaguggaagcgcugaggacuagucccuguucccagagcccacuuuuuuuucuuuuuuugaaauaaaauagccugucuuucagaucuaaaaaaaaaaaaaaaaaaaaaaaaaaaaaaaaaaaaaaaaaaaaaaaaaaaaaaaaaaaaaaaaaaaaaaaaaaaaaaaaaaaaaaaaaaaaaaaaaaaa

SEQ ID NO: 35285 - RNA, 1721 nt, Artificial Sequence
  mRNA product Design a-1 (A100) comprising derived and/or modified sequence from LASV(LASV1000-NIG-2009;Clade II)__AIT17782__GPCmut9 (opt1)
aggagagucccgcagucggcguccagcggcucugcuuguucgugugugugucguugcaggccuuauucaagcuuaccaugggccagaucaucaccuucuuccaggaggugccccacgucaucgaggaggugaugaacaucgugcugaucgcccucagccugcuggccauccucaaggggaucuacaacgucgcgaccugcggccuguucgggcugguguccuuccuccugcugugcggccgcagcugcuccacgaccuacaaggggguguacgagcuccagacccuggagcuggacauggccagccucaacaugaccaugccgcuguccugcacgaagaacaacagccaccacuacaucauggucggcaacgagaccggccuggagcucacccugaccaacacguccaucaucaaccacaaguucugcaaccugagcgacgcccacaagaagaaccucuacgaccacgcccugauguccaucaucagcaccuuccaccuguccauccccaacuucaaccaguacgaggccaugagcugcgacuucaacgggggcaagaucuccgugcaguacaaccucagccacaccuacgcgguggacgccgccaaccacugcgggaccaucgccaacggcguccugcagacguucaugcggauggcguggggcggguccuacaucgcccuggacagcggcugcggguccugggacugcaucaugaccagcuaccaguaccucaucauccagaacaccaccugggaggaccacugccaguucucccgccccagccccaucggcuaccuggggcugcucagccagcggacgcgcgacaucuacaucucccggcgccugcugggcaccuucaccuggacccucagcgacuccgagggcaacgagacgcccgggggcuacugccugacccgguggaugcugaucgaggccgagcucaagugcuucgggaacaccgccguggccaagugcaacgagaagcacgacgaggaguucugcgacaugcugcgccuguucgacuucaacaagcaggcgaucaagcggcucaagaccgaggcccagaugagcauccagcugaucaacaaggccgugaacgcccugaucaacgaccagcucaucaugaagaaccaccuccgcgacaucaugugcauccccuacugcaacuacuccaaguacugguaccugaaccacacggucaccggcaagaccagccugccccggugcuggcugguguccaacgggagcuaccugaacgagacccacuucuccgacgacaucgagcagcaggccgacaacaugaucacggagcuccugcagaaggaguacaucgaccgccagggcaagaccccgcugggccugguggaccucuucgucuucagcaccuccuucuaccugaucagcaucuuccugcaccucgugaagaucccgacccaccggcacguggucgggaagcccugccccaagccccaccgccugaaccacaugggcaucugcuccugcgggcuguacaagcacccgggcgugcccgugaaguggaagcggugaggacuagucccuguucccagagcccacuuuuuuuucuuuuuuugaaauaaaauagccugucuuucagaucuaaaaaaaaaaaaaaaaaaaaaaaaaaaaaaaaaaaaaaaaaaaaaaaaaaaaaaaaaaaaaaaaaaaaaaaaaaaaaaaaaaaaaaaaaaaaaaaaaaaa

SEQ ID NO: 35286 - RNA, 1721 nt, Artificial Sequence
  mRNA product Design a-1 (A100) comprising derived and/or modified sequence from LASV(LASV221-NIG-2010;Clade II)__AIT17624__GPCmut9 (opt1)
aggagagucccgcagucggcguccagcggcucugcuuguucgugugugugucguugcaggccuuauucaagcuuaccaugggccagaucaucaccuucuuccaggaggugccccacgucaucgaggaggugaugaacaucgugcugaucgcccucagccugcuggccauccucaaggggaucuacaacgucgcgaccugcggccuguucgggcugguguccuuccuccugcugugcggccgcagcugcuccacgaccuacaaggggguguacgagcuccagacccuggagcuggacauggccagccucaacaugaccaugccgcuguccugcacgaagaacaacagccaccacuacaucauggucggcaacgagaccggccuggagcucacccugaccaacacguccaucaucaaccacaaguucugcaaccugagcgacgcccacaagaagaaccucuacgaccacgcccugauguccaucaucagcaccuuccaccuguccauccccaacuucaaccaguacgaggccaugagcugcgacuucaacgggggcaagaucuccgugcaguacaaccucagccacaccuacgcgaucgacgccgccaaccacugcgggaccaucgccaacggcgugcugcagacguucaugcggauggcguggggcggguccuacaucgcccuggacagcggcugcggguccugggacugcaucaugaccagcuaccaguaccucaucauccagaacaccaccugggaggaccacugccaguucucccgccccagccccaucggcuaccuggggcugcucagccagcggacgcgcgacaucuacaucucccggcgccugcugggcaccuucaccuggacccucagcgacuccgagggcaacgagacgcccgggggcuacugccugacccgguggaugcugaucgaggccgagcucaagugcuucgggaacaccgccgucgccaagugcaacgagaagcacgacgaggaguucugcgacaugcugcgccuguucgacuucaacaagcaggcgauccggcgccucaagaccgaggcccagaugagcauccagcugaucaacaaggccgugaacgcccugaucaacgaccagcucaucaugaagaaccaccuccgggacaucaugugcauccccuacugcaacuacuccaaguacugguaccugaaccacacggugaccggcaagaccagccugccccgcugcuggcuggucuccaacgggagcuaccugaacgagacccacuucuccgacgacaucgagcagcaggccgacaacaugaucacggagaugcuccagaaggaguacauggaccggcagggcaagaccccgcugggccugguggaccuguucguguucagcaccuccuucuaccucaucagcaucuuccugcaccuggucaagaucccgacccaccgccacgugaucgggaagcccugccccaagccccaccggcucaaccacaugggcaucugcuccugcgggcuguacaagcacccgggcgugcccgucaaguggaagcgcugaggacuagucccuguucccagagcccacuuuuuuuucuuuuuuugaaauaaaauagccugucuuucagaucuaaaaaaaaaaaaaaaaaaaaaaaaaaaaaaaaaaaaaaaaaaaaaaaaaaaaaaaaaaaaaaaaaaaaaaaaaaaaaaaaaaaaaaaaaaaaaaaaaaaa

SEQ ID NO: 35287 - RNA, 1721 nt, Artificial Sequence
  mRNA product Design a-1 (A100) comprising derived and/or modified sequence from LASV(LASV237-NIG-2010;Clade II)__AIT17638__GPCmut9 (opt1)
aggagagucccgcagucggcguccagcggcucugcuuguucgugugugugucguugcaggccuuauucaagcuuaccaugggccagaucaucaccuucuuccaggaggugccccacgucaucgaggaggugaugaacaucgugcugaucgcccucagccugcuggccauccucaaggggaucuacaacgucgcgaccugcggccuguucgggcugguguccuuccuccugcugugcggccgcagcugcuccacgaccuacaaggggguguacgagcuccagacccuggagcuggacauggccagccucaacaugaccaugccgcuguccugcacgaagaacaacagccaccacuacaucauggucggcaacgagaccggccuggagcucacccugaccaacacguccaucaucaaccacaaguucugcaaccugagcgacgcccacaagaaggaccucuacgaccacgcccugauguccaucaucagcaccuuccaccuguccauccccaacuucaaccaguacgaggccaugagcugcgacuucaacgggggcaagaucuccgugcaguacaaccucagccacaccuacgcgguggacgccgccaaccacugcgggaccaucgccaacggcguccugcagacguucaugcggauggcguggggcggguccuacaucgcccuggacagcggcugcggguccugggacugcaucaugaccagcuaccaguaccucaucauccagaacaccaccugggaggaccacugccaguucucccgccccagccccaucggcuaccuggggcugcucagccagcggacgcgcgacaucuacaucucccggcgccugcugggcaccuucaccuggacccucagcgacuccgagggcaacgagacgcccgggggcuacugccugacccgguggaugcugaucgaggccgagcucaagugcuucgggaacaccgccguggccaagugcaacgagaagcacgacgaggaguucugcgacaugcugcgccuguucgacuucaacaagcaggcgauccggcgccucaagaccgaggcccagaugagcauccagcugaucaacaaggccgugaacgcccugaucaacgaccagcucaucaugaagaaccaccuccgggacaucaugugcauccccuacugcaacuacuccaaguacugguaccugaaccacacggucaccggcaagaccagccugccccgcugcuggcugguguccaacgggagcuaccugaacgagacccacuucuccgacgacaucgagcagcaggccgacaacaugaucacggagcuccugcagaaggaguacauggaccggcagggcaagaccccgcugggccugguggaccucuucgucuucagcaccuccuucuaccugaucagcaucuuccugcaccucaucaagaucccgacccaccgccacaucacggggaagcccugccccaagccccaccggcugaaccacaugggcaucugcuccugcgggcuguacaagcacccgggcgugcccgugaaguggaagcgcugaggacuagucccuguucccagagcccacuuuuuuuucuuuuuuugaaauaaaauagccugucuuucagaucuaaaaaaaaaaaaaaaaaaaaaaaaaaaaaaaaaaaaaaaaaaaaaaaaaaaaaaaaaaaaaaaaaaaaaaaaaaaaaaaaaaaaaaaaaaaaaaaaaaaa

SEQ ID NO: 35288 - RNA, 1721 nt, Artificial Sequence
  mRNA product Design a-1 (A100) comprising derived and/or modified sequence from LASV(LASV253-NIG-2011;Clade II)__AIT17670__GPCmut9 (opt1)
aggagagucccgcagucggcguccagcggcucugcuuguucgugugugugucguugcaggccuuauucaagcuuaccaugggccagaucaucaccuucuuccaggaggugccccacgucaucgaggaggugaugaacaucgugcugaucgcccucagccugcuggccauccucaaggggaucuacaacgucgcgaccugcggccuguucgggcugguguccuuccuccugcugugcggccgcagcugcuccacgaccuacaaggggguguacgagcuccagacccuggagcuggacauggccagccucaacaugaccaugccgcuguccugcacgaagaacaacagccaccacuacaucauggucggcaacgagaccggccuggagcucacccugaccaacacguccaucaucaaccacaaguucugcaaccugagcgacgcccacaagaagaaccucuacgaccacgcccugauguccaucaucagcaccuuccaccuguccauccccaacuucaaccaguacgaggccaugagcugcgacuucaacgggggcaagaucuccgugcaguacaaccucagccacaccuacgcgguggacgccgccaaccacugcgggaccaucgccaacggcguccugcagacguucaugcggauggcguggggcggguccuacaucgcccuggacagcggcugcggguccugggacugcaucaugaccagcuaccaguaccucaucauccagaacaccaccugggaggaccacugccaguucucccgccccagccccaucggcuaccuggggcugcucagccagcggacgcgcgacaucuacaucucccggcgccugcugggcaccuucaccuggacccucagcgacuccgagggcaacgagacgcccgggggcuacugccugacccgguggaugcugaucgaggccgagcucaagugcuucgggaacaccgccguggccaagugcaacgagaagcacgacgaggaguucugcgacaugcugcgccuguucgacuucaacaagcaggcgauccggcgccucaaggccgaggcccagaugagcauccagcugaucaacaaggccgugaacgcccugaucaacgaccagcucaucaugaagaaccaccuccgggacaucaugugcaucccguacugcaacuacuccaaguacugguaccugaaccacaccgucacgggccgcaccagccugccccggugcuggcugguguccaacgggagcuaccugaacgagacccacuucuccgacgacaucgagcagcaggcggacaacaugaucaccgagcuccugcagaaggaguacaucgaccgccagggcaagacgccccugggccugguggaccucuucgucuucagcaccuccuucuaccugaucagcaucuuccugcaccucgugaagaucccgacccaccggcacaucaucgggaagcccugccccaagccccaccgccugaaccacaugggcaucugcuccugcgggcuguacaagcacccgggcgugcccgucaaguggaagcggugaggacuagucccuguucccagagcccacuuuuuuuucuuuuuuugaaauaaaauagccugucuuucagaucuaaaaaaaaaaaaaaaaaaaaaaaaaaaaaaaaaaaaaaaaaaaaaaaaaaaaaaaaaaaaaaaaaaaaaaaaaaaaaaaaaaaaaaaaaaaaaaaaaaaa

SEQ ID NO: 35289 - RNA, 1721 nt, Artificial Sequence
  mRNA product Design a-1 (A100) comprising derived and/or modified sequence from LASV(LASV254-NIG-2011;Clade II)__AIT17674__GPCmut9 (opt1)
aggagagucccgcagucggcguccagcggcucugcuuguucgugugugugucguugcaggccuuauucaagcuuaccaugggccagaucaucaccuucuuccaggaggugccccacgucaucgaggaggugaugaacaucgugcugaucgcccucagccugcuggccauccucaaggggaucuacaacgucgcgaccugcggccuguucgggcugguguccuuccuccugcugugcggccgcagcugcuccacgaccuacaaggggguguacgagcuccagacccuggagcuggacaugaccaaccucaacaugacgaugccgcugagcugcaccaagaacaacucccaccacuacaucauggucggcaacgagaccggccuggagcucacccugacgaacaccagcaucaucaaccacaaguucugcaaccuguccgacgcccacaagaagaaccucuacaaccacgcccugaugagcaucaucuccaccuuccaccugagcauccccaacuucaaccaguacgaggccauguccugcgacuucaacgggggcaagaucagcgugcaguacaaccucucccacagcuacgccguggacgcggccaaccacugcgggaccaucgccaacggcguccugcagacguucaugcggauggccuggggcggguccuacaucgcgcuggacagcggcugcgggaacugggacugcaucaugaccuccuaccaguaccucaucauccagaacaccaccugggaggaccacugccaguucagccgccccucccccaucggcuaccuggggcugcucagccagcggacgcgcgacaucuacaucagccggcgccugcugggcaccuucaccuggacccucuccgacagcgagggcaacgagacgcccgggggcuacugccugacccgguggaugcugaucgaggccgagcucaagugcuucgggaacaccgccguggccaagugcaacgagaagcacgacgaggaguucugcgacaugcugcgccuguucgacuucaacaagcaggccauccggcgccucaagaccgaggcgcaggccaacauccagcugaucaacaaggccgugaacgcccugaucaacgaccagcucaucaugaagaaccaccuccgggacaucaugugcauccccuacugcaacuacuccaaguacugguaccugaaccacacggucaccggcaagaccagccugccccgcugcuggcugguguccaacgggagcuaccugaacgagacccacuucuccgacgacaucgagcagcaggccgacaacaugaucacggagcuccugcagaaggaguacauggaccggcagggcaagaccccgcugggccugguggaccucuucgucuucagcaccuccuucuaccugaucagcaucuuccugcaccucgugaagaucccgacccaccgccacgugaucgggaagcccugccccaagccccaccggcugaaccacaugggcaucugcuccugcgggcuguacaagcacccgggcguccccgugaaguggaagcgcugaggacuagucccuguucccagagcccacuuuuuuuucuuuuuuugaaauaaaauagccugucuuucagaucuaaaaaaaaaaaaaaaaaaaaaaaaaaaaaaaaaaaaaaaaaaaaaaaaaaaaaaaaaaaaaaaaaaaaaaaaaaaaaaaaaaaaaaaaaaaaaaaaaaaa

SEQ ID NO: 35290 - RNA, 1721 nt, Artificial Sequence
  mRNA product Design a-1 (A100) comprising derived and/or modified sequence from LASV(Nig08-A19;Clade III)__ADU56618__GPCmut9 (opt1)
aggagagucccgcagucggcguccagcggcucugcuuguucgugugugugucguugcaggccuuauucaagcuuaccaugggccagaucgugaccuucuuccaggaggucccccacgugaucgaggaggugaugaacaucguccugaucgcccucagcauccuggccauccugaaggggcucuacaacaucgcgaccugcggccugaucgggcuggugacguuccuccugcuguccggccgcagcugcuccaugaccuacaaggggguguacgagcuccagacccuggagcugaacaugaacacccucaacaugacgaugccgcugagcugcaccaagaacaacucccaccacuacaucauggucggcaacgagaccggccuggagcucacccugacgaacaccagccugcuccaccacaaguucugcaaccuguccgacgcccacaagaagaaccuguacgaccacacccucaugagcaucaucuccaccuuccaccugagcauccccaacuucaaccaguacgaggccauguccugcgacuucaacgggggcaagaucacggugcaguacaaccugagccacuccuacgccaucgacgccgcgaaccacugcgggaccguggccaacggcguccuccagaccuucaugcggauggccuggggcgggagcuacaucgcccuggacuccggcugcgggaagugggacugcaucaugaccagcuaccaguaccugaucauccagaacacgaccugggaggaccacugccaguucucccgccccagccccaucggcuaccucgggcugcugucccagcggacccgcgacaucuacaucagccggcgccuccugggcaccuucacguggacccugagcgacuccgagggcaacgagacccccgggggcuacugccucacccgguggaugcugaucgaggcggagcugaagugcuucgggaacacggccguggccaagugcaacgagaagcacgacgaggaguucugcgacaugcuccgccuguucgacuucaacaagcaggccauccggcgccugaaggccgaggcgcagaugagcauccagcucaucaacaaggccgugaacgcccugaucaacgaccagcugaucaugaagaaccaccuccgggacaucaugugcauccccuacugcaacuacuccaaguacugguaccugaaccacaccagcaccggccgcaccucccugccccggugcuggcucgucagcaacggguccuaccugaacgagacgcacuucagcgacgacaucgagcagcaggccgacaacaugaucaccgagaugcugcagaaggaguaccuggaccgccagggcaagaccccgcucggccugguggaccuguucguguucuccaccagcuucuaccucaucuccaucuuccugcaccuggucaagaucccgacgcaccggcacaucguggggaagcccugccccaagccccaccgccucaaccacaugggcaucugcagcugcgggcuguacaagcagccgggcgugcccguccgguggaagcgcugaggacuagucccuguucccagagcccacuuuuuuuucuuuuuuugaaauaaaauagccugucuuucagaucuaaaaaaaaaaaaaaaaaaaaaaaaaaaaaaaaaaaaaaaaaaaaaaaaaaaaaaaaaaaaaaaaaaaaaaaaaaaaaaaaaaaaaaaaaaaaaaaaaaaa

SEQ ID NO: 35291 - RNA, 1724 nt, Artificial Sequence
  mRNA product Design a-1 (A100) comprising derived and/or modified sequence from LASV(G1180-SLE-2010;Clade IV)__AIT17168__GPCmut9 (opt1)
aggagagucccgcagucggcguccagcggcucugcuuguucgugugugugucguugcaggccuuauucaagcuuaccaugggccagaucgugaccuucuuccaggaggucccccacgugaucgaggaggugaugaacaucguccugaucgcccucagcauccuggccgugcugaaggggcucuacaacuucgcgaccugcggccugguggggcugcucaccuuccugcugcucugcggccgcuccugcaccgccagccgguacaagggggucuacgagcugcagacccuggagcucaacauggagacccugaacaugacgaugccgcuguccugcaccaagaacaacagccaccacuacaucauggugggcaacgagaccggccucgagcugacccugacgaacaccuccaucaucaaccacaaguucugcaaccucagcgacgcccacaagaagaaccuguacgaccacgcccugauguccaucaucagcaccuuccaccucuccauccccaacuucaaccaguacgaggccaugagcugcgacuucaacgggggcaagaucuccgugcaguacaaccugagccacuccuacgcgggggacgccgccaaccacugcggcaccgucgccaacggggugcugcagacguucaugcgcauggcguggggcggcagcuacaucgcccucgacuccgggugcggcagcugggacugcaucaugaccuccuaccaguaccugaucauccagaacaccaccugggaggaccacugccaguucagccggcccucccccaucggguaccugggccuccugagccagcgcacgcgggacaucuacaucagccgccggcugcucggcaccuucaccuggacccuguccgacagcgaggggaaggacacgccgggcggguacugccugacccgcuggaugcucaucgaggccgagcugaagugcuucggcaacaccgccguggccaagugcaacgagaagcacgacgaggaguucugcgacaugcugcggcuguucgacuucaacaagcaggcgauccagcgccugaaggccgaggcccagauguccauccagcugaucaacaaggccgucaacgcccucaucaacgaccagcugaucaugaagaaccaccuccgggacaucaugugcauccccuacugcaacuacagcaaguacugguaccucaaccacaccacgaccgggaagaccucccugcccaagugcuggcuggugagcaacggcuccuaccucaacgagacccacuucagcgacgacaucgagcagcaggcggacaacaugaucacggagaugcugcagaaggaguacauggagcgccagggcaagacgccccuggggcugguggaccucuucgucuucuccaccagcuucuaccugaucuccaucuuccugcaccucgugaagaucccgacccaccggcacaucgugggcaagagcugccccaagccccaccgccugaaccacauggggaucugcuccugcggccuguacaagcagcccggggucccggugaaguggaagcggugaggacuagucccuguucccagagcccacuuuuuuuucuuuuuuugaaauaaaauagccugucuuucagaucuaaaaaaaaaaaaaaaaaaaaaaaaaaaaaaaaaaaaaaaaaaaaaaaaaaaaaaaaaaaaaaaaaaaaaaaaaaaaaaaaaaaaaaaaaaaaaaaaaaaa

SEQ ID NO: 35292 - RNA, 1724 nt, Artificial Sequence
  mRNA product Design a-1 (A100) comprising derived and/or modified sequence from LASV(G1442-SLE-2011;Clade IV)__AIT17180__GPCmut9 (opt1)
aggagagucccgcagucggcguccagcggcucugcuuguucgugugugugucguugcaggccuuauucaagcuuaccaugggccagaucgugaccuucuuccaggaggucccccacgugaucgaggaggugaugaacaucguccugaucgcccucagcauccuggccgugcugaaggggcucuacaacguggcgaccugcggccugaucgggcuggucacguuccuccugcugugcggccgcuccugcaccaccacccucuacaaggggguguacgagcugcagacgcuggagcucaacauggagacccugaacaugaccaugccgcugagcugcaccaagaacaacucccaccacuacauccgggugggcaacgagacgggccucgagcugacccugaccaacaccagcaucaucaaccacaaguucugcaaccucuccgacgcccacaagaagaaccuguacgaccacgcccugaugagcaucaucuccacguuccaccucagcauccccaacuucaaccaguacgaggccauguccugcgacuucaacgggggcaagaucagcguccaguacaaccugucccacagcuacgccggggacgcggccaaccacugcggcaccguggccaacggggugcugcagaccuucaugcgcauggccuggggcggcuccuacaucgcgcucgacagcgggugcggcaacugggacugcaucaugaccuccuaccaguaccugaucauccagaacacgaccugggacgaccacugccaguucagccggcccucccccaucggguaccugggccuccugagccagcgcacccgggacgucuacaucucccgccggcugcucggcaccuucacguggacccugagcgacagcgaggggaaggacaccccgggcggguacugccugacccgcuggaugcucaucgaggccgagcugaagugcuucggcaacacggccguggccaagugcaacgagaagcacgacgaggaguucugcgacaugcugcggcuguucgacuucaacaagcaggccauccagcgccugaaggcggaggcccagauguccauccagcugaucaacaaggccgugaacgcccucaucaacgaccagcugaucaugaagaaccaccuccgggacaucaugugcauccccuacugcaacuacagcaaguacugguaccucaacaacaccgccaccgggaagaccucccugcccaagugcuggcugaucagcaacggcuccuaccucaacgagacgcacuucagcgacgacaucgagcaggaggcggacaacaugaucaccgagaugcugcagaaggaguacauggagcgccagggcaagacgccccuggggcuggucgaccucuucguguucuccaccagcuucuaccugaucuccaucuuccugcaccucgugaagaucccgacccaccggcacaucgucggcaagagcugccccaagccccaccgccugaaccacauggggaucugcuccugcggccuguacaagcagcccggggugccggugcgguggaagcgcugaggacuagucccuguucccagagcccacuuuuuuuucuuuuuuugaaauaaaauagccugucuuucagaucuaaaaaaaaaaaaaaaaaaaaaaaaaaaaaaaaaaaaaaaaaaaaaaaaaaaaaaaaaaaaaaaaaaaaaaaaaaaaaaaaaaaaaaaaaaaaaaaaaaaa

SEQ ID NO: 35293 - RNA, 1724 nt, Artificial Sequence
  mRNA product Design a-1 (A100) comprising derived and/or modified sequence from LASV(G3010-SLE-2013;Clade IV)__AIT17344__GPCmut9 (opt1)
aggagagucccgcagucggcguccagcggcucugcuuguucgugugugugucguugcaggccuuauucaagcuuaccaugggccagaucgugaccuucuuccaggaggucccccacgugaucgaggaggugaugaacaucguccugaucgcccucagcauccuggccgugcugaaggggcucuacaacuucgcgaccugcggccugguggggcuggucacguuccuccugcugugcggccgcuccugcaccaccagccucuacaaggggguguacgagcugcagacccuggagcucaacauggagacgcugaacaugaccaugccgcuguccugcaccaagaacaacagccaccacuacaucauggugggcaacgagaccggccucgagcugacgcugaccaacaccuccaucaucaaccacaaguucugcaaccucagcgacgcccacaagaagaaccuguacaaccacgcccugauguccaucaucagcaccuuccaccucuccauccccaacuucaaccaguacgaggccaugagcugcgacuucaacgggggcaagaucuccguccaguacaaccugagccacuccuacgccggggacgcggccagccacugcggcacgguggccaacggggugcugcagaccuucaugcggauggccuggggcggcuccuacaucgcgcucgacagcgggugcggcaagugggacugcaucaugaccuccuaccaguaccugaucauccagaacaccacgugggaggaccacugccaguucagccgccccucccccaucggguaccugggccuccugagccagcggacccgcgacaucuacaucagccggcgccugcucggcaccuucaccuggacgcuguccgacagcgaggggaaggacaccccgggcggguacugccugacccgguggaugcucaucgaggccgagcugaagugcuucggcaacaccgccgucgccaagugcaacgagaagcacgacgaggaguucugcgacaugcugcgccucuucgacuucaacaagcaggccauccagcggcugaagacggaggcgcagauguccauccagcugaucaacaaggccgugaacgcccucaucaacgaccagcugaucaugaagaaccaccuccgcgacaucaugugcauccccuacugcaacuacagcaaguacugguaccugaaccacaccaccaccgggaagacgucccugcccaagugcuggcuggugagcaacggcuccuaccucaacgagacccacuucagcgacgacaucgagcagcaggccgacaacaugaucaccgagaugcugcagaaggaguacauggagcggcagggcaagacgccccuggggcuggucgaccucuucguguucuccaccagcuucuaccugaucuccaucuuccugcaccucgugaagaucccgacccaccgccacaucgucggcaagagcugccccaagccccaccggcugaaccacauggggaucugcuccugcggccuguacaagcagcccggggugccggugcgcuggaagcggugaggacuagucccuguucccagagcccacuuuuuuuucuuuuuuugaaauaaaauagccugucuuucagaucuaaaaaaaaaaaaaaaaaaaaaaaaaaaaaaaaaaaaaaaaaaaaaaaaaaaaaaaaaaaaaaaaaaaaaaaaaaaaaaaaaaaaaaaaaaaaaaaaaaaa

SEQ ID NO: 35294 - RNA, 1724 nt, Artificial Sequence
  mRNA product Design a-1 (A100) comprising derived and/or modified sequence from LASV(G502-SLE-2009;Clade IV)__AIT17126__GPCmut9 (opt1)
aggagagucccgcagucggcguccagcggcucugcuuguucgugugugugucguugcaggccuuauucaagcuuaccaugggccagaucgugaccuucuuccaggaggucccccacgugaucgaggaggugaugaacaucguccugaucgcccucagcauccuggccgugcugaaggggcucuacaacuucgcgaccugcggccugguggggcugcucacguuccugcugcucugcggccgcuccugcaccaccgggcuguacaagggcgucuacgagcugcagacccucgagcugaacauggagacgcugaacaugaccaugccgcucagcugcaccaagaacaacucccaccacuacaucauggugggcaacgagaccgggcuggagcugacgcucaccaacaccagcaucaucaaccacaaguucugcaaccuguccgacgcccacaagaagaaccuguacgaccacgcccucaugagcaucaucuccaccuuccaccugagcauccccaacuucaaccaguacgaggccauguccugcgacuucaacggcgggaagaucagcgugcaguacaaccugucccacagcuacgccggcgacgcggccgaccacugcgggacggucgccaacggcgugcuccagaccuucaugcggauggccuggggcggguccuacaucgcgcuggacagcggcugcgggcgcugggacugcaucaugaccuccuaccaguaccugaucauccagaacaccacgugggaggaccacugccaguucagccggcccucccccaucggcuaccucggccugcugagccagcgcacccgggacaucuacaucucccgccggcuccuggggaccuucaccuggacgcugagcgacagcgagggcaaggacacccccgggggcuacugccucacccgcuggaugcugaucgaggccgagcugaagugcuucgggaacaccgccguggccaagugcaacgagaagcacgacgaggaguucugcgacaugcuccggcuguucgacuucaacaagcaggccauccagcgccugaaggcggaggcccagauguccauccagcucaucaacaaggccgucaacgcccugaucaacgaccagcuggugaugaagaaccaccuccgggacaucaugugcauccccuacugcaacuacagccgcuacugguaccugaaccacacgaccaccggccggaccucccugcccaagugcuggcucgugagcaacggcuccuaccugaacgagacgcacuucagcgacgacaucgagcagcaggccgacaacaugaucaccgagaugcugcagaaggaguacauggagcgccaggggaagaccccgcugggccucgucgaccuguucguguucuccaccagcuucuaccugaucuccaucuuccuccaccuggugaagaucccgacgcaccggcacaucgucggcaagagcugccccaagccccaccgccugaaccacauggggaucugcuccugcgggcucuacaagcagcccggcgugccggugaaguggaagcggugaggacuagucccuguucccagagcccacuuuuuuuucuuuuuuugaaauaaaauagccugucuuucagaucuaaaaaaaaaaaaaaaaaaaaaaaaaaaaaaaaaaaaaaaaaaaaaaaaaaaaaaaaaaaaaaaaaaaaaaaaaaaaaaaaaaaaaaaaaaaaaaaaaaaa

SEQ ID NO: 35295 - RNA, 1724 nt, Artificial Sequence
  mRNA product Design a-1 (A100) comprising derived and/or modified sequence from LASV(G733-SLE-2010;Clade IV)__AIT17154__GPCmut9 (opt1)
aggagagucccgcagucggcguccagcggcucugcuuguucgugugugugucguugcaggccuuauucaagcuuaccaugggccagaucgugaccuucuuccaggaggucccccacgugaucgaggaggugaugaacaucguccugaucgcccucagcauccuggccgugcugaaggggcucuacaacuucgcgaccugcggcaucguggggcuggucuccuuccugcuccugugcggccgcagcugcacgaccucccuguacaaggggguguacgagcuccagacccuggagcugaacauggagacccucaacaugacgaugccgcugagcugcaccaagaacaacucccaccacuacaucauggugggcaacgagaccggccuggagcucacccugacgaacaccagcaucaucaaccacaaguucugcaaccuguccgacgcccacaagaagaaccucuacgaccacgcccugaugagcaucaucuccaccuuccaccugagcauccccaacuucaaccaguacgaggccauguccugcgacuucaacgggggcaagaucagcguccaguacaaccucucccacagcuacgccggggacgcggccaaccacugcggcaccaucgccaacggggugcugcagacguucaugcggauggccuggggcggcuccuacaucgcgcuggacagcgggugcgaccgcugggacugcaucaugaccuccuaccaguaccucaucauccagaacaccaccugggaggaccacugccaguucagccggcccucccccaucggcuaccuggggcugcucagccagcgcacgcgggacaucuacaucagccgccggcugcugggcaccuucaccuggacccucuccgacagcgagggcaaggacacgcccgggggcuacugccugacccgcuggaugcugaucgaggccgagcucaagugcuucgggaacaccgccguggccaagugcaacgagaagcacgacgaggaguucugcgacaugcugcggcuguucgacuucaacaagcaggccauccagcgccucaaggcggaggcccagauguccauccagcugaucaacaaggccgucaacgcccugaucaacgaccagcucaucaugaagaaccaccuccgggacaucaugugcauccccuacugcaacuacagcaaguacugguaccugaaccacaccacgaccggcaagaccucccugcccaagugcuggcuggugagcaacggguccuaccugaacgagacccacuucagcgacgacaucgagcagcaggccgacaacaugaucacggagaugcuccagaaggaguacauggagcgccagggcaagaccccgcugggccugguggaccuguucgucuucuccaccagcuucuaccucaucuccaucuuccugcaccuggugaagaucccgacccaccggcacguggucggcaagagcugccccaagccccaccgccucaaccacauggggaucugcuccugcgggcuguacggccagcccggggugccggugaaguggaagcggugaggacuagucccuguucccagagcccacuuuuuuuucuuuuuuugaaauaaaauagccugucuuucagaucuaaaaaaaaaaaaaaaaaaaaaaaaaaaaaaaaaaaaaaaaaaaaaaaaaaaaaaaaaaaaaaaaaaaaaaaaaaaaaaaaaaaaaaaaaaaaaaaaaaaa

SEQ ID NO: 35296 - RNA, 1724 nt, Artificial Sequence
  mRNA product Design a-1 (A100) comprising derived and/or modified sequence from MOPV/LASV reassortant(IGS-1;Clade IV)__AFY05576__GPCmut9 (opt1)
aggagagucccgcagucggcguccagcggcucugcuuguucgugugugugucguugcaggccuuauucaagcuuaccaugggccagaucgugaccuucuuccaggaggucccccacgugaucgaggaggugaugaacaucguccugaucgcccucagcgugcuggccgugcugaaggggcucuacaacuucgcgaccugcggccuggucgggcuggugacguuccuccugcugugcggccgcuccugcaccaccagccucuacaaggggguguacgagcugcagacccuggagcucaacauggagacgcugaacaugaccaugccgcuguccugcaccaagaacaacagccaccacuacaucauggucggcaacgagaccggccucgagcugacgcugaccaacaccuccaucaucaaccacaaguucugcaaccucagcgacgcccacaagaagaaccuguacgaccacgcccugauguccaucaucagcaccuuccaccucuccauccccaacuucaaccaguacgaggccaugagcugcgacuucaacgggggcaagaucuccgugcaguacaaccugagccacuccuacgccggggacgcggccaaccacugcggcacgguggccaacgggguccugcagaccuucaugcggauggccuggggcggcagcuacaucgcgcucgacuccgggugcggcaacugggacugcaucaugaccagcuaccaguaccugaucauccagaacaccacgugggaggaccacugccaguucucccgccccagccccaucggguaccugggccuccugucccagcggacccgcgacaucuacaucagccggcgccugcucggcaccuucaccuggacgcugagcgacuccgagggggaggacaccccgggcggguacugccugacccgguggaugcucaucgaggccgagcugaagugcuucggcaacaccgccguggccaagugcaacgagaagcacgacgaggaguucugcgacaugcugcgccucuucgacuucaacaagcaggccauccagcggcugaaggcggaggcccagaugagcauccagcugaucaacaaggccgugaacgcccucaucaacgaccagcugaucaugaagaaccaccuccgcgacaucaugugcauccccuacugcaacuacuccaaguacugguaccugaaccacacgaccaccgggcggaccagccugcccaagugcuggcuggucuccaacggcagcuaccucaacgagacgcacuucuccgacgacaucgagcagcaggccgacaacaugaucaccgagaugcugcagaaggaguacauggagcgccagggcaagacgccccuggggcugguggaccucuucguguucagcaccuccuucuaccugaucagcaucuuccugcaccucgucaagaucccgacccaccggcacaucgugggcaaguccugccccaagccccaccgccugaaccacauggggaucugcagcugcggccuguacaagcagcccggggugccggucaaguggaagcggugaggacuagucccuguucccagagcccacuuuuuuuucuuuuuuugaaauaaaauagccugucuuucagaucuaaaaaaaaaaaaaaaaaaaaaaaaaaaaaaaaaaaaaaaaaaaaaaaaaaaaaaaaaaaaaaaaaaaaaaaaaaaaaaaaaaaaaaaaaaaaaaaaaaaa

SEQ ID NO: 35297 - RNA, 1724 nt, Artificial Sequence
  mRNA product Design a-1 (A100) comprising derived and/or modified sequence from LASV(LM765-SLE-2012;Clade IV)__AIT17814__GPCmut9 (opt1)
aggagagucccgcagucggcguccagcggcucugcuuguucgugugugugucguugcaggccuuauucaagcuuaccaugggccagaucgugaccuucuuccaggaggucccccacgugaucgaggaggugaugaacaucguccugaucgcccucagcauccuggccgugcugaaggggcucuacaacuucgcgaccugcggccugguggggcuggucacguuccuccugcugugcggccgcuccugcaccaccagccucuacaaggggguguacgagcugcagacccuggagcucaacauggagacgcugaacaugaccaugccgcuguccugcaccaagaacaacagccaccacuacaucauggugggcaacgagaccggccucgagcugacgcugaccaacaccuccaucaucgaccacaaguucugcaaccucagcgacgcccaccggaagaaccuguacgaccacgcccugauguccaucaucagcaccuuccaccucuccauccccaacuucaaccaguacgaggccaugagcugcgacuucaacgggggcaagaucuccguccaguacaaccugagccacuccuacgccaaggacgcggccgaccacugcgggacgguggccaacggcgugcugcagaccuucaugcgcauggccuggggcgggagcuacaucgcgcucgacuccggcugcgggcggugggacugcaucaugaccagcuaccaguaccugaucauccagaacaccacgugggaggaccacugccaguucucccgccccagccccaucggcuaccuggggcuccugucccagcggacccgcgacaucuacaucagccggcgccugcucggcaccuucaccuggacgcugagcgacuccgagggcaaggacacccccgggggcuacugccugacccgguggaugcucaucgaggccgagcugaagugcuucgggaacaccgccgucgccaagugcaacgagaagcacgacgaggaguucugcgacaugcugcgccucuucgacuucaacaagcaggccauccagcggcugaaggcggaggcccagaugagcauccagcugaucaacaaggccgugaacgcccucaucaacgaccagcugaucaugaagaaccaccuccgcgacaucaugugcauccccuacugcaacuacuccaaguacugguaccugaaccacacgaccaccggcaagaccagccugcccaagugcuggcugguguccaacgggagcuaccucaacgagacgcacuucuccgacgacaucgagcagcaggccgacaacaugaucaccgagaugcugcagaaggaguacauggagcggcagggcaagaccccgcugggccuggucgaccucuucguguucagcaccuccuucuaccugaucagcaucuuccugcaccucgugaagaucccgacgcaccgccacaucgucgggaagcccugccccaagccccaccggcugaaccacaugggcaucugcuccugcgggcuguacaagcagccgggcgugcccgugaaguggaagcgcugaggacuagucccuguucccagagcccacuuuuuuuucuuuuuuugaaauaaaauagccugucuuucagaucuaaaaaaaaaaaaaaaaaaaaaaaaaaaaaaaaaaaaaaaaaaaaaaaaaaaaaaaaaaaaaaaaaaaaaaaaaaaaaaaaaaaaaaaaaaaaaaaaaaaa

SEQ ID NO: 35298 - RNA, 1724 nt, Artificial Sequence
  mRNA product Design a-1 (A100) comprising derived and/or modified sequence from LASV(LM776-SLE-2012;Clade IV)__AIT17824__GPCmut9 (opt1)
aggagagucccgcagucggcguccagcggcucugcuuguucgugugugugucguugcaggccuuauucaagcuuaccaugggccagaucgugaccuucuuccaggaggucccccacgugaucgaggaggugaugaacaucguccugaucgcccucagcauccuggccgugcugaaggggcucuacaacuucgcgaccugcggccugguggggcuggucacguuccuccugcugugcggccgcuccugcaccaccagcguguacaaggggguguacgagcuccagacccuggagcugaacauggagacgcucaacaugaccaugccgcuguccugcaccaagaacaacagccaccacuacaucauggucggcaacgagaccggccuggagcucacgcugaccaacaccuccaucaucaaccacaaguucugcaaccugagcgacgcccacaagaagaaccucuacgaccacgcccugauguccaucaucagcaccuuccaccuguccauccccaacuucaaccaguacgaggccaugagcugcgacuucaacgggggcaagaucuccgugcaguacaaccucagccacuccuacgccggggacgcggccaaccacugcggcacgguggccaacgggguccugcagaccuucaugcggauggccuggggcggcagcuacaucgcgcuggacuccgggugcggcaagugggacugcaucaugaccagcuaccaguaccucaucauccagaacaccacgugggaggaccacugccaguucucccgccccagccccaucggguaccugggccugcucucccagcggacccgcgacaucuacaucagccggcgccugcugggcaccuucaccuggacgcucagcgacuccgaggggaaggacaccccgggcggguacugccugacccgguggaugcugaucgaggccgagcucaagugcuucggcaacaccgccguggccaagugcaacgagaagcacgacgaggaguucugcgacaugcugcgccuguucgacuucaacaagcaggccauccagcggcucaaggcggaggcccagaugagcauccagcugaucaacaaggccgugaacgcccugaucaacgaccagcucaucaugaagaaccaccuccgcgacaucaugugcauccccuacugcaacuacuccaaguacugguaccugaaccacacgaccaccgggaagaccagccugcccaagugcuggcuggucuccaacggcagcuaccugaacgagacgcacuucuccgacgacaucgagcagcaggccgacaacaugaucaccgagaugcuccagaaggaguacauggagcggcagggcaagacgccccuggggcugguggaccuguucguguucagcaccuccuucuaccucaucagcaucuuccugcaccuggucaagaucccgacccaccgccacaucgugggcaaguccugccccaagccccaccggcucaaccacauggggaucugcagcugcggccuguacaagcagcccggggugccgguccgcuggaagcggugaggacuagucccuguucccagagcccacuuuuuuuucuuuuuuugaaauaaaauagccugucuuucagaucuaaaaaaaaaaaaaaaaaaaaaaaaaaaaaaaaaaaaaaaaaaaaaaaaaaaaaaaaaaaaaaaaaaaaaaaaaaaaaaaaaaaaaaaaaaaaaaaaaaaa

SEQ ID NO: 35299 - RNA, 1724 nt, Artificial Sequence
  mRNA product Design a-1 (A100) comprising derived and/or modified sequence from LASV(Mad39;Clade IV)__ANH09722__GPCmut9 (opt1)
aggagagucccgcagucggcguccagcggcucugcuuguucgugugugugucguugcaggccuuauucaagcuuaccaugggccagaucgugaccuucuuccaggaggucccccacgugaucgaggaggugaugaacaucguccugaucgcccucagcauccuggccgugcugaaggggcucuacaacguggcgaccugcggccugaucgggcuggucacguuccuccugcugugcggccgcuccugcaccaccacccucuacaaggggguguacgagcugcaggcccuggagcucaacauggagacgcugaacaugaccaugccgcugagcugcaccaagaacaacucccaccacuacauccgggugggcaacgagaccggccucgagcugacgcugaccaacaccagccucaucaaccacaaguucugcaaccuguccgacgcccacaagaagaaccuguacgaccacgcccucaugagcaucaucuccaccuuccaccugagcauccccaacuucaaccaguacgaggccauguccugcgacuucaacgacgggaagaucagcguccaguacaaccugucccacacguacgcgggcgacaccgccaaccacugcgggaccguggccaacggcgugcuccagaccuucaugcgcauggccuggggcgggagcuacaucgcgcuggacuccggcugcgggggcugggacugcaucaugacgagcuaccaguaccugaucauccagaacaccaccugggaggaccacugccaguucucccggcccagccccaucggguaccucggccugcugucccagcgcacccgggacaucuacaucagccgccggcuccugggcacguucaccuggacccuguccgacagcgaggggaaggacaccccgggcggguacugccucacgcgcuggaugcugaucgaggccgagcugaagugcuucggcaacaccgccgucgccaagugcaacgagaagcacgacgaggaguucugcgacaugcuccggcuguucgacuucaacaagcaggccauccagcgccugaaggcggaggcccagaugagcauccagcucaucaacaaggccgugaacgcccugaucaacgaccagcugaucaugaagaaccaccuccgggacaucaugugcauccccuacugcaacuacuccaaguacugguaccugaaccacaccgugaccgggaagacgagccugcccaagugcuggcucgucuccaacggcagcuaccugaacgagacccacuucuccgacgacaucgagcagcaggccgacaacaugaucaccgagaugcugcagaaggaguacauggagcgccagggcaagacgccccuggggcucguggaccuguucguguucagcaccuccuucuaccugaucagcaucuuccuccaccuggucaagaucccgacccaccggcacguggugggcaagcccugccccaagccccaccgccugaaccacauggggaucugcuccugcggcuucuacaagcagccggggguccccgugcgguggaagcgcugaggacuagucccuguucccagagcccacuuuuuuuucuuuuuuugaaauaaaauagccugucuuucagaucuaaaaaaaaaaaaaaaaaaaaaaaaaaaaaaaaaaaaaaaaaaaaaaaaaaaaaaaaaaaaaaaaaaaaaaaaaaaaaaaaaaaaaaaaaaaaaaaaaaaa

SEQ ID NO: 35300 - RNA, 1724 nt, Artificial Sequence
  mRNA product Design a-1 (A100) comprising derived and/or modified sequence from LASV(Z0947-SLE-2011;Clade IV)__AIT17840__GPCmut9 (opt1)
aggagagucccgcagucggcguccagcggcucugcuuguucgugugugugucguugcaggccuuauucaagcuuaccaugggccagaucgugaccuucuuccaggaggucccccacgugaucgaggaggugaugaacaucguccugaucgcccucagcauccuggccgugcugaaggggcucuacaacuucgcgaccugcggccugguggggcuggucacguuccuccugcugugcggccgcuccugcaccaucagccucuacaaggggguguacgagcugcagacccuggagcucaacauggagacccugaacaugacgaugccgcuguccugcaccaagaacaacagccaccacuacaucauggugggcaacgagaccggccucgagcugacccugacgaacaccuccaucaucaaccacaaguucugcaaccucagcgacgcccacaagaagaaccuguacgaccacgcccugauguccaucaucagcaccuuccaccucuccauccccaacuucaaccaguacgaggccaugagcugcgacuucaacgggggcaagaucuccguccaguacaaccugagccacuccuacgccggggacgcggccaaccacugcggcaccguggccaacggggugcugcagacguucaugcggauggccuggggcggcagcuacaucgcgcucgacuccgggugcgaccgcugggacugcaucaugaccagcuaccaguaccugaucauccagaacaccaccugggaggaccacugccaguucucccggcccagccccaucggcuaccuggggcuccugucccagcgcacgcgggacaucuacaucagccgccggcugcucggcaccuucaccuggacccugagcgacuccgagggcaaggacacgcccgggggcuacugccugacccgcuggaugcucaucgaggccgagcugaagugcuucgggaacaccgccgucgccaagugcaacgagaagcacgacgaggaguucugcgacaugcugcggcuguucgacuucaacaagcaggccauccagcgccugaaggcggaggcccagaugagcauccagcugaucaacaaggccgugaacgcccucaucaacgaccagcugaucaugaagaaccaccuccgggacaucaugugcauccccuacugcaacuacuccaaguacugguaccucaaccacaccacgaccggcaagaccagccugcccaagugcuggcugguguccaacgggagcuaccucaacgagacccacuucuccgacgacaucgagcagcaggccgacaacaugaucacggagaugcugcagaaggaguacauggagcgccagggcaagaccccgcugggccuggucgaccucuucguguucagcaccuccuucuaccugaucagcaucuuccugcaccucgugaagaucccgacccaccggcacaucgucgggaagcccugccccaagccccaccgccugaaccacaugggcaucugcuccugcgggcuguacaagcagccgggcgugcccgugaaguggaagcggugaggacuagucccuguucccagagcccacuuuuuuuucuuuuuuugaaauaaaauagccugucuuucagaucuaaaaaaaaaaaaaaaaaaaaaaaaaaaaaaaaaaaaaaaaaaaaaaaaaaaaaaaaaaaaaaaaaaaaaaaaaaaaaaaaaaaaaaaaaaaaaaaaaaaa

SEQ ID NO: 35301 - RNA, 1724 nt, Artificial Sequence
  mRNA product Design a-1 (A100) comprising derived and/or modified sequence from LASV(Josiah;Clade IV)__NP_694870__GPCmut9 (opt4)
aggagagucccgcagucggcguccagcggcucugcuuguucgugugugugucguugcaggccuuauucaagcuuaccaugggccagaucgugaccuucuuccaggaggugccccacgugaucgaggaggugaugaacaucgugcugaucgcccugagcgugcuggccgugcugaagggccuguacaacuucgccaccugcggccuggugggccuggugaccuuccugcugcugugcggcagaagcugcaccaccagccuguacaagggcguguacgagcugcagacccuggagcugaacauggagacccugaacaugaccaugccccugagcugcaccaagaacaacagccaccacuacaucauggugggcaacgagaccggccuggagcugacccugaccaacaccagcaucaucaaccacaaguucugcaaccugagcgacgcccacaagaagaaccuguacgaccacgcccugaugagcaucaucagcaccuuccaccugagcauccccaacuucaaccaguacgaggccaugagcugcgacuucaacggcggcaagaucagcgugcaguacaaccugagccacagcuacgccggcgacgccgccaaccacugcggcaccguggccaacggcgugcugcagaccuucaugagaauggccuggggcggcagcuacaucgcccuggacagcggcugcggcaacugggacugcaucaugaccagcuaccaguaccugaucauccagaacaccaccugggaggaccacugccaguucagcagacccagccccaucggcuaccugggccugcugagccagagaaccagagacaucuacaucagcagaagacugcugggcaccuucaccuggacccugagcgacagcgagggcaaggacacccccggcggcuacugccugaccagauggaugcugaucgaggccgagcugaagugcuucggcaacaccgccguggccaagugcaacgagaagcacgacgaggaguucugcgacaugcugagacuguucgacuucaacaagcaggccauccagagacugaaggccgaggcccagaugagcauccagcugaucaacaaggccgugaacgcccugaucaacgaccagcugaucaugaagaaccaccugagagacaucaugugcauccccuacugcaacuacagcaaguacugguaccugaaccacaccaccaccggcagaaccagccugcccaagugcuggcuggugagcaacggcagcuaccugaacgagacccacuucagcgacgacaucgagcagcaggccgacaacaugaucaccgagaugcugcagaaggaguacauggagagacagggcaagaccccccugggccugguggaccuguucguguucagcaccagcuucuaccugaucagcaucuuccugcaccuggugaagauccccacccacagacacaucgugggcaagagcugccccaagccccacagacugaaccacaugggcaucugcagcugcggccuguacaagcagcccggcgugcccgugaaguggaagagaugaggacuagucccuguucccagagcccacuuuuuuuucuuuuuuugaaauaaaauagccugucuuucagaucuaaaaaaaaaaaaaaaaaaaaaaaaaaaaaaaaaaaaaaaaaaaaaaaaaaaaaaaaaaaaaaaaaaaaaaaaaaaaaaaaaaaaaaaaaaaaaaaaaaaa

SEQ ID NO: 35302 - RNA, 1721 nt, Artificial Sequence
  mRNA product Design a-1 (A100) comprising derived and/or modified sequence from LASV(LP;Clade I)__AAF86701__GPCmut9 (opt4)
aggagagucccgcagucggcguccagcggcucugcuuguucgugugugugucguugcaggccuuauucaagcuuaccaugggccagaucaucaccuucuuccaggaggugccccacgugaucgaggaggugaugaacaucgugcugaucgcccugagccugcuggccauccugaagggccuguacaacaucgccaccugcggcaucaucggccugguggccuuccuguuccugugcggcaagagcugcagccugacccugaagggcggcuacgagcugcagacccuggagcugaacauggagacccugaacaugaccaugccccugagcugcaccaagaacagcagccaccacuacaucagagugggcaacgagaccggccuggagcugacccugaccaacaccagcaucaucaaccacaaguucugcaaccugagcgacgcccacaagaagaaccuguacgaccacgcccugaugagcaucaucagcaccuuccaccugagcauccccaacuucaaccaguacgaggccaugagcugcgacuucaacggcggcaagaucagcgugcaguacaaccugagccacagcuacgccggcgacgccgccgagcacugcggcaccguggccaacggcgugcugcagaccuucaugagaauggccuggggcggcagauacaucgcccuggacagcggcugcggcaacugggacugcaucaugaccagcuaccaguaccugaucauccagaacaccaccugggaggaccacugccaguucagcagacccagccccaucggcuaccugggccugcugagccagagaaccagagacaucuacaucagcagaagacugcugggcaccuucaccuggacccugagcgacagcgagggcaacgagacccccggcggcuacugccugaccagauggaugcugaucgaggccgagcugaagugcuucggcaacaccgccguggccaagugcaacgagaagcacgacgaggaguucugcgacaugcugagacuguucgacuucaacaagcaggccaucagaagacugaaggccgaggcccagaugagcauccagcugaucaacaaggccgugaacgcccugaucaacgaccagcugaucaugaagaaccaccugagagacaucaugugcauccccuacugcaacuacagcaaguacugguaccugaaccacaccagcagcggcagaaccagccugcccaagugcuggcugaucagcaacggcagcuaccugaacgagacccaguucagcgacgacaucgagcagcaggccgacaacaugaucaccgagaugcugcagaaggaguacaucgagagacagggcaagaccccccugggccugguggacaucuucaucuucagcaccagcuucuaccugaucagcaucuuccugcaccugaucaagauccccacccacagacacaucgugggcaagcccugccccaagccccacagacugaaccacaugggcgugugcagcugcggccuguacaagcaccccggcgugcccaccaaguggaagagaugaggacuagucccuguucccagagcccacuuuuuuuucuuuuuuugaaauaaaauagccugucuuucagaucuaaaaaaaaaaaaaaaaaaaaaaaaaaaaaaaaaaaaaaaaaaaaaaaaaaaaaaaaaaaaaaaaaaaaaaaaaaaaaaaaaaaaaaaaaaaaaaaaaaaa

SEQ ID NO: 35303 - RNA, 1721 nt, Artificial Sequence
  mRNA product Design a-1 (A100) comprising derived and/or modified sequence from LASV(803213;Clade II)__AAF86703__GPCmut9 (opt4)
aggagagucccgcagucggcguccagcggcucugcuuguucgugugugugucguugcaggccuuauucaagcuuaccaugggccagaucaucaccuucuuccaggaggugccccacgugaucgaggaggugaugaacaucgugcugaucgcccugagccugcuggccauccugaagggcaucuacaacguggccaccugcggccuguucggccugaucagcuuccugcugcugugcggcagaagcugcagcgugaccuacaagggcguguacgagcugcagacccuggagcugaacauggccaaccugaacaugaccaugccccugagcugcaccaagaacaacagccaccacuacaucauggugggcaacgagaccggccuggagcugacccugaccaacaccagcaucaucaaccacaaguucugcaaccugagcgacgcccacaagaagaaccuguacgaccacgcccugaugagcaucaucagcaccuuccaccugagcauccccaacuucaaccaguacgaggccaugagcugcgacuucaacggcggcaagaucagcgugcaguacaaccugagccacagcuucgccguggacgccgccaaccacugcggcaccaucgccaacggcgugcugcagaccuucaugagaauggccuggggcggcagcuacaucgcccuggacagcggcugcggcaacugggacugcaucaugaccagcuaccaguaccugaucauccagaacaccaccugggaggaccacugccaguucagcagacccagccccaucggcuaccugggccugcugagccagagaaccagagacaucuacaucagcagaagacugcugggcaccuucaccuggacccugagcgacagcgagggcaacgaggcccccggcggcuacugccugaccagauggaugcugaucgaggccgagcugaagugcuucggcaacaccgccguggccaagugcaacgagaagcacgacgaggaguucugcgacaugcugagacuguucgacuucaacaagcaggccaucaagagacugaagaccgaggcccagaugagcauccagcugaucaacaaggccgugaacgcccugaucaacgaccagcugaucaugaagaaccaccugagagacaucaugugcauccccuacugcaacuacagcagauacugguaccugaaccacaccgugaccggcaagaccagccugcccagaugcuggcuggugagcaacggcagcuaccugaacgagacccacuucagcgacgacaucgagcagcaggccgacaacaugaucaccgagaugcugcagaaggaguacauggacagacagggcaagaccccccugggccugguggaccuguucguguucagcaccagcuucuaccugaucagcaucuuccugcaccuggugaagauccccacccacagacacaucgugggcaagcccugccccaagccccacagacugaaccacaugggcaucugcagcugcggccuguacaagcaccccggcgugcccgugaaguggaagagaugaggacuagucccuguucccagagcccacuuuuuuuucuuuuuuugaaauaaaauagccugucuuucagaucuaaaaaaaaaaaaaaaaaaaaaaaaaaaaaaaaaaaaaaaaaaaaaaaaaaaaaaaaaaaaaaaaaaaaaaaaaaaaaaaaaaaaaaaaaaaaaaaaaaaa

SEQ ID NO: 35304 - RNA, 1721 nt, Artificial Sequence
  mRNA product Design a-1 (A100) comprising derived and/or modified sequence from LASV(GA391;Clade III)__CAA36645__GPCmut9 (opt4)
aggagagucccgcagucggcguccagcggcucugcuuguucgugugugugucguugcaggccuuauucaagcuuaccaugggccagaucgugaccuucuuccaggaggugccccacgugaucgaggaggugaugaacaucgugcugaucgcccugagcauccuggccauccugaagggccuguacaacguggccaccugcggccugaucggccuggugaccuuccugcugcugagcggcagaagcugcagccugaucuacaagggcaccuacgagcugcagacccuggagcugaacauggagacccugaacaugaccaugccccugagcugcaccaagaacaacagccaccacuacaucagagugggcaacgagaccggccuggagcugacccugaccaacaccagcauccugaaccacaaguucugcaaccugagcgacgcccacaagagaaaccuguacgaccacagccugaugagcaucaucagcaccuuccaccugagcauccccaacuucaaccaguacgaggccaugagcugcgacuucaacggcggcaagaucaccgugcaguacaaccugagccacagcuucgccguggacgccgccggccacugcggcacccuggccaacggcgugcugcagaccuucaugagaauggccuggggcggcagcuacaucgcccuggacagcggcugcggcaacugggacugcaucaugaccagcuaccaguaccugaucauccagaacaccaccugggacgaccacugccaguucagcagacccagccccaucggcuaccugggccugcugagccagagaaccagagacaucuacaucagcagaagacugcugggcaccuucaccuggacccugagcgacagcgagggcaacgagacccccggcggcuacugccugaccagauggaugcugaucgaggccgagcugaagugcuucggcaacaccgccguggccaagugcaacgagaagcacgacgaggaguucugcgacaugcugagacuguucgacuucaacaagcaggccaucagaagacugaagaccgaggcccagaugagcauccagcugaucaacaaggccgugaacgcccugaucaacgaccagcugaucaugaagaaccaccugagagacaucaugugcauccccuacugcaacuacagcagauacugguaccugaaccacaccagcaccggcaagaccagccugcccagaugcuggcugaucagcaacggcagcuaccugaacgagaccaaguucagcgacgacaucgagcagcaggccgacaacaugaucaccgagaugcugcagaaggaguacaucgacagacagggcaagaccccccugggccugguggaccuguucguguucagcaccagcuucuaccugaucagcaucuuccugcaccuggugaagauccccacccacagacacaucgugggcaagcccugccccaagccccacagacugaaccacaugggcaucugcagcugcggccuguacaagcagcccggcgugcccgugagauggaagagaugaggacuagucccuguucccagagcccacuuuuuuuucuuuuuuugaaauaaaauagccugucuuucagaucuaaaaaaaaaaaaaaaaaaaaaaaaaaaaaaaaaaaaaaaaaaaaaaaaaaaaaaaaaaaaaaaaaaaaaaaaaaaaaaaaaaaaaaaaaaaaaaaaaaaa

SEQ ID NO: 35305 - RNA, 1724 nt, Artificial Sequence
  mRNA product Design a-1 (A100) comprising derived and/or modified sequence from LASV(AV;Clade V)__CCA30314__GPCmut9 (opt4)
aggagagucccgcagucggcguccagcggcucugcuuguucgugugugugucguugcaggccuuauucaagcuuaccaugggccagaucgugaccuucuuccaggaggugccccacgugaucgaggaggugaugaacaucgugcugaucgcccugagcauccuggccgugcugaagggccuguacaacaucgccaccugcggccugaucggccugaucaccuuccugcugcugugcggcagaagcugcagcagcaaccuguacaagggcguguacgagcugcagagccuggaccugaacauggagacccugaacaugaccaugccccugagcugcaccaagaacaacagccaccacuacaucagagugggcaacgacaccggccuggagcugacccugaccaacaccagcauccugaaccacaaguucugcaaccugagcgacgcccacaagaaggaccuguacgaccacgcccugaugagcaucaucagcaccuuccaccugagcauccccaacuucaaccaguacgaggccaugagcugcgacuucaacggcggcaagaucagcgugcaguacaaccugagccacagcuacgccaucgacgccgccaaccacugcggcaccguggccaacggcauccugcagaccuucaugagaauggccuggggcggcagcuacaucgcccuggacagcggcugcggcaacugggacugcaucaugaccagcuaccaguaccugaucauccagaacaccaccugggagaaccacugccaguucagcagacccagccccaucggcuaccugggccugcugagccagagaaccagagacaucuacaucagcagaagacugcugggcaccuucaccuggacccugagcgacagcgagggcaacgccacccccggcggcuacugccugaccagauggaugcugaucgaggccgagcugaagugcuucggcaacaccgccguggccaagugcaacgagaagcacgacgaggaguucugcgacaugcugagacuguucgacuucaacaagcaggccaucagcagacugaagagcgaggcccagaugagcauccagcugaucaacaaggccgugaacgcccugaucaacgaccagcugaucaugaagaaccaccugagagacaucaugugcauccccuacugcaacuacagcaaguacugguaccugaaccacaccaucaccggcaagaccagccugcccaagugcuggcuggugagcaacggcagcuaccugaacgagacccacuucagcgacgacaucgagcagcaggccgacaacaugaucaccgagaugcugcagaaggaguacauggagagacagggcaagaccccccugggccugguggaccuguucguguucagcaccagcuucuaccugaucagcaucuuccugagacuggugaagauccccacccacagacacaucgugggcaagcccugccccaagccccacagacugaaccacaugggcaucugcagcugcggccuguacaagcagcccggcgugcccgugagauggaagagaugaggacuagucccuguucccagagcccacuuuuuuuucuuuuuuugaaauaaaauagccugucuuucagaucuaaaaaaaaaaaaaaaaaaaaaaaaaaaaaaaaaaaaaaaaaaaaaaaaaaaaaaaaaaaaaaaaaaaaaaaaaaaaaaaaaaaaaaaaaaaaaaaaaaaa

SEQ ID NO: 35306 - RNA, 1721 nt, Artificial Sequence
  mRNA product Design a-1 (A100) comprising derived and/or modified sequence from LASV(Togo/2016/7082;Clade VI)__AMR44577__GPCmut9 (opt4)
aggagagucccgcagucggcguccagcggcucugcuuguucgugugugugucguugcaggccuuauucaagcuuaccaugggccagaucaucaccuucuuccaggaggugccccacgugaucgaggaggugaugaacaucgugcugaucgcccugagccugcuggccauccugaagggcguguacaacguggccaccugcggcaucaucggccuggugaccuuccuguuccugugcggcagaagcugcagccugaucuacaagggcagcuacgagcugcagacccuggagcugaacauggagacccugaacaugaccaugccccugagcugcaccaagaacagcagccaccacuacaucagagugggcaacgagaccggccuggagcugacccugaccaacaccagcaucaucaaccacaaguucugcaaccugagcgacgcccacaagagaaaccuguacgaccacgcccugaugagcauccugagcaccuuccaccugagcauccccaacuucaaccaguacgaggccaugagcugcgacuucaacggcggcaagaucagcgugcaguacaaccugagccacgccuacgccguggacgccgccgagcacugcggcaccguggccaacggcgugcugcagaccuucaugagaauggccuggggcggcagcuacaucgcccuggacagcggcugcggcaacugggacugcaucaugaccagcuaccaguaccugaucauccagaacaccaccugggaggaccacugccaguucagcagacccagccccaucggcuaccugggccugcugagccagagaaccagagacaucuacaucagcagaagacugcugggcaccuucaccuggacccugagcgacagcgagggcaacgagacccccggcggcuacugccugaccagauggaugcugaucgaggccgagcugaagugcuucggcaacaccgccguggccaagugcaacgagaagcacgacgaggaguucugcgacaugcugagacuguucgacuucaacaagcaggccauccagagacugaagagcgaggcccagaugagcauccagcugaucaacaaggccgugaacgcccugaucaacgaccagcugaucaugaagaaccaccugagagacaugaugugcauccccuacugcaacuacagcaaguacugguaccugaaccacaccagcagcggcagaaccagccugcccaagugcuggcuggugagcaacggcagcuaccugaacgagacccacuucagcgacgacaucgagcagcaggccgacaacaugaucaccgagaugcugcagaaggaguacaucgacagacagggcaagaccccccugggccugguggaccuguucguguucagcaccagcuucuaccugaucagcaucuuccugcaccugaucaagauccccacccacagacacaucgugggcaagcccugccccaagccccacagacugaaccacaugggcaucugcagcugcggccuguacaagcagcccggcgugcccaccagauggaagagaugaggacuagucccuguucccagagcccacuuuuuuuucuuuuuuugaaauaaaauagccugucuuucagaucuaaaaaaaaaaaaaaaaaaaaaaaaaaaaaaaaaaaaaaaaaaaaaaaaaaaaaaaaaaaaaaaaaaaaaaaaaaaaaaaaaaaaaaaaaaaaaaaaaaaa

SEQ ID NO: 35307 - RNA, 1721 nt, Artificial Sequence
  mRNA product Design a-1 (A100) comprising derived and/or modified sequence from LASV(KAK-428;Clade n.d. (VII))__ANH09740__GPCmut9 (opt4)
aggagagucccgcagucggcguccagcggcucugcuuguucgugugugugucguugcaggccuuauucaagcuuaccaugggccagaucgugaccuucuuccaggaggugccccacgugaucgaggaggugaugaacaucgugcugaucgcccugagccugcuggccauccugaagggccuguacaacuucgccaccugcggcgugaucggccugaucaccuuccugcugcugugcggcagaagcugcagcgccaccuacaagggccaguacgagcugcagacccuggagcugaacauggagagccugaacaugaccaugccccugagcugcaccaagaacaacagccaccacuacaucagagccggcaacaacaccggccuggagcugacccugaccaacaccagcaucaucagccacaaguucugcaaccugagcgacgcccacaagaagaaccuguacgaccacacccugaugagcaucaucaccaccuuccaccugagcauccccaacuucaaccaguacgaggccaugagcugcgacuucaacggcggcaagaucagcauccaguacaaccugagccacagcuacgccggcgacgccgcccagcacugcggcaccguggccaacggcgugcugcagaccuucaugagaauggccuggggcggcagcuaccuggcccuggacagcggcugcagaggcugggacugcaucaucagcagcuaccaguaccugaucauccagaacaccaccugggacgaccacugccaguucagcagacccagccccaucggcuaccugggcuucgugagccagaagaccagagacaucuacaucagcagaagacugcugggcaccuucaccuggacccugagcgacagcgagggccacgacaugcccggcggcuacugccugaccagauggaugcugaucgaggccgaccugaagugcuucggcaacaccgccguggccaagugcaacgagaagcacgacgaggaguucugcgacauguggagacuguucgacuucaacaagcaggccauccagagacugaaggccgaggcccagaugaacauccagcugaucaacaaggccgugaacgcccugaucaacgaccagcugaugaugaagaaccaccugagagacaucaugugcauccccuacugcaacuacagcaaguucugguaccugaacaacaccaccaccggcagaaccagccugcccagaugcuggcugaucagcaacggcagcuaccugaacgagacccacuucagcgacgacaucgagcagcaggccgacaacaugaucaccgagaugcugcagaaggaguacauggacagacagggcaagaccccccugggccugguggaccuguucguguucagcaccagcuucuaccugaucaccaucuuccugcaccuggugaagauccccacccacagacacaucgugggcaagcccugccccaagccccacagacugaaccacaugggcaucugcagcugcggccuguacaagcagcccggcgugcccgugagauggaagagaugaggacuagucccuguucccagagcccacuuuuuuuucuuuuuuugaaauaaaauagccugucuuucagaucuaaaaaaaaaaaaaaaaaaaaaaaaaaaaaaaaaaaaaaaaaaaaaaaaaaaaaaaaaaaaaaaaaaaaaaaaaaaaaaaaaaaaaaaaaaaaaaaaaaaa

SEQ ID NO: 35308 - RNA, 1721 nt, Artificial Sequence; identical to SEQ ID NO: 35302
  mRNA product Design a-1 (A100) comprising derived and/or modified sequence from LASV(Pinneo-NIG-1969;Clade I)__AIT17836__GPCmut9 (opt4)

SEQ ID NO: 35309 - RNA, 1721 nt, Artificial Sequence
  mRNA product Design a-1 (A100) comprising derived and/or modified sequence from LASV(ISTH0009-NIG-2011;Clade II)__AIT17404__GPCmut9 (opt4)
aggagagucccgcagucggcguccagcggcucugcuuguucgugugugugucguugcaggccuuauucaagcuuaccaugggccagaucaucaccuucuuccaggaggugccccacgugaucgaggaggugaugaacaucgugcugaucgcccugagccugcuggccauccugaagggcaucuacaacguggccaccugcggccuguucggccuggugagcuuccugcugcugugcggcagaagcugcagcaccaccuacaagggcguguacgagcugcagacccuggagcuggacauggccagccugaacaugaccaugccccugagcugcaccaagaacaacagccaccacuacaucauggugggcaacgagaccggccuggagcugacccugaccaacaccagcaucaucaaccacaaguucugcaaccugagcgacgcccacaagaagaaccuguacgaccacgcccugaugagcaucaucagcaccuuccaccugagcauccccaacuucaaccaguacgaggccaugagcugcgacuucaacggcggcaagaucagcgugcaguacaaccugagccacgccuacgccguggacgccgccaaccacugcggcaccaucgccaacggcgugcugcagaccuucaugagaauggccuggggcggcagcuacaucgcccuggacagcggcugcggcagcugggacugcaucaugaccagcuaccaguaccugaucauccagaacaccaccugggaggaccacugccaguucagcagacccagccccaucggcuaccugggccugcugagccagagaaccagagacaucuacaucagcagaagacugcugggcaccuucaccuggacccugagcgacagcgagggcaacgagacccccggcggcuacugccugaccagauggaugcugaucgaggccgagcugaagugcuucggcaacaccgccguggccaagugcaacgagaagcacgacgaggaguucugcgacaugcugagacuguucgacuucaacaagcaggccaucagaagacugaagaccgaggcccagaugagcauccagcugaucaacaaggccgugaacgcccugaucaacgaccagcugaucaugaagaaccaccugagagacaucaugugcauccccuacugcaacuacagcaaguacugguaccugaaccacaccgugaccggcaagaccagccugcccagaugcuggcuggugagcaacggcagcuaccugaacgagacccacuucagcgacgacaucgagcagcaggccgacaacaugaucaccgagcugcugcagaaggaguacauggacagacagggcaagaccccccugggccugguggaccuguucguguucagcaccagcuucuaccugaucagcaucuuccugcaccugaucaagauccccacccacagacacaucaccggcaagcccugccccaagccccacagacugaaccacaugggcaucugcagcugcggccuguacaagcaccccggcgugcccgugaaguggaagagaugaggacuagucccuguucccagagcccacuuuuuuuucuuuuuuugaaauaaaauagccugucuuucagaucuaaaaaaaaaaaaaaaaaaaaaaaaaaaaaaaaaaaaaaaaaaaaaaaaaaaaaaaaaaaaaaaaaaaaaaaaaaaaaaaaaaaaaaaaaaaaaaaaaaaa

SEQ ID NO: 35310 - RNA, 1721 nt, Artificial Sequence
  mRNA product Design a-1 (A100) comprising derived and/or modified sequence from LASV(ISTH2010-NIG-2012;Clade II)__AIT17482__GPCmut9 (opt4)
aggagagucccgcagucggcguccagcggcucugcuuguucgugugugugucguugcaggccuuauucaagcuuaccaugggccagaucaucaccuucuuccaggaggugccccacgugaucgaggaggugaugaacaucgugcugaucgcccugagccugcuggccauccugaagggcaucuacaacguggccaccugcggccuguucggccuggugagcuuccugcugcugugcggcagaagcugcagcaccaccuacaagggcguguacgagcugcagacccuggagcuggacauggccagccugaacaugaccaugccccugagcugcaccaagaacaacagccaccacuacaucauggugggcaacgagaccggccuggagcugacccugaccaacaccagcaucaucaaccacaaguucugcaaccugagcgacgcccacaagaagaaccuguacgaccacgcccugaugagcaucaucagcaccuuccaccugagcauccccaacuucaaccaguacgaggccaugagcugcgacuucaacggcggcaagaucagcgugcaguacaaccugagccacgccuacgccguggacgccgccaaccacugcggcaccaucgccaacggcgugcugcagaccuucaugagaauggccuggggcggcagcuacaucgcccuggacagcggcugcggcagcugggacugcaucaugaccagcuaccaguaccugaucauccagaacaucaccugggaggaccacugccaguucagcagacccagccccaucggcuaccugggccugcugagccagagaaccagagacaucuacaucagcagaagacugcugggcaccuucaccuggacccugagcgacagcgagggcaacgagacccccggcggcuacugccugaccagauggaugcugaucgaggccgagcugaagugcuucggcaacaccgccguggccaagugcaacgagaagcacgacgaggaguucugcgacaugcugagacuguucgacuucaacaagcaggccaucagaagacugaagaccgaggcccagaugagcauccagcugaucaacaaggccgugaacgcccugaucaacgaccagcugaucaugaagaaccaccugagagacaucaugugcauccccuacugcaacuacagcaaguacugguaccugaaccacaccgugaccggcaagaccagccugcccagaugcuggcuggugagcaacggcagcuaccugaacgagacccacuucagcgacgacaucgagcagcaggccgacaacaugaucaccgagcugcugcagaaggaguacaucgacagacagggcaagaccccccugggccugguggaccuguucguguucagcaccagcuucuaccugaucagcaucuuccugcaccuggugaagauccccacccacagacacguggugggcaagcccugccccaagccccacagacugaaccacaugggcaucugcagcugcggccuguacaagcaccccggcgugcccgugaaguggaagagaugaggacuagucccuguucccagagcccacuuuuuuuucuuuuuuugaaauaaaauagccugucuuucagaucuaaaaaaaaaaaaaaaaaaaaaaaaaaaaaaaaaaaaaaaaaaaaaaaaaaaaaaaaaaaaaaaaaaaaaaaaaaaaaaaaaaaaaaaaaaaaaaaaaaaa

SEQ ID NO: 35311 - RNA, 1721 nt, Artificial Sequence
  mRNA product Design a-1 (A100) comprising derived and/or modified sequence from LASV(Lassa virus/H.sapiens-wt/NGA/2015/ISTH_0543;Clade II)__AVO03639__GPCmut9 (opt4)
aggagagucccgcagucggcguccagcggcucugcuuguucgugugugugucguugcaggccuuauucaagcuuaccaugggccagaucaucaccuucuuccaggaggugccccacgugaucgaggaggugaugaacaucgugcugaucgcccugagccugcuggccauccugaagggcaucuacaacguggccaccugcggccuguucggccuggugagcuuccugcugcugugcggcagaagcugcagcaccaccuacaagggcguguacgagcugcagacccuggagcuggacauggccaaccugaacaugaccaugccccugagcugcaccaagaacaacagccaccacuacaucauggugggcaacgagaccggccuggagcugacccugaccaacaccagcaucaucaaccacaaguucugcaaccugagcgacgcccacaagaagaaccuguacgaccacgcccugaugagcaucaucagcaccuuccaccugagcauccccaacuucaaccaguacgaggccaugagcugcgacuucaacggcggcaagaucagcgugcaguacaaccugagccacaccuacgccguggacgccgccaaccacugcggcaccaucgccaacggcgugcugcagaccuucaugagaauggccuggggcggcagcuacaucgcccuggacagcggcugcggcagcugggacugcaucaugaccagcuaccaguaccuggugauccagaacaccaccugggaggaccacugccaguucagcagacccagccccaucggcuaccugggccugcugagccagagaaccagagacaucuacaucagcagaagacugcugggcaccuucaccuggacccugagcgacagcgagggcaacgagacccccggcggcuacugccugaccagauggaugcugaucgaggccgagcugaagugcuucggcaacaccgccguggccaagugcaacgagaagcacgacgaggaguucugcgacaugcugagacuguucgacuucaacaagcaggccaucagaagacugaagaccgaggcccagaugagcauccagcugaucaacaaggccgugaacgcccugaucaacgaccagcugaucaugaagaaccaccugagagacaucaugugcauccccuacugcaacuacagcaaguacugguaccugaaccacaccgugaccggcaagaccagccugcccagaugcuggcuggugagcaacggcagcuaccugaacgagacccacuucagcgacgacaucgagcagcaggccgacaacaugaucaccgagcugcugcagaaggaguacaucgacagacagggcaagaccccccugggccugguggaccuguucguguucagcaccagcuucuaccugaucagcaucuuccugcaccuggugaagauccccacccacagacacaucaccggcaagcccugccccaagccccacagacugaaccacaugggcaucugcagcugcggccuguacaagcaccccggcgugcccgugaaguggaagagaugaggacuagucccuguucccagagcccacuuuuuuuucuuuuuuugaaauaaaauagccugucuuucagaucuaaaaaaaaaaaaaaaaaaaaaaaaaaaaaaaaaaaaaaaaaaaaaaaaaaaaaaaaaaaaaaaaaaaaaaaaaaaaaaaaaaaaaaaaaaaaaaaaaaaa

SEQ ID NO: 35312 - RNA, 1721 nt, Artificial Sequence
  mRNA product Design a-1 (A100) comprising derived and/or modified sequence from LASV(Lassa virus/H.sapiens-wt/NGA/2016/ISTH_0009;Clade II)__AVO03571__GPCmut9 (opt4)
aggagagucccgcagucggcguccagcggcucugcuuguucgugugugugucguugcaggccuuauucaagcuuaccaugggccagaucaucaccuucuuccaggaggugccccacgugaucgaggaggugaugaacaucgugcugaucgcccugagccugcuggccauccugaagggcaucuacaacguggccaccugcggccugcugggccuggugagcuuccugcugcugugcggcagaagcugcagcaccaccuacaagggcguguacgagcugcagacccuggagcuggacauggccagccugaacaugaccaugccccugagcugcaccaagaacaacagccaccacuacaucauggugggcaacgagaccggccuggagcugacccugaccaacaccagcaucaucaaccacaaguucugcaaccugagcgacgcccacaagaagaaccuguacgaccacgcccugaugagcaucaucagcaccuuccaccugagcauccccaacuucaaccaguacgaggccaugagcugcgacuucaacggcggcagaaucagcgugcaguacaaccugagccacagcuacgccguggacgccgccaaccacugcggcaccaucgccaacggcgugcugcagaccuucaugagaauggccuggggcggcagcuacaucgcccuggacagcggcugcggcagcugggacugcaucaugaccagcuaccaguaccugaucauccagaacaccaccugggaggaccacugccaguucagcagacccagccccaucggcuaccugggccugcugagccagagaaccagagacaucuacaucagcagaagacugcugggcaccuucaccuggacccugagcgacagcgagggcaacgagacccccggcggcuacugccugaccagauggaugcugaucgaggccgagcugaagugcuucggcaacaccgccguggccaagugcaacgagaagcacgacgaggaguucugcgacaugcugagacuguucgacuucaacaagcaggccaucagaagacugaagaccgaggcccagaugagcauccagcugaucaacaaggccgugaacgcccugaucaacgaccagcugaucaugaagaaccaccugagagacaucaugugcauccccuacugcaacuacagcaaguacugguaccugaaccacaccgugaccggcaagaccagccugcccagaugcuggcuggugagcaacggcagcuaccugaacgagacccacuucagcgacgacaucgagcagcaggccgacaacaugaucaccgagcugcugcagaaggaguacaucgacagacagggcaagaccccccugggccugguggaccuguucguguucagcaccagcuucuaccugaucagcaucuuccugcaccuggugaagauccccacccacagacacaucaccggcaagcccugccccaagccccacagacugaaccacaugggcaucugcagcugcggccuguacaaccaccccggcgugcccgugaaguggaagagaugaggacuagucccuguucccagagcccacuuuuuuuucuuuuuuugaaauaaaauagccugucuuucagaucuaaaaaaaaaaaaaaaaaaaaaaaaaaaaaaaaaaaaaaaaaaaaaaaaaaaaaaaaaaaaaaaaaaaaaaaaaaaaaaaaaaaaaaaaaaaaaaaaaaaa

SEQ ID NO: 35313 - RNA, 1721 nt, Artificial Sequence
  mRNA product Design a-1 (A100) comprising derived and/or modified sequence from LASV(Lassa virus/H.sapiens-wt/NGA/2016/ISTH_0017;Clade II)__AVO03567__GPCmut9 (opt4)
aggagagucccgcagucggcguccagcggcucugcuuguucgugugugugucguugcaggccuuauucaagcuuaccaugggccagaucaucaccuucuuccaggaggugccccacgugaucgaggaggugaugaacaucgugcugaucgcccugagccugcuggccauccugaagggcaucuacaacguggccaccugcggccuguucggccuggugagcuuccugcugcugugcggcagaagcugcagcaccaccuacaagggcguguacgagcugcagacccuggagcuggacauggccagccugaacaugaccaugccccugagcugcaccaagaacaacagccaccacuacaucauggugggcaacgagaccggccuggagcugacccugaccaacaccagcaucaucaaccacaaguucugcaaccugagcgacgcccacaagaagaaccuguacgaccacgcccugaugagcaucaucagcaccuuccaccugagcauccccaacuucaaccaguacgaggccaugagcugcgacuucaacggcggcaagaucagcgugcaguacaaccugagccacaccuacgccaucgacgccgccaaccacugcggcaccaucgccaacggcgugcugcagaccuucaugagaauggccuggggcggcagcuacaucgcccuggacagcggcugcggcagcugggacugcaucaugaccagcuaccaguaccugaucauccagaacaccaccugggaggaccacugccaguucagcagacccagccccaucggcuaccugggccugcugagccagagaaccagagacaucuacaucagcagaagacugcugggcaccuucaccuggacccugagcgacagcgagggcaacgagacccccggcggcuacugccugaccagauggaugcugaucgaggccgagcugaagugcuucggcaacaccgccguggccaagugcaacgagaagcacgacgaggaguucugcgacaugcugagacuguucgacuucaacaagcaggccaucagaagacugaagaccgaggcccagaugagcauccagcugaucaacaaggccgugaacgcccugaucaacgaccagcugaucaugaagaaccaccugagagacaucaugugcauccccuacugcaacuacagcaaguacugguaccugaaccacaccgugaccggcaagaccagccugcccagaugcuggcuggugagcaacggcagcuaccugaacgagacccacuucagcgacgacaucgagcagcaggccgacaacaugaucaccgagcugcugcagaaggaguacauggacagacagggcaagaccccccugggccugguggaccuguucguguucagcaccagcuucuaccugaucagcaucuuccugcaccuggugagaauccccacccacagacacgugaucggcaagcccugccccaagccccacagacugaaccacaugggcaucugcagcugcggccuguacaagcaccccggcgugcccgugaaguggaagagaugaggacuagucccuguucccagagcccacuuuuuuuucuuuuuuugaaauaaaauagccugucuuucagaucuaaaaaaaaaaaaaaaaaaaaaaaaaaaaaaaaaaaaaaaaaaaaaaaaaaaaaaaaaaaaaaaaaaaaaaaaaaaaaaaaaaaaaaaaaaaaaaaaaaaa

SEQ ID NO: 35314 - RNA, 1721 nt, Artificial Sequence
  mRNA product Design a-1 (A100) comprising derived and/or modified sequence from LASV(Lassa virus/H.sapiens-wt/NGA/2018/ISTH_0959;Clade II)__AVV65099__GPCmut9 (opt4)
aggagagucccgcagucggcguccagcggcucugcuuguucgugugugugucguugcaggccuuauucaagcuuaccaugggccagaucaucaccuucuuccaggaggugccccacgugaucgaggaggugaugaacaucgugcugaucgcccugagccugcuggccauccugaagggcaucuacaacguggugaccugcggccuguucggccuggugagcuuccugcugcugugcggcagaagcugcagcaccaccuacaagggcguguacgagcugcagacccuggagcuggacauggccagccugaacaugaccaugccccugagcugcaccaagaacaacagccaccacuacaucauggugggcaacgagaccggccuggagcugacccugaccaacaccagcaucaucaaccacaaguucugcaaccugagcgacgcccacaagaagaaccuguacgaccacgcccugaugagcaucaucagcaccuuccaccugagcauccccaacuucaaccaguacgaggccaugagcugcgacuucaacggcggcaagaucagcgugcaguacaaccugagccacgccuacgccaucgacgccgccaaccacugcggcaccaucgccaacggcgugcugcagaccuucaugagaauggccuggggcggcagcuacaucgcccuggacagcggcugcggcagcugggacugcaucaugaccagcuaccaguaccugaucauccagaacaccaccugggaggaccacugccaguucagcagacccagccccaucggcuaccugggccugcugagccagagaaccagagacaucuacaucagcagaagacugcugggcaccuucaccuggacccugagcgacagcgagggcaacgagacccccggcggcuacugccugaccagauggaugcugaucgaggccgagcugaagugcuucggcaacaccgccguggccaagugcaacgagaagcacgacgaggaguucugcgacaugcugagacuguucgacuucaacaagcaggccaucagaagacugaagaccgaggcccagaugagcauccagcugaucaacaaggccgugaacgcccugaucaacgaccagcugaucaugaagaaccaccugagagacaucaugugcauccccuacugcaacuacagcaaguacugguaccugaaccacaccgugaccggcaagaccagccugcccagaugcuggcuggugagcaacggcagcuaccugaacgagacccacuucagcgacgacaucgagcagcaggccgacaacaugaucaccgagcugcugcagaaggaguacaucgacagacagggcaagaccccccugggccugguggaccuguucguguucagcaccagcuucuaccugaucagcaucuuccugcaccuggugaagauccccacccacagacacgugaucggcaagcccugccccaagccccacagacugaaccacaugggcaucugcagcugcggccuguacaagcaccccggcgugcccgugaaguggaagagaugaggacuagucccuguucccagagcccacuuuuuuuucuuuuuuugaaauaaaauagccugucuuucagaucuaaaaaaaaaaaaaaaaaaaaaaaaaaaaaaaaaaaaaaaaaaaaaaaaaaaaaaaaaaaaaaaaaaaaaaaaaaaaaaaaaaaaaaaaaaaaaaaaaaaa

SEQ ID NO: 35315 - RNA, 1721 nt, Artificial Sequence
  mRNA product Design a-1 (A100) comprising derived and/or modified sequence from LASV(LASV003-NIG-2008;Clade II)__AIT17580__GPCmut9 (opt4)
aggagagucccgcagucggcguccagcggcucugcuuguucgugugugugucguugcaggccuuauucaagcuuaccaugggccagaucaucaccuucuuccaggaggugccccacgugaucgaggaggugaugaacaucgugcugaucgcccugagccugcuggccauccugaagggcaucuacaacguggccaccugcggccuguucggccuggugagcuuccugcugcugugcggcagaagcugcagcaccaccuacaagggcguguacgagcugcagacccuggagcuggacauggccagccugaacaugaccaugccccugagcugcaccaagaacaacagccaccacuacaucauggugggcaacgagaccggccuggagcugacccugaccaacaccagcaucaucaaccacaaguucugcaaccugagcgacgcccacaagaagaaccuguacgaccacgcccugaugagcaucaucagcaccuuccaccugagcauccccaacuucaaccaguacgaggccaugagcugcgacuucaacggcggcaagaucagcgugcaguacaaccugagccacaccuacgccguggacgccgccaaccacugcggcaccaucgccaacggcgugcugcagaccuucaugagaauggccuggggcggcagcuacaucgcccuggacagcggcugcggcagcugggacugcaucaugaccagcuaccaguaccugaucauccagaacaccaccugggaggaccacugccaguucagcagacccagccccaucggcuaccugggccugcugagccagagaaccagagacaucuacaucagcagaagacugcugggcaccuucaccuggacccugagcgacagcgagagcaacgagacccccggcggcuacugccugaccagauggaugcugaucgaggccgagcugaagugcuucggcaacaccgccguggccaagugcaacgagaagcacgacgaggaguucugcgacaugcugagacuguucgacuucaacaagcaggccaucagaagacugaaggccgaggcccagaugagcauccagcugaucaacaaggccgugaacgcccugaucaacgaccagcugaucaugaagaaccaccugagagacaucaugugcauccccuacugcaacuacagcaaguacugguaccugaaccacaccgugaccggcagaaccagccugcccagaugcuggcuggugagcaacggcagcuaccugaacgagacccacuucagcgacgacaucgagcagcaggccgacaacaugaucaccgagcugcugcagaaggaguacauggacagacagggcaagaccccccugggccugguggaccuguucguguucagcaccagcuucuaccugaucagcaucuuccugcaccuggugaagauccccacccacagacacgugaucggcaagcccugccccaagccccacagacugaaccacaugggcaucugcagcugcggccuguacaagcaccccggcgugcccgugaaguggaagagaugaggacuagucccuguucccagagcccacuuuuuuuucuuuuuuugaaauaaaauagccugucuuucagaucuaaaaaaaaaaaaaaaaaaaaaaaaaaaaaaaaaaaaaaaaaaaaaaaaaaaaaaaaaaaaaaaaaaaaaaaaaaaaaaaaaaaaaaaaaaaaaaaaaaaa

SEQ ID NO: 35316 - RNA, 1721 nt, Artificial Sequence
  mRNA product Design a-1 (A100) comprising derived and/or modified sequence from LASV(LASV035-NIG-2009;Clade II)__AIT17588__GPCmut9 (opt4)
aggagagucccgcagucggcguccagcggcucugcuuguucgugugugugucguugcaggccuuauucaagcuuaccaugggccagaucaucaccuucuuccaggaggugccccacgugaucgaggaggugaugaacaucgugcugaucgcccugagccugcuggccauccugaagggcaucuacaacguggccaccugcggccuguucggccuggugagcuuccugcugcugugcggcagaagcugcagcaccaccuacaagggcguguacgagcugcagacccuggagcuggacauggccagccugaacaugaccaugccccugagcugcaccaagaacaacagccaccacuacaucauggugggcaacgagaccggccuggagcugacccugaccaacaccagcaucaucaaccacaaguucugcaaccugagcgacgcccacaagaagaaccuguacgaccacgcccugaugagcaucaucagcaccuuccaccugagcauccccaacuucaaccaguacgaggccaugagcugcgacuucaacggcggcaagaucagcgugcaguacaaccugagccacgccuacgccguggacgccgccaaccacugcggcaccaucgccaacggcgugcugcagaccuucaugagaauggccuggggcggcagcuacaucgcccuggacagcggcugcggcagcugggacugcaucaugaccagcuaccaguaccugaucauccagaacaccaccugggaggaccacugccaguucagcagacccagccccaucggcuaccugggccugcugagccagagaaccagagacaucuacaucagcagaagacugcugggcaccuucaccuggacccugagcgacagcgagggcaacgagacccccggcggcuacugccugaccagauggaugcugaucgaggccgagcugaagugcuucggcaacaccgccguggccaagugcaacgagaagcacgacgaggaguucugcgacaugcugagacuguucgacuucaacaagcaggccaucagaagacugaaggccgaggcccagaugagcauccagcugaucaacaaggccgugaacgcccugaucaacgaccagcugaucaugaagaaccaccugagagacaucaugugcauccccuacugcaacuacagcaaguacugguaccugaaccacaccgugaccggcaagaccagccugcccagaugcuggcuggugagcaacggcagcuaccugaacgagacccacuucagcgacgacaucgagcagcaggccgacaacaugaucaccgagcugcugcagaaggaguacaucgacagacagggcaagaccccccugggccugguggaccuguucguguucagcaccagcuucuaccugaucagcaucuuccugcaccuggugaagauccccacccacagacacgugaucggcaagcccugccccaagccccacagacugaaccacaugggcaucugcagcugcggccuguacaagcaccccggcgugcccgugaaguggaagagaugaggacuagucccuguucccagagcccacuuuuuuuucuuuuuuugaaauaaaauagccugucuuucagaucuaaaaaaaaaaaaaaaaaaaaaaaaaaaaaaaaaaaaaaaaaaaaaaaaaaaaaaaaaaaaaaaaaaaaaaaaaaaaaaaaaaaaaaaaaaaaaaaaaaaa

SEQ ID NO: 35317 - RNA, 1721 nt, Artificial Sequence
  mRNA product Design a-1 (A100) comprising derived and/or modified sequence from LASV(LASV1000-NIG-2009;Clade II)__AIT17782__GPCmut9 (opt4)
aggagagucccgcagucggcguccagcggcucugcuuguucgugugugugucguugcaggccuuauucaagcuuaccaugggccagaucaucaccuucuuccaggaggugccccacgugaucgaggaggugaugaacaucgugcugaucgcccugagccugcuggccauccugaagggcaucuacaacguggccaccugcggccuguucggccuggugagcuuccugcugcugugcggcagaagcugcagcaccaccuacaagggcguguacgagcugcagacccuggagcuggacauggccagccugaacaugaccaugccccugagcugcaccaagaacaacagccaccacuacaucauggugggcaacgagaccggccuggagcugacccugaccaacaccagcaucaucaaccacaaguucugcaaccugagcgacgcccacaagaagaaccuguacgaccacgcccugaugagcaucaucagcaccuuccaccugagcauccccaacuucaaccaguacgaggccaugagcugcgacuucaacggcggcaagaucagcgugcaguacaaccugagccacaccuacgccguggacgccgccaaccacugcggcaccaucgccaacggcgugcugcagaccuucaugagaauggccuggggcggcagcuacaucgcccuggacagcggcugcggcagcugggacugcaucaugaccagcuaccaguaccugaucauccagaacaccaccugggaggaccacugccaguucagcagacccagccccaucggcuaccugggccugcugagccagagaaccagagacaucuacaucagcagaagacugcugggcaccuucaccuggacccugagcgacagcgagggcaacgagacccccggcggcuacugccugaccagauggaugcugaucgaggccgagcugaagugcuucggcaacaccgccguggccaagugcaacgagaagcacgacgaggaguucugcgacaugcugagacuguucgacuucaacaagcaggccaucaagagacugaagaccgaggcccagaugagcauccagcugaucaacaaggccgugaacgcccugaucaacgaccagcugaucaugaagaaccaccugagagacaucaugugcauccccuacugcaacuacagcaaguacugguaccugaaccacaccgugaccggcaagaccagccugcccagaugcuggcuggugagcaacggcagcuaccugaacgagacccacuucagcgacgacaucgagcagcaggccgacaacaugaucaccgagcugcugcagaaggaguacaucgacagacagggcaagaccccccugggccugguggaccuguucguguucagcaccagcuucuaccugaucagcaucuuccugcaccuggugaagauccccacccacagacacguggugggcaagcccugccccaagccccacagacugaaccacaugggcaucugcagcugcggccuguacaagcaccccggcgugcccgugaaguggaagagaugaggacuagucccuguucccagagcccacuuuuuuuucuuuuuuugaaauaaaauagccugucuuucagaucuaaaaaaaaaaaaaaaaaaaaaaaaaaaaaaaaaaaaaaaaaaaaaaaaaaaaaaaaaaaaaaaaaaaaaaaaaaaaaaaaaaaaaaaaaaaaaaaaaaaa

SEQ ID NO: 35318 - RNA, 1721 nt, Artificial Sequence
  mRNA product Design a-1 (A100) comprising derived and/or modified sequence from LASV(LASV221-NIG-2010;Clade II)__AIT17624__GPCmut9 (opt4)
aggagagucccgcagucggcguccagcggcucugcuuguucgugugugugucguugcaggccuuauucaagcuuaccaugggccagaucaucaccuucuuccaggaggugccccacgugaucgaggaggugaugaacaucgugcugaucgcccugagccugcuggccauccugaagggcaucuacaacguggccaccugcggccuguucggccuggugagcuuccugcugcugugcggcagaagcugcagcaccaccuacaagggcguguacgagcugcagacccuggagcuggacauggccagccugaacaugaccaugccccugagcugcaccaagaacaacagccaccacuacaucauggugggcaacgagaccggccuggagcugacccugaccaacaccagcaucaucaaccacaaguucugcaaccugagcgacgcccacaagaagaaccuguacgaccacgcccugaugagcaucaucagcaccuuccaccugagcauccccaacuucaaccaguacgaggccaugagcugcgacuucaacggcggcaagaucagcgugcaguacaaccugagccacaccuacgccaucgacgccgccaaccacugcggcaccaucgccaacggcgugcugcagaccuucaugagaauggccuggggcggcagcuacaucgcccuggacagcggcugcggcagcugggacugcaucaugaccagcuaccaguaccugaucauccagaacaccaccugggaggaccacugccaguucagcagacccagccccaucggcuaccugggccugcugagccagagaaccagagacaucuacaucagcagaagacugcugggcaccuucaccuggacccugagcgacagcgagggcaacgagacccccggcggcuacugccugaccagauggaugcugaucgaggccgagcugaagugcuucggcaacaccgccguggccaagugcaacgagaagcacgacgaggaguucugcgacaugcugagacuguucgacuucaacaagcaggccaucagaagacugaagaccgaggcccagaugagcauccagcugaucaacaaggccgugaacgcccugaucaacgaccagcugaucaugaagaaccaccugagagacaucaugugcauccccuacugcaacuacagcaaguacugguaccugaaccacaccgugaccggcaagaccagccugcccagaugcuggcuggugagcaacggcagcuaccugaacgagacccacuucagcgacgacaucgagcagcaggccgacaacaugaucaccgagaugcugcagaaggaguacauggacagacagggcaagaccccccugggccugguggaccuguucguguucagcaccagcuucuaccugaucagcaucuuccugcaccuggugaagauccccacccacagacacgugaucggcaagcccugccccaagccccacagacugaaccacaugggcaucugcagcugcggccuguacaagcaccccggcgugcccgugaaguggaagagaugaggacuagucccuguucccagagcccacuuuuuuuucuuuuuuugaaauaaaauagccugucuuucagaucuaaaaaaaaaaaaaaaaaaaaaaaaaaaaaaaaaaaaaaaaaaaaaaaaaaaaaaaaaaaaaaaaaaaaaaaaaaaaaaaaaaaaaaaaaaaaaaaaaaaa

SEQ ID NO: 35319 - RNA, 1721 nt, Artificial Sequence
  mRNA product Design a-1 (A100) comprising derived and/or modified sequence from LASV(LASV237-NIG-2010;Clade II)__AIT17638__GPCmut9 (opt4)
aggagagucccgcagucggcguccagcggcucugcuuguucgugugugugucguugcaggccuuauucaagcuuaccaugggccagaucaucaccuucuuccaggaggugccccacgugaucgaggaggugaugaacaucgugcugaucgcccugagccugcuggccauccugaagggcaucuacaacguggccaccugcggccuguucggccuggugagcuuccugcugcugugcggcagaagcugcagcaccaccuacaagggcguguacgagcugcagacccuggagcuggacauggccagccugaacaugaccaugccccugagcugcaccaagaacaacagccaccacuacaucauggugggcaacgagaccggccuggagcugacccugaccaacaccagcaucaucaaccacaaguucugcaaccugagcgacgcccacaagaaggaccuguacgaccacgcccugaugagcaucaucagcaccuuccaccugagcauccccaacuucaaccaguacgaggccaugagcugcgacuucaacggcggcaagaucagcgugcaguacaaccugagccacaccuacgccguggacgccgccaaccacugcggcaccaucgccaacggcgugcugcagaccuucaugagaauggccuggggcggcagcuacaucgcccuggacagcggcugcggcagcugggacugcaucaugaccagcuaccaguaccugaucauccagaacaccaccugggaggaccacugccaguucagcagacccagccccaucggcuaccugggccugcugagccagagaaccagagacaucuacaucagcagaagacugcugggcaccuucaccuggacccugagcgacagcgagggcaacgagacccccggcggcuacugccugaccagauggaugcugaucgaggccgagcugaagugcuucggcaacaccgccguggccaagugcaacgagaagcacgacgaggaguucugcgacaugcugagacuguucgacuucaacaagcaggccaucagaagacugaagaccgaggcccagaugagcauccagcugaucaacaaggccgugaacgcccugaucaacgaccagcugaucaugaagaaccaccugagagacaucaugugcauccccuacugcaacuacagcaaguacugguaccugaaccacaccgugaccggcaagaccagccugcccagaugcuggcuggugagcaacggcagcuaccugaacgagacccacuucagcgacgacaucgagcagcaggccgacaacaugaucaccgagcugcugcagaaggaguacauggacagacagggcaagaccccccugggccugguggaccuguucguguucagcaccagcuucuaccugaucagcaucuuccugcaccugaucaagauccccacccacagacacaucaccggcaagcccugccccaagccccacagacugaaccacaugggcaucugcagcugcggccuguacaagcaccccggcgugcccgugaaguggaagagaugaggacuagucccuguucccagagcccacuuuuuuuucuuuuuuugaaauaaaauagccugucuuucagaucuaaaaaaaaaaaaaaaaaaaaaaaaaaaaaaaaaaaaaaaaaaaaaaaaaaaaaaaaaaaaaaaaaaaaaaaaaaaaaaaaaaaaaaaaaaaaaaaaaaaa

SEQ ID NO: 35320 - RNA, 1721 nt, Artificial Sequence
  mRNA product Design a-1 (A100) comprising derived and/or modified sequence from LASV(LASV253-NIG-2011;Clade II)__AIT17670__GPCmut9 (opt4)
aggagagucccgcagucggcguccagcggcucugcuuguucgugugugugucguugcaggccuuauucaagcuuaccaugggccagaucaucaccuucuuccaggaggugccccacgugaucgaggaggugaugaacaucgugcugaucgcccugagccugcuggccauccugaagggcaucuacaacguggccaccugcggccuguucggccuggugagcuuccugcugcugugcggcagaagcugcagcaccaccuacaagggcguguacgagcugcagacccuggagcuggacauggccagccugaacaugaccaugccccugagcugcaccaagaacaacagccaccacuacaucauggugggcaacgagaccggccuggagcugacccugaccaacaccagcaucaucaaccacaaguucugcaaccugagcgacgcccacaagaagaaccuguacgaccacgcccugaugagcaucaucagcaccuuccaccugagcauccccaacuucaaccaguacgaggccaugagcugcgacuucaacggcggcaagaucagcgugcaguacaaccugagccacaccuacgccguggacgccgccaaccacugcggcaccaucgccaacggcgugcugcagaccuucaugagaauggccuggggcggcagcuacaucgcccuggacagcggcugcggcagcugggacugcaucaugaccagcuaccaguaccugaucauccagaacaccaccugggaggaccacugccaguucagcagacccagccccaucggcuaccugggccugcugagccagagaaccagagacaucuacaucagcagaagacugcugggcaccuucaccuggacccugagcgacagcgagggcaacgagacccccggcggcuacugccugaccagauggaugcugaucgaggccgagcugaagugcuucggcaacaccgccguggccaagugcaacgagaagcacgacgaggaguucugcgacaugcugagacuguucgacuucaacaagcaggccaucagaagacugaaggccgaggcccagaugagcauccagcugaucaacaaggccgugaacgcccugaucaacgaccagcugaucaugaagaaccaccugagagacaucaugugcauccccuacugcaacuacagcaaguacugguaccugaaccacaccgugaccggcagaaccagccugcccagaugcuggcuggugagcaacggcagcuaccugaacgagacccacuucagcgacgacaucgagcagcaggccgacaacaugaucaccgagcugcugcagaaggaguacaucgacagacagggcaagaccccccugggccugguggaccuguucguguucagcaccagcuucuaccugaucagcaucuuccugcaccuggugaagauccccacccacagacacaucaucggcaagcccugccccaagccccacagacugaaccacaugggcaucugcagcugcggccuguacaagcaccccggcgugcccgugaaguggaagagaugaggacuagucccuguucccagagcccacuuuuuuuucuuuuuuugaaauaaaauagccugucuuucagaucuaaaaaaaaaaaaaaaaaaaaaaaaaaaaaaaaaaaaaaaaaaaaaaaaaaaaaaaaaaaaaaaaaaaaaaaaaaaaaaaaaaaaaaaaaaaaaaaaaaaa

SEQ ID NO: 35321 - RNA, 1721 nt, Artificial Sequence
  mRNA product Design a-1 (A100) comprising derived and/or modified sequence from LASV(LASV254-NIG-2011;Clade II)__AIT17674__GPCmut9 (opt4)
aggagagucccgcagucggcguccagcggcucugcuuguucgugugugugucguugcaggccuuauucaagcuuaccaugggccagaucaucaccuucuuccaggaggugccccacgugaucgaggaggugaugaacaucgugcugaucgcccugagccugcuggccauccugaagggcaucuacaacguggccaccugcggccuguucggccuggugagcuuccugcugcugugcggcagaagcugcagcaccaccuacaagggcguguacgagcugcagacccuggagcuggacaugaccaaccugaacaugaccaugccccugagcugcaccaagaacaacagccaccacuacaucauggugggcaacgagaccggccuggagcugacccugaccaacaccagcaucaucaaccacaaguucugcaaccugagcgacgcccacaagaagaaccuguacaaccacgcccugaugagcaucaucagcaccuuccaccugagcauccccaacuucaaccaguacgaggccaugagcugcgacuucaacggcggcaagaucagcgugcaguacaaccugagccacagcuacgccguggacgccgccaaccacugcggcaccaucgccaacggcgugcugcagaccuucaugagaauggccuggggcggcagcuacaucgcccuggacagcggcugcggcaacugggacugcaucaugaccagcuaccaguaccugaucauccagaacaccaccugggaggaccacugccaguucagcagacccagccccaucggcuaccugggccugcugagccagagaaccagagacaucuacaucagcagaagacugcugggcaccuucaccuggacccugagcgacagcgagggcaacgagacccccggcggcuacugccugaccagauggaugcugaucgaggccgagcugaagugcuucggcaacaccgccguggccaagugcaacgagaagcacgacgaggaguucugcgacaugcugagacuguucgacuucaacaagcaggccaucagaagacugaagaccgaggcccaggccaacauccagcugaucaacaaggccgugaacgcccugaucaacgaccagcugaucaugaagaaccaccugagagacaucaugugcauccccuacugcaacuacagcaaguacugguaccugaaccacaccgugaccggcaagaccagccugcccagaugcuggcuggugagcaacggcagcuaccugaacgagacccacuucagcgacgacaucgagcagcaggccgacaacaugaucaccgagcugcugcagaaggaguacauggacagacagggcaagaccccccugggccugguggaccuguucguguucagcaccagcuucuaccugaucagcaucuuccugcaccuggugaagauccccacccacagacacgugaucggcaagcccugccccaagccccacagacugaaccacaugggcaucugcagcugcggccuguacaagcaccccggcgugcccgugaaguggaagagaugaggacuagucccuguucccagagcccacuuuuuuuucuuuuuuugaaauaaaauagccugucuuucagaucuaaaaaaaaaaaaaaaaaaaaaaaaaaaaaaaaaaaaaaaaaaaaaaaaaaaaaaaaaaaaaaaaaaaaaaaaaaaaaaaaaaaaaaaaaaaaaaaaaaaa

SEQ ID NO: 35322 - RNA, 1721 nt, Artificial Sequence
  mRNA product Design a-1 (A100) comprising derived and/or modified sequence from LASV(Nig08-A19;Clade III)__ADU56618__GPCmut9 (opt4)
aggagagucccgcagucggcguccagcggcucugcuuguucgugugugugucguugcaggccuuauucaagcuuaccaugggccagaucgugaccuucuuccaggaggugccccacgugaucgaggaggugaugaacaucgugcugaucgcccugagcauccuggccauccugaagggccuguacaacaucgccaccugcggccugaucggccuggugaccuuccugcugcugagcggcagaagcugcagcaugaccuacaagggcguguacgagcugcagacccuggagcugaacaugaacacccugaacaugaccaugccccugagcugcaccaagaacaacagccaccacuacaucauggugggcaacgagaccggccuggagcugacccugaccaacaccagccugcugcaccacaaguucugcaaccugagcgacgcccacaagaagaaccuguacgaccacacccugaugagcaucaucagcaccuuccaccugagcauccccaacuucaaccaguacgaggccaugagcugcgacuucaacggcggcaagaucaccgugcaguacaaccugagccacagcuacgccaucgacgccgccaaccacugcggcaccguggccaacggcgugcugcagaccuucaugagaauggccuggggcggcagcuacaucgcccuggacagcggcugcggcaagugggacugcaucaugaccagcuaccaguaccugaucauccagaacaccaccugggaggaccacugccaguucagcagacccagccccaucggcuaccugggccugcugagccagagaaccagagacaucuacaucagcagaagacugcugggcaccuucaccuggacccugagcgacagcgagggcaacgagacccccggcggcuacugccugaccagauggaugcugaucgaggccgagcugaagugcuucggcaacaccgccguggccaagugcaacgagaagcacgacgaggaguucugcgacaugcugagacuguucgacuucaacaagcaggccaucagaagacugaaggccgaggcccagaugagcauccagcugaucaacaaggccgugaacgcccugaucaacgaccagcugaucaugaagaaccaccugagagacaucaugugcauccccuacugcaacuacagcaaguacugguaccugaaccacaccagcaccggcagaaccagccugcccagaugcuggcuggugagcaacggcagcuaccugaacgagacccacuucagcgacgacaucgagcagcaggccgacaacaugaucaccgagaugcugcagaaggaguaccuggacagacagggcaagaccccccugggccugguggaccuguucguguucagcaccagcuucuaccugaucagcaucuuccugcaccuggugaagauccccacccacagacacaucgugggcaagcccugccccaagccccacagacugaaccacaugggcaucugcagcugcggccuguacaagcagcccggcgugcccgugagauggaagagaugaggacuagucccuguucccagagcccacuuuuuuuucuuuuuuugaaauaaaauagccugucuuucagaucuaaaaaaaaaaaaaaaaaaaaaaaaaaaaaaaaaaaaaaaaaaaaaaaaaaaaaaaaaaaaaaaaaaaaaaaaaaaaaaaaaaaaaaaaaaaaaaaaaaaa

SEQ ID NO: 35323 - RNA, 1724 nt, Artificial Sequence
  mRNA product Design a-1 (A100) comprising derived and/or modified sequence from LASV(G1180-SLE-2010;Clade IV)__AIT17168__GPCmut9 (opt4)
aggagagucccgcagucggcguccagcggcucugcuuguucgugugugugucguugcaggccuuauucaagcuuaccaugggccagaucgugaccuucuuccaggaggugccccacgugaucgaggaggugaugaacaucgugcugaucgcccugagcauccuggccgugcugaagggccuguacaacuucgccaccugcggccuggugggccugcugaccuuccugcugcugugcggcagaagcugcaccgccagcagauacaagggcguguacgagcugcagacccuggagcugaacauggagacccugaacaugaccaugccccugagcugcaccaagaacaacagccaccacuacaucauggugggcaacgagaccggccuggagcugacccugaccaacaccagcaucaucaaccacaaguucugcaaccugagcgacgcccacaagaagaaccuguacgaccacgcccugaugagcaucaucagcaccuuccaccugagcauccccaacuucaaccaguacgaggccaugagcugcgacuucaacggcggcaagaucagcgugcaguacaaccugagccacagcuacgccggcgacgccgccaaccacugcggcaccguggccaacggcgugcugcagaccuucaugagaauggccuggggcggcagcuacaucgcccuggacagcggcugcggcagcugggacugcaucaugaccagcuaccaguaccugaucauccagaacaccaccugggaggaccacugccaguucagcagacccagccccaucggcuaccugggccugcugagccagagaaccagagacaucuacaucagcagaagacugcugggcaccuucaccuggacccugagcgacagcgagggcaaggacacccccggcggcuacugccugaccagauggaugcugaucgaggccgagcugaagugcuucggcaacaccgccguggccaagugcaacgagaagcacgacgaggaguucugcgacaugcugagacuguucgacuucaacaagcaggccauccagagacugaaggccgaggcccagaugagcauccagcugaucaacaaggccgugaacgcccugaucaacgaccagcugaucaugaagaaccaccugagagacaucaugugcauccccuacugcaacuacagcaaguacugguaccugaaccacaccaccaccggcaagaccagccugcccaagugcuggcuggugagcaacggcagcuaccugaacgagacccacuucagcgacgacaucgagcagcaggccgacaacaugaucaccgagaugcugcagaaggaguacauggagagacagggcaagaccccccugggccugguggaccuguucguguucagcaccagcuucuaccugaucagcaucuuccugcaccuggugaagauccccacccacagacacaucgugggcaagagcugccccaagccccacagacugaaccacaugggcaucugcagcugcggccuguacaagcagcccggcgugcccgugaaguggaagagaugaggacuagucccuguucccagagcccacuuuuuuuucuuuuuuugaaauaaaauagccugucuuucagaucuaaaaaaaaaaaaaaaaaaaaaaaaaaaaaaaaaaaaaaaaaaaaaaaaaaaaaaaaaaaaaaaaaaaaaaaaaaaaaaaaaaaaaaaaaaaaaaaaaaaa

SEQ ID NO: 35324 - RNA, 1724 nt, Artificial Sequence
  mRNA product Design a-1 (A100) comprising derived and/or modified sequence from LASV(G1442-SLE-2011;Clade IV)__AIT17180__GPCmut9 (opt4)
aggagagucccgcagucggcguccagcggcucugcuuguucgugugugugucguugcaggccuuauucaagcuuaccaugggccagaucgugaccuucuuccaggaggugccccacgugaucgaggaggugaugaacaucgugcugaucgcccugagcauccuggccgugcugaagggccuguacaacguggccaccugcggccugaucggccuggugaccuuccugcugcugugcggcagaagcugcaccaccacccuguacaagggcguguacgagcugcagacccuggagcugaacauggagacccugaacaugaccaugccccugagcugcaccaagaacaacagccaccacuacaucagagugggcaacgagaccggccuggagcugacccugaccaacaccagcaucaucaaccacaaguucugcaaccugagcgacgcccacaagaagaaccuguacgaccacgcccugaugagcaucaucagcaccuuccaccugagcauccccaacuucaaccaguacgaggccaugagcugcgacuucaacggcggcaagaucagcgugcaguacaaccugagccacagcuacgccggcgacgccgccaaccacugcggcaccguggccaacggcgugcugcagaccuucaugagaauggccuggggcggcagcuacaucgcccuggacagcggcugcggcaacugggacugcaucaugaccagcuaccaguaccugaucauccagaacaccaccugggacgaccacugccaguucagcagacccagccccaucggcuaccugggccugcugagccagagaaccagagacguguacaucagcagaagacugcugggcaccuucaccuggacccugagcgacagcgagggcaaggacacccccggcggcuacugccugaccagauggaugcugaucgaggccgagcugaagugcuucggcaacaccgccguggccaagugcaacgagaagcacgacgaggaguucugcgacaugcugagacuguucgacuucaacaagcaggccauccagagacugaaggccgaggcccagaugagcauccagcugaucaacaaggccgugaacgcccugaucaacgaccagcugaucaugaagaaccaccugagagacaucaugugcauccccuacugcaacuacagcaaguacugguaccugaacaacaccgccaccggcaagaccagccugcccaagugcuggcugaucagcaacggcagcuaccugaacgagacccacuucagcgacgacaucgagcaggaggccgacaacaugaucaccgagaugcugcagaaggaguacauggagagacagggcaagaccccccugggccugguggaccuguucguguucagcaccagcuucuaccugaucagcaucuuccugcaccuggugaagauccccacccacagacacaucgugggcaagagcugccccaagccccacagacugaaccacaugggcaucugcagcugcggccuguacaagcagcccggcgugcccgugagauggaagagaugaggacuagucccuguucccagagcccacuuuuuuuucuuuuuuugaaauaaaauagccugucuuucagaucuaaaaaaaaaaaaaaaaaaaaaaaaaaaaaaaaaaaaaaaaaaaaaaaaaaaaaaaaaaaaaaaaaaaaaaaaaaaaaaaaaaaaaaaaaaaaaaaaaaaa

SEQ ID NO: 35325 - RNA, 1724 nt, Artificial Sequence
  mRNA product Design a-1 (A100) comprising derived and/or modified sequence from LASV(G3010-SLE-2013;Clade IV)__AIT17344__GPCmut9 (opt4)
aggagagucccgcagucggcguccagcggcucugcuuguucgugugugugucguugcaggccuuauucaagcuuaccaugggccagaucgugaccuucuuccaggaggugccccacgugaucgaggaggugaugaacaucgugcugaucgcccugagcauccuggccgugcugaagggccuguacaacuucgccaccugcggccuggugggccuggugaccuuccugcugcugugcggcagaagcugcaccaccagccuguacaagggcguguacgagcugcagacccuggagcugaacauggagacccugaacaugaccaugccccugagcugcaccaagaacaacagccaccacuacaucauggugggcaacgagaccggccuggagcugacccugaccaacaccagcaucaucaaccacaaguucugcaaccugagcgacgcccacaagaagaaccuguacaaccacgcccugaugagcaucaucagcaccuuccaccugagcauccccaacuucaaccaguacgaggccaugagcugcgacuucaacggcggcaagaucagcgugcaguacaaccugagccacagcuacgccggcgacgccgccagccacugcggcaccguggccaacggcgugcugcagaccuucaugagaauggccuggggcggcagcuacaucgcccuggacagcggcugcggcaagugggacugcaucaugaccagcuaccaguaccugaucauccagaacaccaccugggaggaccacugccaguucagcagacccagccccaucggcuaccugggccugcugagccagagaaccagagacaucuacaucagcagaagacugcugggcaccuucaccuggacccugagcgacagcgagggcaaggacacccccggcggcuacugccugaccagauggaugcugaucgaggccgagcugaagugcuucggcaacaccgccguggccaagugcaacgagaagcacgacgaggaguucugcgacaugcugagacuguucgacuucaacaagcaggccauccagagacugaagaccgaggcccagaugagcauccagcugaucaacaaggccgugaacgcccugaucaacgaccagcugaucaugaagaaccaccugagagacaucaugugcauccccuacugcaacuacagcaaguacugguaccugaaccacaccaccaccggcaagaccagccugcccaagugcuggcuggugagcaacggcagcuaccugaacgagacccacuucagcgacgacaucgagcagcaggccgacaacaugaucaccgagaugcugcagaaggaguacauggagagacagggcaagaccccccugggccugguggaccuguucguguucagcaccagcuucuaccugaucagcaucuuccugcaccuggugaagauccccacccacagacacaucgugggcaagagcugccccaagccccacagacugaaccacaugggcaucugcagcugcggccuguacaagcagcccggcgugcccgugagauggaagagaugaggacuagucccuguucccagagcccacuuuuuuuucuuuuuuugaaauaaaauagccugucuuucagaucuaaaaaaaaaaaaaaaaaaaaaaaaaaaaaaaaaaaaaaaaaaaaaaaaaaaaaaaaaaaaaaaaaaaaaaaaaaaaaaaaaaaaaaaaaaaaaaaaaaaa

SEQ ID NO: 35326 - RNA, 1724 nt, Artificial Sequence
  mRNA product Design a-1 (A100) comprising derived and/or modified sequence from LASV(G502-SLE-2009;Clade IV)__AIT17126__GPCmut9 (opt4)
aggagagucccgcagucggcguccagcggcucugcuuguucgugugugugucguugcaggccuuauucaagcuuaccaugggccagaucgugaccuucuuccaggaggugccccacgugaucgaggaggugaugaacaucgugcugaucgcccugagcauccuggccgugcugaagggccuguacaacuucgccaccugcggccuggugggccugcugaccuuccugcugcugugcggcagaagcugcaccaccggccuguacaagggcguguacgagcugcagacccuggagcugaacauggagacccugaacaugaccaugccccugagcugcaccaagaacaacagccaccacuacaucauggugggcaacgagaccggccuggagcugacccugaccaacaccagcaucaucaaccacaaguucugcaaccugagcgacgcccacaagaagaaccuguacgaccacgcccugaugagcaucaucagcaccuuccaccugagcauccccaacuucaaccaguacgaggccaugagcugcgacuucaacggcggcaagaucagcgugcaguacaaccugagccacagcuacgccggcgacgccgccgaccacugcggcaccguggccaacggcgugcugcagaccuucaugagaauggccuggggcggcagcuacaucgcccuggacagcggcugcggcagaugggacugcaucaugaccagcuaccaguaccugaucauccagaacaccaccugggaggaccacugccaguucagcagacccagccccaucggcuaccugggccugcugagccagagaaccagagacaucuacaucagcagaagacugcugggcaccuucaccuggacccugagcgacagcgagggcaaggacacccccggcggcuacugccugaccagauggaugcugaucgaggccgagcugaagugcuucggcaacaccgccguggccaagugcaacgagaagcacgacgaggaguucugcgacaugcugagacuguucgacuucaacaagcaggccauccagagacugaaggccgaggcccagaugagcauccagcugaucaacaaggccgugaacgcccugaucaacgaccagcuggugaugaagaaccaccugagagacaucaugugcauccccuacugcaacuacagcagauacugguaccugaaccacaccaccaccggcagaaccagccugcccaagugcuggcuggugagcaacggcagcuaccugaacgagacccacuucagcgacgacaucgagcagcaggccgacaacaugaucaccgagaugcugcagaaggaguacauggagagacagggcaagaccccccugggccugguggaccuguucguguucagcaccagcuucuaccugaucagcaucuuccugcaccuggugaagauccccacccacagacacaucgugggcaagagcugccccaagccccacagacugaaccacaugggcaucugcagcugcggccuguacaagcagcccggcgugcccgugaaguggaagagaugaggacuagucccuguucccagagcccacuuuuuuuucuuuuuuugaaauaaaauagccugucuuucagaucuaaaaaaaaaaaaaaaaaaaaaaaaaaaaaaaaaaaaaaaaaaaaaaaaaaaaaaaaaaaaaaaaaaaaaaaaaaaaaaaaaaaaaaaaaaaaaaaaaaaa

SEQ ID NO: 35327 - RNA, 1724 nt, Artificial Sequence
  mRNA product Design a-1 (A100) comprising derived and/or modified sequence from LASV(G733-SLE-2010;Clade IV)__AIT17154__GPCmut9 (opt4)
aggagagucccgcagucggcguccagcggcucugcuuguucgugugugugucguugcaggccuuauucaagcuuaccaugggccagaucgugaccuucuuccaggaggugccccacgugaucgaggaggugaugaacaucgugcugaucgcccugagcauccuggccgugcugaagggccuguacaacuucgccaccugcggcaucgugggccuggugagcuuccugcugcugugcggcagaagcugcaccaccagccuguacaagggcguguacgagcugcagacccuggagcugaacauggagacccugaacaugaccaugccccugagcugcaccaagaacaacagccaccacuacaucauggugggcaacgagaccggccuggagcugacccugaccaacaccagcaucaucaaccacaaguucugcaaccugagcgacgcccacaagaagaaccuguacgaccacgcccugaugagcaucaucagcaccuuccaccugagcauccccaacuucaaccaguacgaggccaugagcugcgacuucaacggcggcaagaucagcgugcaguacaaccugagccacagcuacgccggcgacgccgccaaccacugcggcaccaucgccaacggcgugcugcagaccuucaugagaauggccuggggcggcagcuacaucgcccuggacagcggcugcgacagaugggacugcaucaugaccagcuaccaguaccugaucauccagaacaccaccugggaggaccacugccaguucagcagacccagccccaucggcuaccugggccugcugagccagagaaccagagacaucuacaucagcagaagacugcugggcaccuucaccuggacccugagcgacagcgagggcaaggacacccccggcggcuacugccugaccagauggaugcugaucgaggccgagcugaagugcuucggcaacaccgccguggccaagugcaacgagaagcacgacgaggaguucugcgacaugcugagacuguucgacuucaacaagcaggccauccagagacugaaggccgaggcccagaugagcauccagcugaucaacaaggccgugaacgcccugaucaacgaccagcugaucaugaagaaccaccugagagacaucaugugcauccccuacugcaacuacagcaaguacugguaccugaaccacaccaccaccggcaagaccagccugcccaagugcuggcuggugagcaacggcagcuaccugaacgagacccacuucagcgacgacaucgagcagcaggccgacaacaugaucaccgagaugcugcagaaggaguacauggagagacagggcaagaccccccugggccugguggaccuguucguguucagcaccagcuucuaccugaucagcaucuuccugcaccuggugaagauccccacccacagacacguggugggcaagagcugccccaagccccacagacugaaccacaugggcaucugcagcugcggccuguacggccagcccggcgugcccgugaaguggaagagaugaggacuagucccuguucccagagcccacuuuuuuuucuuuuuuugaaauaaaauagccugucuuucagaucuaaaaaaaaaaaaaaaaaaaaaaaaaaaaaaaaaaaaaaaaaaaaaaaaaaaaaaaaaaaaaaaaaaaaaaaaaaaaaaaaaaaaaaaaaaaaaaaaaaaa

SEQ ID NO: 35328 - RNA, 1724 nt, Artificial Sequence
  mRNA product Design a-1 (A100) comprising derived and/or modified sequence from MOPV/LASV reassortant(IGS-1;Clade IV)__AFY05576__GPCmut9 (opt4)
aggagagucccgcagucggcguccagcggcucugcuuguucgugugugugucguugcaggccuuauucaagcuuaccaugggccagaucgugaccuucuuccaggaggugccccacgugaucgaggaggugaugaacaucgugcugaucgcccugagcgugcuggccgugcugaagggccuguacaacuucgccaccugcggccuggugggccuggugaccuuccugcugcugugcggcagaagcugcaccaccagccuguacaagggcguguacgagcugcagacccuggagcugaacauggagacccugaacaugaccaugccccugagcugcaccaagaacaacagccaccacuacaucauggugggcaacgagaccggccuggagcugacccugaccaacaccagcaucaucaaccacaaguucugcaaccugagcgacgcccacaagaagaaccuguacgaccacgcccugaugagcaucaucagcaccuuccaccugagcauccccaacuucaaccaguacgaggccaugagcugcgacuucaacggcggcaagaucagcgugcaguacaaccugagccacagcuacgccggcgacgccgccaaccacugcggcaccguggccaacggcgugcugcagaccuucaugagaauggccuggggcggcagcuacaucgcccuggacagcggcugcggcaacugggacugcaucaugaccagcuaccaguaccugaucauccagaacaccaccugggaggaccacugccaguucagcagacccagccccaucggcuaccugggccugcugagccagagaaccagagacaucuacaucagcagaagacugcugggcaccuucaccuggacccugagcgacagcgagggcgaggacacccccggcggcuacugccugaccagauggaugcugaucgaggccgagcugaagugcuucggcaacaccgccguggccaagugcaacgagaagcacgacgaggaguucugcgacaugcugagacuguucgacuucaacaagcaggccauccagagacugaaggccgaggcccagaugagcauccagcugaucaacaaggccgugaacgcccugaucaacgaccagcugaucaugaagaaccaccugagagacaucaugugcauccccuacugcaacuacagcaaguacugguaccugaaccacaccaccaccggcagaaccagccugcccaagugcuggcuggugagcaacggcagcuaccugaacgagacccacuucagcgacgacaucgagcagcaggccgacaacaugaucaccgagaugcugcagaaggaguacauggagagacagggcaagaccccccugggccugguggaccuguucguguucagcaccagcuucuaccugaucagcaucuuccugcaccuggugaagauccccacccacagacacaucgugggcaagagcugccccaagccccacagacugaaccacaugggcaucugcagcugcggccuguacaagcagcccggcgugcccgugaaguggaagagaugaggacuagucccuguucccagagcccacuuuuuuuucuuuuuuugaaauaaaauagccugucuuucagaucuaaaaaaaaaaaaaaaaaaaaaaaaaaaaaaaaaaaaaaaaaaaaaaaaaaaaaaaaaaaaaaaaaaaaaaaaaaaaaaaaaaaaaaaaaaaaaaaaaaaa

SEQ ID NO: 35329 - RNA, 1724 nt, Artificial Sequence
  mRNA product Design a-1 (A100) comprising derived and/or modified sequence from LASV(LM765-SLE-2012;Clade IV)__AIT17814__GPCmut9 (opt4)
aggagagucccgcagucggcguccagcggcucugcuuguucgugugugugucguugcaggccuuauucaagcuuaccaugggccagaucgugaccuucuuccaggaggugccccacgugaucgaggaggugaugaacaucgugcugaucgcccugagcauccuggccgugcugaagggccuguacaacuucgccaccugcggccuggugggccuggugaccuuccugcugcugugcggcagaagcugcaccaccagccuguacaagggcguguacgagcugcagacccuggagcugaacauggagacccugaacaugaccaugccccugagcugcaccaagaacaacagccaccacuacaucauggugggcaacgagaccggccuggagcugacccugaccaacaccagcaucaucgaccacaaguucugcaaccugagcgacgcccacagaaagaaccuguacgaccacgcccugaugagcaucaucagcaccuuccaccugagcauccccaacuucaaccaguacgaggccaugagcugcgacuucaacggcggcaagaucagcgugcaguacaaccugagccacagcuacgccaaggacgccgccgaccacugcggcaccguggccaacggcgugcugcagaccuucaugagaauggccuggggcggcagcuacaucgcccuggacagcggcugcggcagaugggacugcaucaugaccagcuaccaguaccugaucauccagaacaccaccugggaggaccacugccaguucagcagacccagccccaucggcuaccugggccugcugagccagagaaccagagacaucuacaucagcagaagacugcugggcaccuucaccuggacccugagcgacagcgagggcaaggacacccccggcggcuacugccugaccagauggaugcugaucgaggccgagcugaagugcuucggcaacaccgccguggccaagugcaacgagaagcacgacgaggaguucugcgacaugcugagacuguucgacuucaacaagcaggccauccagagacugaaggccgaggcccagaugagcauccagcugaucaacaaggccgugaacgcccugaucaacgaccagcugaucaugaagaaccaccugagagacaucaugugcauccccuacugcaacuacagcaaguacugguaccugaaccacaccaccaccggcaagaccagccugcccaagugcuggcuggugagcaacggcagcuaccugaacgagacccacuucagcgacgacaucgagcagcaggccgacaacaugaucaccgagaugcugcagaaggaguacauggagagacagggcaagaccccccugggccugguggaccuguucguguucagcaccagcuucuaccugaucagcaucuuccugcaccuggugaagauccccacccacagacacaucgugggcaagcccugccccaagccccacagacugaaccacaugggcaucugcagcugcggccuguacaagcagcccggcgugcccgugaaguggaagagaugaggacuagucccuguucccagagcccacuuuuuuuucuuuuuuugaaauaaaauagccugucuuucagaucuaaaaaaaaaaaaaaaaaaaaaaaaaaaaaaaaaaaaaaaaaaaaaaaaaaaaaaaaaaaaaaaaaaaaaaaaaaaaaaaaaaaaaaaaaaaaaaaaaaaa

SEQ ID NO: 35330 - RNA, 1724 nt, Artificial Sequence
  mRNA product Design a-1 (A100) comprising derived and/or modified sequence from LASV(LM776-SLE-2012;Clade IV)__AIT17824__GPCmut9 (opt4)
aggagagucccgcagucggcguccagcggcucugcuuguucgugugugugucguugcaggccuuauucaagcuuaccaugggccagaucgugaccuucuuccaggaggugccccacgugaucgaggaggugaugaacaucgugcugaucgcccugagcauccuggccgugcugaagggccuguacaacuucgccaccugcggccuggugggccuggugaccuuccugcugcugugcggcagaagcugcaccaccagcguguacaagggcguguacgagcugcagacccuggagcugaacauggagacccugaacaugaccaugccccugagcugcaccaagaacaacagccaccacuacaucauggugggcaacgagaccggccuggagcugacccugaccaacaccagcaucaucaaccacaaguucugcaaccugagcgacgcccacaagaagaaccuguacgaccacgcccugaugagcaucaucagcaccuuccaccugagcauccccaacuucaaccaguacgaggccaugagcugcgacuucaacggcggcaagaucagcgugcaguacaaccugagccacagcuacgccggcgacgccgccaaccacugcggcaccguggccaacggcgugcugcagaccuucaugagaauggccuggggcggcagcuacaucgcccuggacagcggcugcggcaagugggacugcaucaugaccagcuaccaguaccugaucauccagaacaccaccugggaggaccacugccaguucagcagacccagccccaucggcuaccugggccugcugagccagagaaccagagacaucuacaucagcagaagacugcugggcaccuucaccuggacccugagcgacagcgagggcaaggacacccccggcggcuacugccugaccagauggaugcugaucgaggccgagcugaagugcuucggcaacaccgccguggccaagugcaacgagaagcacgacgaggaguucugcgacaugcugagacuguucgacuucaacaagcaggccauccagagacugaaggccgaggcccagaugagcauccagcugaucaacaaggccgugaacgcccugaucaacgaccagcugaucaugaagaaccaccugagagacaucaugugcauccccuacugcaacuacagcaaguacugguaccugaaccacaccaccaccggcaagaccagccugcccaagugcuggcuggugagcaacggcagcuaccugaacgagacccacuucagcgacgacaucgagcagcaggccgacaacaugaucaccgagaugcugcagaaggaguacauggagagacagggcaagaccccccugggccugguggaccuguucguguucagcaccagcuucuaccugaucagcaucuuccugcaccuggugaagauccccacccacagacacaucgugggcaagagcugccccaagccccacagacugaaccacaugggcaucugcagcugcggccuguacaagcagcccggcgugcccgugagauggaagagaugaggacuagucccuguucccagagcccacuuuuuuuucuuuuuuugaaauaaaauagccugucuuucagaucuaaaaaaaaaaaaaaaaaaaaaaaaaaaaaaaaaaaaaaaaaaaaaaaaaaaaaaaaaaaaaaaaaaaaaaaaaaaaaaaaaaaaaaaaaaaaaaaaaaaa

SEQ ID NO: 35331 - RNA, 1724 nt, Artificial Sequence
  mRNA product Design a-1 (A100) comprising derived and/or modified sequence from LASV(Mad39;Clade IV)__ANH09722__GPCmut9 (opt4)
aggagagucccgcagucggcguccagcggcucugcuuguucgugugugugucguugcaggccuuauucaagcuuaccaugggccagaucgugaccuucuuccaggaggugccccacgugaucgaggaggugaugaacaucgugcugaucgcccugagcauccuggccgugcugaagggccuguacaacguggccaccugcggccugaucggccuggugaccuuccugcugcugugcggcagaagcugcaccaccacccuguacaagggcguguacgagcugcaggcccuggagcugaacauggagacccugaacaugaccaugccccugagcugcaccaagaacaacagccaccacuacaucagagugggcaacgagaccggccuggagcugacccugaccaacaccagccugaucaaccacaaguucugcaaccugagcgacgcccacaagaagaaccuguacgaccacgcccugaugagcaucaucagcaccuuccaccugagcauccccaacuucaaccaguacgaggccaugagcugcgacuucaacgacggcaagaucagcgugcaguacaaccugagccacaccuacgccggcgacaccgccaaccacugcggcaccguggccaacggcgugcugcagaccuucaugagaauggccuggggcggcagcuacaucgcccuggacagcggcugcggcggcugggacugcaucaugaccagcuaccaguaccugaucauccagaacaccaccugggaggaccacugccaguucagcagacccagccccaucggcuaccugggccugcugagccagagaaccagagacaucuacaucagcagaagacugcugggcaccuucaccuggacccugagcgacagcgagggcaaggacacccccggcggcuacugccugaccagauggaugcugaucgaggccgagcugaagugcuucggcaacaccgccguggccaagugcaacgagaagcacgacgaggaguucugcgacaugcugagacuguucgacuucaacaagcaggccauccagagacugaaggccgaggcccagaugagcauccagcugaucaacaaggccgugaacgcccugaucaacgaccagcugaucaugaagaaccaccugagagacaucaugugcauccccuacugcaacuacagcaaguacugguaccugaaccacaccgugaccggcaagaccagccugcccaagugcuggcuggugagcaacggcagcuaccugaacgagacccacuucagcgacgacaucgagcagcaggccgacaacaugaucaccgagaugcugcagaaggaguacauggagagacagggcaagaccccccugggccugguggaccuguucguguucagcaccagcuucuaccugaucagcaucuuccugcaccuggugaagauccccacccacagacacguggugggcaagcccugccccaagccccacagacugaaccacaugggcaucugcagcugcggcuucuacaagcagcccggcgugcccgugagauggaagagaugaggacuagucccuguucccagagcccacuuuuuuuucuuuuuuugaaauaaaauagccugucuuucagaucuaaaaaaaaaaaaaaaaaaaaaaaaaaaaaaaaaaaaaaaaaaaaaaaaaaaaaaaaaaaaaaaaaaaaaaaaaaaaaaaaaaaaaaaaaaaaaaaaaaaa

SEQ ID NO: 35332 - RNA, 1724 nt, Artificial Sequence
  mRNA product Design a-1 (A100) comprising derived and/or modified sequence from LASV(Z0947-SLE-2011;Clade IV)__AIT17840__GPCmut9 (opt4)
aggagagucccgcagucggcguccagcggcucugcuuguucgugugugugucguugcaggccuuauucaagcuuaccaugggccagaucgugaccuucuuccaggaggugccccacgugaucgaggaggugaugaacaucgugcugaucgcccugagcauccuggccgugcugaagggccuguacaacuucgccaccugcggccuggugggccuggugaccuuccugcugcugugcggcagaagcugcaccaucagccuguacaagggcguguacgagcugcagacccuggagcugaacauggagacccugaacaugaccaugccccugagcugcaccaagaacaacagccaccacuacaucauggugggcaacgagaccggccuggagcugacccugaccaacaccagcaucaucaaccacaaguucugcaaccugagcgacgcccacaagaagaaccuguacgaccacgcccugaugagcaucaucagcaccuuccaccugagcauccccaacuucaaccaguacgaggccaugagcugcgacuucaacggcggcaagaucagcgugcaguacaaccugagccacagcuacgccggcgacgccgccaaccacugcggcaccguggccaacggcgugcugcagaccuucaugagaauggccuggggcggcagcuacaucgcccuggacagcggcugcgacagaugggacugcaucaugaccagcuaccaguaccugaucauccagaacaccaccugggaggaccacugccaguucagcagacccagccccaucggcuaccugggccugcugagccagagaaccagagacaucuacaucagcagaagacugcugggcaccuucaccuggacccugagcgacagcgagggcaaggacacccccggcggcuacugccugaccagauggaugcugaucgaggccgagcugaagugcuucggcaacaccgccguggccaagugcaacgagaagcacgacgaggaguucugcgacaugcugagacuguucgacuucaacaagcaggccauccagagacugaaggccgaggcccagaugagcauccagcugaucaacaaggccgugaacgcccugaucaacgaccagcugaucaugaagaaccaccugagagacaucaugugcauccccuacugcaacuacagcaaguacugguaccugaaccacaccaccaccggcaagaccagccugcccaagugcuggcuggugagcaacggcagcuaccugaacgagacccacuucagcgacgacaucgagcagcaggccgacaacaugaucaccgagaugcugcagaaggaguacauggagagacagggcaagaccccccugggccugguggaccuguucguguucagcaccagcuucuaccugaucagcaucuuccugcaccuggugaagauccccacccacagacacaucgugggcaagcccugccccaagccccacagacugaaccacaugggcaucugcagcugcggccuguacaagcagcccggcgugcccgugaaguggaagagaugaggacuagucccuguucccagagcccacuuuuuuuucuuuuuuugaaauaaaauagccugucuuucagaucuaaaaaaaaaaaaaaaaaaaaaaaaaaaaaaaaaaaaaaaaaaaaaaaaaaaaaaaaaaaaaaaaaaaaaaaaaaaaaaaaaaaaaaaaaaaaaaaaaaaa

SEQ ID NO: 35333 - RNA, 1724 nt, Artificial Sequence
  mRNA product Design a-1 (A100) comprising derived and/or modified sequence from LASV(Josiah;Clade IV)__NP_694870__GPCmut9 (opt5)
aggagagucccgcagucggcguccagcggcucugcuuguucgugugugugucguugcaggccuuauucaagcuuaccaugggccagaucgugaccuucuuucaagaggucccccacguuauugaagaggugaugaacaucgugcugauugcccucagcguccuggcugugcuuaaggggcuguacaauuucgccacaugcggacucguuggccuggugacguuucuucugcucugugggagauccugcaccacaucucuguauaaaggagucuacgaacugcagacccucgagcugaacauggaaacacuuaauaugaccaugccucugagcuguacaaagaacaauucccaucacuauaucauggugggcaacgagaccgggcucgagcugacgcuuaccaauacaucuauuaucaaccauaaauucugcaaucugagcgacgcgcacaagaaaaaccucuacgaucaugcucugauguccaucauuucuaccuuucaccugagcaucccgaauuucaaccaguaugaagccauguccugugacuuuaauggaggcaagauuagcguucaguacaaccucucucacuccuaugccggcgaugcugccaaucauugcgggacaguggcuaacggaguccugcaaaccuucaugcggauggccuggggcgggagcuacaucgcgcuugacucuggauguggcaacugggauugcauuaugacguccuaccaguaucugaucauucagaauacaaccugggaggaccacugucaguuuagccgccccucuccuaucggguaccucggacugcuuucccaaagaacacgggauaucuauauuagccgcagacugcucggcaccuucaccuggacacuguccgacucugaaggcaaggauacgcccgggggauacugccugacccgguggaugcucaucgaggccgagcugaaauguuuuggcaacacagcuguggccaagugcaaugaaaaacaugacgaggaguucugcgauaugcuucgccuguuugacuucaacaagcaggcuauucagagacucaaagccgaagcgcagaugagcauccaacugauuaauaaggccgugaacgcucuuaucaaugaucagcugaucaugaagaaccaccuccgggacauuauguguaucccuuauugcaauuacuccaaauauugguaccugaaccacaccacaaccgggcgcacgagccugcccaaguguuggcucgucucuaauggauccuaccugaacgaaacacauuucagcgacgauauugagcagcaagccgacaauaugaucaccgagaugcuucagaaagaauauauggagagacagggcaagaccccucuggggcucguugaucuguuuguguucucuaccagcuuuuaccugauuuccaucuuccuucaccucgugaaaaucccgacacaucggcacauugucggaaagucuugccccaaaccucaucgccugaaccacaugggcaucuguagcugcggccuguauaagcagcccggggugccuguuaaguggaaaagaugaggacuagucccuguucccagagcccacuuuuuuuucuuuuuuugaaauaaaauagccugucuuucagaucuaaaaaaaaaaaaaaaaaaaaaaaaaaaaaaaaaaaaaaaaaaaaaaaaaaaaaaaaaaaaaaaaaaaaaaaaaaaaaaaaaaaaaaaaaaaaaaaaaaaa

SEQ ID NO: 35334 - RNA, 1721 nt, Artificial Sequence
  mRNA product Design a-1 (A100) comprising derived and/or modified sequence from LASV(LP;Clade I)__AAF86701__GPCmut9 (opt5)
aggagagucccgcagucggcguccagcggcucugcuuguucgugugugugucguugcaggccuuauucaagcuuaccaugggccagaucauuaccuucuuucaagaggugccccacgucaucgaagagguuaugaacauugugcugaucgcccucagccugcuugcuauucugaaggggcucuacaauaucgccacaugcggaaucauuggccugguggcguuccuuuuucugugugggaaauccugcucucucacgcugaagggaggcuaugaacugcagacccucgagcugaacauggaaacacuuaauaugaccaugccucugagcuguaccaaaaacuccucucaucacuacaucagagucgggaaugagacaggacucgagcugacacuuaccaacacgagcauuaucaaucauaaguucugcaaccuguccgacgcucacaaaaagaaucucuaugaucaugcccugaugucuauuaucagcaccuuucaccuguccauuccgaacuucaaucaguacgaagccaugagcugugacuuuaacggcggcaagaucucugugcaguauaaucucucccacagcuacgcuggggaugccgcugagcauugcggaacaguugccaacggcgugcugcaaaccuucaugcggauggcguggggagggcgcuauaucgcccuugacucuggcugugggaauugggauugcauuaugacauccuaccaguaccugaucauucagaacaccacgugggaagaccacugucaguuuagcagacccucuccuaucggauaucucggccugcuuucccaacggacacgcgauauuuacaucagcagacggcugcucggcaccuucacauggacccuguccgacucugaggggaacgagacccccggaggcuauugccugacacgcuggaugcucaucgaagcugagcugaaauguuuugggaauacggccgucgcuaagugcaacgaaaaacaugaugaggaguucugcgacaugcuuagacuguuugauuucaauaagcaggccauucggcgccucaaagcggaagcccagaugagcauccagcugauuaacaaggcugugaaugcccuuaucaacgaccaacugauuaugaagaaucaccucagagauaucauguguaucccuuacugcaacuauuccaaauacugguaucugaaucacaccagcucuggacggacaucccugcccaaguguuggcucauuagcaacggcucuuaccugaaugagacccaguucagcgacgacaucgaacagcaagcugauaacaugauuacagagaugcuucagaaagaauacaucgagcgccaggggaagaccccucugggacucguugacauuuuuaucuucuccacgucuuuuuaucugauuagcaucuuccugcaucuuaucaaaauuccgacacacagacauaucgugggcaagcccugcccuaaaccccaccggcucaaucauaugggcgucuguuccugcgggcuguacaagcacccuggagugcccaccaaguggaaacgcugaggacuagucccuguucccagagcccacuuuuuuuucuuuuuuugaaauaaaauagccugucuuucagaucuaaaaaaaaaaaaaaaaaaaaaaaaaaaaaaaaaaaaaaaaaaaaaaaaaaaaaaaaaaaaaaaaaaaaaaaaaaaaaaaaaaaaaaaaaaaaaaaaaaaa

SEQ ID NO: 35335 - RNA, 1721 nt, Artificial Sequence
  mRNA product Design a-1 (A100) comprising derived and/or modified sequence from LASV(803213;Clade II)__AAF86703__GPCmut9 (opt5)
aggagagucccgcagucggcguccagcggcucugcuuguucgugugugugucguugcaggccuuauucaagcuuaccaugggccagaucauuaccuucuuucaagaggugccccacgucaucgaagagguuaugaacauugugcugaucgcccucagccugcuugcuauucugaaggggaucuacaauguggccacaugcggacucuucggccugaucuccuuucuucugcucugugggagaucuugcagcgucacguauaaaggaguguacgaacugcagacccuggagcucaacauggcgaaucugaacaugacaaugccucuuuccuguaccaagaauaacucucaucacuauauuaugguuggcaaugaaacagggcuggagcucacccugacaaacaccagcaucauuaaucauaaauucugcaaccuuuccgacgcucacaagaaaaaucuguacgaucaugcccucaugucuaucauuagcacguuucaccuguccaucccgaacuucaaucaguaugaggccaugagcugugacuuuaacggaggcaagauuucugugcaguacaaucugucccacagcuucgcugucgaugccgcuaaccauugcggcaccaucgccaacggggugcuccaaacauuuaugcggauggcguggggaggcucuuauaucgcccuggacuccggguguggaaauugggauugcauuaugaccagcuaccaguaccuuaucauucagaacacaaccugggaagaccacugucaguucucucgccccuccccuaucggcuaucuggggcuccugagccaaagaacgcgggauauuuacaucucccgcagacuucugggaacauuuaccuggacacucucugacagcgagggcaaugaagcucccggcggguauugccugacccgguggaugcugaucgaggccgagcucaaguguuucggaaacaccgcuguugccaaaugcaaugaaaagcaugaugaggaauuuugcgacaugcugcgccuuuucgauuucaacaaacaggcgauuaagagacugaaaacagaggcccagauguccauccagcucauuaauaaggcugugaacgcccugaucaaugaccaacuuauuaugaagaaccaucugcgggauaucauguguaucccuuacugcaauuauagccgcuacugguaucucaaccacacggucaccggcaaaacaucucugcccagauguuggcugguguccaaugggagcuaccucaacgaaacccacuuuucugacgacauugagcagcaggcugauaauaugaucacagagaugcugcaaaaggaauacauggaccggcagggaaaaaccccucuuggccugguggaucucuucgucuuuagcacguccuucuaucugauuucuaucuuucugcaccuuguuaagauuccgacacaucgccacaucguggggaaacccugcccuaagccccauagacucaaccacaugggaauuuguagcugcggccuguacaaacacccuggcgugcccgucaaguggaagcggugaggacuagucccuguucccagagcccacuuuuuuuucuuuuuuugaaauaaaauagccugucuuucagaucuaaaaaaaaaaaaaaaaaaaaaaaaaaaaaaaaaaaaaaaaaaaaaaaaaaaaaaaaaaaaaaaaaaaaaaaaaaaaaaaaaaaaaaaaaaaaaaaaaaaa

SEQ ID NO: 35336 - RNA, 1721 nt, Artificial Sequence
  mRNA product Design a-1 (A100) comprising derived and/or modified sequence from LASV(GA391;Clade III)__CAA36645__GPCmut9 (opt5)
aggagagucccgcagucggcguccagcggcucugcuuguucgugugugugucguugcaggccuuauucaagcuuaccaugggccagaucgugaccuucuuucaagaggucccccacguuauugaagaggugaugaacaucgugcugauugcccucagcauccuggcuauucuuaaggggcuguacaaugucgccacaugcggacucaucggccuggugacguuccuucugcucuccgggagaucuuguagccugaucuauaaaggaaccuacgaacugcagacacucgagcugaacauggaaacccuuaauaugacaaugccucuguccugcaccaagaacaauucucaucacuauauucggguuggcaacgagacagggcucgagcugacccuuacgaauaccagcauccugaaccauaaauuuuguaaucucuccgacgcgcacaagcgcaaccuguacgaucauucucugaugagcauuaucuccacauuccaccucagcauuccgaauuuuaaccaguaugaagcuaugucuugcgacuucaauggaggcaaaaucaccgugcaguacaaccugucccacagcuuugccgucgaugccgcuggccauugugggacacuugccaauggagugcugcaaaccuucaugagaauggcuuggggcgggucuuauauugcccucgacuccggaugcggcaacugggauuguaucaugacgagcuaccaguaccugaucauucagaacacaaccugggacgaucacugccaguuuucucggcccuccccuaucggguaucuuggacugcucagccaacgcacaagagacauuuacaucucccggcgccugcugggcaccuucaccuggacacucucugauagcgagggcaaugaaacgcccgggggauauugucugaccagauggaugcuuauugaggcggagcugaagugcuuuggcaacacagccguugcuaaguguaaugaaaaacaugacgaggaguucugcgauaugcuccggcuguuugacuucaacaagcaggccauccgcagacuuaaaaccgaagcucagauguccauccagcugauuaauaaggccgugaacgcgcucaucaaugaucaacugauuaugaaaaaccaucugcgggacaucaugugcauuccuuacuguaauuauagccgcuacugguaucucaaccacacaucuaccgggaagacgucccugcccagaugcuggcuuaucagcaauggaucuuaccugaacgaaacaaaguucagcgacgauaucgagcagcaggccgacaauaugauuaccgagaugcuccaaaaagaauacaucgaucggcagggcaagaccccucuggggcuggucgaccuuuuuguguucuccacaucuuuuuaucucauuagcaucuuccugcaccuggugaaaauuccgacccaccgccauaucgucggaaagcccuguccuaaaccccacagacucaaccauaugggcauuugcuccuguggccuguacaagcagccugggguucccgugcgguggaaaagaugaggacuagucccuguucccagagcccacuuuuuuuucuuuuuuugaaauaaaauagccugucuuucagaucuaaaaaaaaaaaaaaaaaaaaaaaaaaaaaaaaaaaaaaaaaaaaaaaaaaaaaaaaaaaaaaaaaaaaaaaaaaaaaaaaaaaaaaaaaaaaaaaaaaaa

SEQ ID NO: 35337 - RNA, 1724 nt, Artificial Sequence
  mRNA product Design a-1 (A100) comprising derived and/or modified sequence from LASV(AV;Clade V)__CCA30314__GPCmut9 (opt5)
aggagagucccgcagucggcguccagcggcucugcuuguucgugugugugucguugcaggccuuauucaagcuuaccaugggccagaucgugaccuucuuucaagaggucccccacguuauugaagaggugaugaacaucgugcugauugcccucagcauccuggcuguccuuaaggggcuguacaauauugccacaugcggacucaucggccugaucacguuccuucugcucugugggagauccugcucuagcaaccuguauaaaggaguguacgaacugcagucccucgaccugaauauggagacccuuaacaugacaaugccucugucuuguaccaagaauaacagccaucacuauauucggguuggcaaugauacagggcucgaacugacccuuacaaacaccuccauccugaaucauaaauuuugcaaccucucugacgcgcacaagaaagaucuguacgaccaugcucugaugagcauuaucuccacguuccaccucagcauuccgaauuuuaaccaguaugaggccaugucuugugauuucaauggaggcaagaucuccgugcaguacaaccugagccacucuuaugccauugacgcugccaaucauugcggcaccgucgcuaacgggauccuucaaacauuuaugcgcauggccuggggaggcuccuacaucgcgcuggauagcggguguggaaacugggacugcauuaugaccucuuaccaguaucucaucauucagaauacaaccugggagaaccacugucaguucuccagacccagcccuaucggcuaccuggggcuucugucccaacggacgcgcgauauuuauaucucuagacggcuccugggaacauuuaccuggacacugagcgacuccgaaggcaaugccacccccggcggguacugccucacccgcuggaugcugaucgaggcugaacuuaaguguuucggaaacacagccguggcuaaaugcaaugagaagcaugaugaggaauuuugcgacaugcugagacucuucgauuuuaacaaacaggccauuagccggcugaagucugaggcgcagauguccauccagcuuauuaauaaagccguuaacgcucugaucaaugaccaacucauuaugaagaaccaucugcgcgacaucauguguaucccuuauugcaauuacagcaaguauugguaccugaaccacacgauuaccggcaaaacaucucuccccaaguguuggcuggugagcaauggguccuaccuuaacgaaacccacuucucugaugacaucgagcagcaggccgauaauaugauuacagaaaugcugcaaaaagaguauauggagagacagggaaagaccccucucggccuggucgaccuguucguguuuagcacguccuucuaccuuaucagcauuuuucuccggcuggugaaaaucccgacacaccgccauauugucgggaagcccugcccuaaaccccacagacugaaccauaugggaaucuguucuugcggccucuauaagcagccuggcguucccgugcgguggaagcgcugaggacuagucccuguucccagagcccacuuuuuuuucuuuuuuugaaauaaaauagccugucuuucagaucuaaaaaaaaaaaaaaaaaaaaaaaaaaaaaaaaaaaaaaaaaaaaaaaaaaaaaaaaaaaaaaaaaaaaaaaaaaaaaaaaaaaaaaaaaaaaaaaaaaaa

SEQ ID NO: 35338 - RNA, 1721 nt, Artificial Sequence
  mRNA product Design a-1 (A100) comprising derived and/or modified sequence from LASV(Togo/2016/7082;Clade VI)__AMR44577__GPCmut9 (opt5)
aggagagucccgcagucggcguccagcggcucugcuuguucgugugugugucguugcaggccuuauucaagcuuaccaugggccagaucauuaccuucuuucaagaggugccccacgucaucgaagagguuaugaacauugugcugaucgcccucagccugcuugcuauucugaaggggguguacaaugucgccacaugcggaaucaucggccucgugacguuccuguuucuuugugggagauccugcucucugauuuauaaaggaagcuacgaacuccagacccuggagcugaacauggaaacacucaauaugaccaugccucuguccuguacaaagaacucuagccaucacuauauccggguuggcaaugagaccgggcuugagcugacacucaccaacacguccauuaucaaucauaaauucugcaaccugucugacgcgcacaagcgcaaucuuuacgaucaugcucugaugagcauucucuccaccuuucaccugagcaucccgaacuucaaucaguaugaagccaugucuugugacuuuaacggaggcaaaauuuccgugcaguacaaucugagccacgccuaugcugucgaugccgcugagcauugcggcacaguggccaacgggguucuccaaaccuucaugagaauggcguggggaggcucuuacaucgcccuggacuccggguguggaaauugggauugcaucaugacaagcuaccaguaucuuauuauccagaacaccacgugggaagaccacugucaguuuucucggcccuccccuauuggcuaccuggggcuccugagccaacgcacaagagauaucuauauuucccggcgccuucugggaaccuucacauggacccucucugacagcgagggcaacgagacccccggcggguacugccugacaagauggaugcugaucgaagcugagcucaaguguuuuggaaauacggccguggcuaagugcaacgaaaaacaugaugaggaguucugcgacaugcugcggcuuuuugauuucaauaagcaggccauccagcgccugaaauccgaagcgcagaugagcauucaacucaucaacaaggccgucaaugcucugauuaacgaccagcuuaucaugaaaaaucaccugagagauaugauguguauuccuuauugcaacuacucuaaguauugguaccucaaucacaccuccagcggccggacaucucugcccaaguguuggcuggugagcaacggguccuaccucaaugagacccauuucucugacgacaucgaacagcaagccgauaacaugaucacagagaugcugcagaaagaauauauugaccgccagggaaagaccccucuuggccugguggaucucuuugucuucagcacguccuuuuaccugaucagcauuuuccugcaccuuaucaaaauuccgacacauagacacaucguugggaagcccugcccuaaaccccaucggcucaaucacaugggaauuuguucuugcggccuguauaagcagccuggcgugcccacccgcuggaaaagaugaggacuagucccuguucccagagcccacuuuuuuuucuuuuuuugaaauaaaauagccugucuuucagaucuaaaaaaaaaaaaaaaaaaaaaaaaaaaaaaaaaaaaaaaaaaaaaaaaaaaaaaaaaaaaaaaaaaaaaaaaaaaaaaaaaaaaaaaaaaaaaaaaaaaa

SEQ ID NO: 35339 - RNA, 1721 nt, Artificial Sequence
  mRNA product Design a-1 (A100) comprising derived and/or modified sequence from LASV(KAK-428;Clade n.d. (VII))__ANH09740__GPCmut9 (opt5)
aggagagucccgcagucggcguccagcggcucugcuuguucgugugugugucguugcaggccuuauucaagcuuaccaugggccagaucgugaccuucuuucaagaggucccccacguuauugaagaggugaugaacaucgugcugauugcccucagccugcuugcuauccugaaggggcucuacaauuucgccacaugcggagucauuggccugaucacguuucuucugcucugugggagauccugcucugcgaccuauaaaggacaguacgaacugcagacacuggagcucaacauggaaagccugaauaugaccaugccucuuuccuguacaaagaacaauucucaucacuauauccgggcuggcaacaauaccgggcuggagcucacacugaccaacacgagcauuaucucccauaaauucugcaaucuuucugacgcccacaagaaaaaccuguacgaucauacccucaugagcauuaucacaaccuuucaccuguccauuccgaauuucaaccaguaugaggccaugagcugugacuuuaauggaggcaagaucucuauucaauacaaccugucccacagcuaugcuggcgaugccgcucagcauugcgggacaguggccaauggaguucuccagaccuucaugcgcauggcguggggcgggucuuaccuggcccuugacuccggauguagaggcugggauugcaucaucagcucuuaccaguaucugauuauccaaaacacgacaugggacgaucacugucaguuuucccggcccagcccuauuggguaccucggauucgugucccagaagacccgcgacaucuauauuucuagacggcugcuuggcacauuuaccuggacccugagcgauuccgaaggccaugacaugcccgggggauacugccucacacgcuggaugcugaucgaggcugaucugaaauguuucggcaacacggccgucgcuaagugcaaugaaaaacacgacgaggaguuuugcgauauguggagacucuucgacuucaacaagcaggccauccaacggcugaaagcggaagcccagaugaauauucagcuuaucaacaaggcugugaaugcccugauuaacgaccaacucaugaugaagaaucaucugcgcgauaucauguguauuccuuauugcaacuacagcaaauuuugguaucuuaauaacaccacaaccgggagaacaucucugccccgguguuggcucaucuccaauggaagcuaccugaacgagacccacuucucugacgauaucgaacagcaggcugacaauaugauuacggagaugcugcagaaggaauacauggaucgccaaggcaaaacaccucucgggcugguugaccuuuuuguguucagcaccuccuuuuaucugaucaccauuuuccuccaccuggucaagaucccgacacauagacacauugugggaaaacccugcccuaagccccaucggcugaaccacaugggcaucuguucuugcggccuuuacaaacagccuggggugcccguccgcuggaagagaugaggacuagucccuguucccagagcccacuuuuuuuucuuuuuuugaaauaaaauagccugucuuucagaucuaaaaaaaaaaaaaaaaaaaaaaaaaaaaaaaaaaaaaaaaaaaaaaaaaaaaaaaaaaaaaaaaaaaaaaaaaaaaaaaaaaaaaaaaaaaaaaaaaaaa

SEQ ID NO: 35340 - RNA, 1721 nt, Artificial Sequence; identical to SEQ ID NO: 35334
  mRNA product Design a-1 (A100) comprising derived and/or modified sequence from LASV(Pinneo-NIG-1969;Clade I)__AIT17836__GPCmut9 (opt5)

SEQ ID NO: 35341 - RNA, 1721 nt, Artificial Sequence
  mRNA product Design a-1 (A100) comprising derived and/or modified sequence from LASV(ISTH0009-NIG-2011;Clade II)__AIT17404__GPCmut9 (opt5)
aggagagucccgcagucggcguccagcggcucugcuuguucgugugugugucguugcaggccuuauucaagcuuaccaugggccagaucauuaccuucuuucaagaggugccccacgucaucgaagagguuaugaacauugugcugaucgcccucagccugcuugcuauucugaaggggaucuacaauguggccacaugcggacucuucggccuggucuccuuucuucugcucugugggagaucuugcagcacgaccuauaaaggaguguacgaacugcagacacuggagcucgacauggcgucccugaacaugaccaugccucuuucuuguacaaagaauaacagccaucacuauaucaugguuggcaaugaaaccgggcuggagcucacacugaccaacacguccauuaucaaucauaaauucugcaaccuuucugaugcucacaagaaaaaucuguacgaccaugcccucaugagcauuaucuccaccuuucaccugagcauuccgaacuucaaucaguaugaggccaugucuugugauuuuaacggaggcaagaucuccgugcaguacaaucugagccacgcuuaugccgucgacgcugccaaccauugcggcacaauugcgaauggggugcuccaaaccuucaugcggauggccuggggaggcucuuacaucgcucuggauuccggguguggaagcugggacugcaucaugacaucuuaccaguaucuuauuauccagaacaccacgugggaagaucacugucaguuuucccgccccagcccuauuggcuaccuggggcuccugucccaaagaacacgggacaucuauauuucucgcagacuucugggaaccuucacauggacccucagcgauuccgagggcaacgaaacccccggcggguacugccugacacgguggaugcugaucgaggccgagcucaaguguuuuggaaauacggcuguugccaaaugcaacgaaaagcaugacgaggaguucugcgauaugcugcgccuuuuugacuucaauaaacaggcgaucagacggcugaagaccgaagcccagaugagcauucagcucaucaacaaagcugugaaugcccugauuaacgaucaacuuaucaugaagaaucaucugcgcgacauuauguguaucccuuauugcaacuacucuaaguauugguaccucaaucacacagucaccggcaaaacaucccugcccagauguuggcuggugagcaacgggucuuaccucaaugaaacccacuucagcgacgauaucgagcagcaggcugacaacaugauuacggagcugcuucaaaaggaauauauggaucggcagggaaaaacaccucugggccucguggaccuguuugucuucuccaccucuuuuuaccugaucagcauuuuccuucaccucaucaagauuccgacccaucgccacaucacagggaaacccugcccuaagccccauagacugaaucacaugggaauuuguuccugcggccuguauaaacacccuggcguucccgugaaguggaagcggugaggacuagucccuguucccagagcccacuuuuuuuucuuuuuuugaaauaaaauagccugucuuucagaucuaaaaaaaaaaaaaaaaaaaaaaaaaaaaaaaaaaaaaaaaaaaaaaaaaaaaaaaaaaaaaaaaaaaaaaaaaaaaaaaaaaaaaaaaaaaaaaaaaaaa

SEQ ID NO: 35342 - RNA, 1721 nt, Artificial Sequence
  mRNA product Design a-1 (A100) comprising derived and/or modified sequence from LASV(ISTH2010-NIG-2012;Clade II)__AIT17482__GPCmut9 (opt5)
aggagagucccgcagucggcguccagcggcucugcuuguucgugugugugucguugcaggccuuauucaagcuuaccaugggccagaucauuaccuucuuucaagaggugccccacgucaucgaagagguuaugaacauugugcugaucgcccucagccugcuugcuauucugaaggggaucuacaauguggccacaugcggacucuucggccuggucuccuuucuucugcucugugggagaucuugcagcacgaccuauaaaggaguguacgaacugcagacacuggagcucgacauggcgucccugaacaugaccaugccucuuucuuguacaaagaauaacagccaucacuauaucaugguuggcaaugaaaccgggcuggagcucacacugaccaacacguccauuaucaaucauaaauucugcaaccuuucugaugcucacaagaaaaaucuguacgaccaugcccucaugagcauuaucuccaccuuucaccugagcauuccgaacuucaaucaguaugaggccaugucuugugauuuuaacggaggcaagaucuccgugcaguacaaucugagccacgcuuaugccgucgacgcugccaaccauugcggcacaauugcgaauggggugcuccaaaccuucaugcggauggccuggggaggcucuuacaucgcucuggauuccggguguggaagcugggacugcaucaugacaucuuaccaguaucuuauuauccagaacauuaccugggaagaucacugucaguuuucccgccccagcccuaucggcuaccuggggcuccugucccaaagaacgcgggacauuuauaucucucgcagacuucugggaacauucaccuggacacucagcgauuccgagggcaacgaaacccccggcggguacugccugacccgguggaugcugaucgaggccgagcucaaguguuuuggaaauacagcuguugccaaaugcaacgaaaagcaugacgaggaguucugcgauaugcugcgccuuuuugacuucaauaaacaggcgauuagacggcugaagacggaagcccagaugagcauccagcucauuaacaaagcugugaaugcccugaucaacgaucaacuuauuaugaagaaucaucugcgcgacaucauguguaucccuuauugcaacuacucuaaguauugguaccucaaucacaccgucacaggcaaaaccucccugcccagauguuggcuggugagcaacgggucuuaccucaaugaaacacacuucagcgacgauauugagcagcaggcugacaacaugaucaccgagcugcuucaaaaggaauauauugaucggcagggaaaaacgccucugggccucguggaccuguuugucuucuccacaucuuuuuaccugaucagcauuuuccuucaccucguuaagaucccgacccaucgccacgugguggggaaacccugcccuaagccccauagacugaaucacaugggaauuuguuccugcggccuguauaaacacccuggcguccccgugaaguggaagcggugaggacuagucccuguucccagagcccacuuuuuuuucuuuuuuugaaauaaaauagccugucuuucagaucuaaaaaaaaaaaaaaaaaaaaaaaaaaaaaaaaaaaaaaaaaaaaaaaaaaaaaaaaaaaaaaaaaaaaaaaaaaaaaaaaaaaaaaaaaaaaaaaaaaaa

SEQ ID NO: 35343 - RNA, 1721 nt, Artificial Sequence
  mRNA product Design a-1 (A100) comprising derived and/or modified sequence from LASV(Lassa virus/H.sapiens-wt/NGA/2015/ISTH_0543;Clade II)__AVO03639__GPCmut9 (opt5)
aggagagucccgcagucggcguccagcggcucugcuuguucgugugugugucguugcaggccuuauucaagcuuaccaugggccagaucauuaccuucuuucaagaggugccccacgucaucgaagagguuaugaacauugugcugaucgcccucagccugcuugcuauucugaaggggaucuacaauguggccacaugcggacucuucggccuggucuccuuucuucugcucugugggagaucuugcagcacgaccuauaaaggaguguacgaacugcagacacuggagcucgacauggcgaaccugaauaugaccaugccucuuuccuguacaaagaacaauucucaucacuauaucaugguuggcaacgaaaccgggcuggagcucacacugaccaauacgagcauuaucaaccauaaauucugcaaucuuuccgaugcucacaagaaaaaccuguacgaccaugcccucaugucuauuaucagcaccuuucaccuguccauuccgaauuucaaccaguaugaggccaugagcugugauuuuaauggaggcaagaucucugugcaguacaaccugucccacacauaugcugucgacgccgcuaaucauugcggcaccauugccaacggggugcuccaaacauucaugcggauggcguggggaggcagcuacaucgcccuggauucuggguguggauccugggacugcaucaugaccagcuaccaguaucuuguuauucagaacacgacaugggaagaucacugucaguuuucucgccccuccccuaucggcuaccuggggcuccugagccaaagaacccgggacauuuauaucucccgcagacuucugggaacauucaccuggacccucucugauagcgagggcaaugaaacacccggcggguacugccugacgcgguggaugcugauugaggcugagcucaaguguuuuggaaacaccgccguggcuaaaugcaaugaaaagcaugacgaggaguucugcgauaugcugcgccuuuuugacuucaacaaacaggccaucagacggcugaagacagaagcgcagauguccauccagcucauuaauaaagccgucaacgcucugaucaaugaucaacuuauuaugaagaaccaucugcgcgacaucauguguauuccuuauugcaauuacagcaaguauugguaccucaaccacaccgugacaggcaaaaccucucugcccagauguuggcugguguccaaugggagcuaccucaacgaaacgcacuucucugacgauaucgagcagcaggccgacaauaugaucacagagcugcuucaaaaggaauauauugaucggcagggaaaaaccccucugggccucgucgaccuguuuguuuucagcaccuccuuuuaccugaucucuauuuuccuucaccucgugaagaucccgacacaucgccacauuaccgggaaacccugcccuaagccccauagacugaaccacaugggaaucuguagcugcggccuguauaaacacccuggcgugcccgucaaguggaagcggugaggacuagucccuguucccagagcccacuuuuuuuucuuuuuuugaaauaaaauagccugucuuucagaucuaaaaaaaaaaaaaaaaaaaaaaaaaaaaaaaaaaaaaaaaaaaaaaaaaaaaaaaaaaaaaaaaaaaaaaaaaaaaaaaaaaaaaaaaaaaaaaaaaaaa

SEQ ID NO: 35344 - RNA, 1721 nt, Artificial Sequence
  mRNA product Design a-1 (A100) comprising derived and/or modified sequence from LASV(Lassa virus/H.sapiens-wt/NGA/2016/ISTH_0009;Clade II)__AVO03571__GPCmut9 (opt5)
aggagagucccgcagucggcguccagcggcucugcuuguucgugugugugucguugcaggccuuauucaagcuuaccaugggccagaucauuaccuucuuucaagaggugccccacgucaucgaagagguuaugaacauugugcugaucgcccucagccugcuugcuauucugaaggggaucuacaauguggccacaugcggacuccugggccuugucuccuuccugcuccugugugggagaucuugcagcacgaccuauaaaggaguguacgaacugcagacacucgagcuggacauggcgucccuuaacaugaccaugccucugucuuguacaaagaauaacagccaucacuauaucaugguuggcaaugaaaccgggcucgagcugacacuuaccaacacguccauuaucaaucauaaauuuugcaaccugucugaugcucacaagaaaaaucucuacgaccaugcccugaugagcauuaucuccaccuuccaccugagcauuccgaacuuuaaucaguaugaggccaugucuugugauuucaacggaggccggaucuccgugcaguacaaucucagccacucuuaugcugucgacgccgcuaaccauugcggcacaauugccaauggggugcugcaaaccuuuaugcgcauggcguggggaggcuccuacaucgcccuugauagcggguguggaucuugggacugcaucaugacauccuaccaguaucugauuauccagaacaccacgugggaagaucacugucaguucagcagacccuccccuauuggcuaccucgggcugcuuucucaacggacacgcgacaucuauauuagcagacggcugcucggaaccuuuacauggacccuguccgauagcgagggcaacgaaacccccggcggguacugccugacacgcuggaugcucaucgaggcugagcugaaguguuucggaaauacggccguugcuaagugcaacgaaaaacaugacgaggaauuuugcgauaugcuuagacuguucgacuuuaauaagcaggccauccggcgccucaaaaccgaggcgcagaugucuauucagcugaucaacaaggccgugaaugcucuuauuaacgaucaacugaucaugaaaaaucaccucagagacauuauguguaucccuuauugcaacuacuccaaguauugguaccugaaucacacagucaccggcaagacaagccugccccgguguuggcucgugucuaacgggagcuaccugaaugaaacccauuucuccgacgauaucgagcagcaggccgacaacaugauuacggagcuucugcaaaaagaauauaucgaucgccagggaaagacaccucucggccugguggaccuguucgucuuuucuaccagcuucuaccuuauuuccaucuuucuccaccugguuaaaauuccgacccauagacacaucacagggaagcccugcccuaaaccccaucggcugaaucacaugggaauuuguagcugcggccucuauaaccacccuggcgugcccgugaaguggaaacgcugaggacuagucccuguucccagagcccacuuuuuuuucuuuuuuugaaauaaaauagccugucuuucagaucuaaaaaaaaaaaaaaaaaaaaaaaaaaaaaaaaaaaaaaaaaaaaaaaaaaaaaaaaaaaaaaaaaaaaaaaaaaaaaaaaaaaaaaaaaaaaaaaaaaaa

SEQ ID NO: 35345 - RNA, 1721 nt, Artificial Sequence
  mRNA product Design a-1 (A100) comprising derived and/or modified sequence from LASV(Lassa virus/H.sapiens-wt/NGA/2016/ISTH_0017;Clade II)__AVO03567__GPCmut9 (opt5)
aggagagucccgcagucggcguccagcggcucugcuuguucgugugugugucguugcaggccuuauucaagcuuaccaugggccagaucauuaccuucuuucaagaggugccccacgucaucgaagagguuaugaacauugugcugaucgcccucagccugcuugcuauucugaaggggaucuacaauguggccacaugcggacucuucggccuggucuccuuucuucugcucugugggagaucuugcagcacgaccuauaaaggaguguacgaacugcagacacuggagcucgacauggcgucccugaacaugaccaugccucuuucuuguacaaagaauaacagccaucacuauaucaugguuggcaaugaaaccgggcuggagcucacacugaccaacacguccauuaucaaucauaaauucugcaaccuuucugaugcucacaagaaaaaucuguacgaccaugcccucaugagcauuaucuccaccuuucaccugagcauuccgaacuucaaucaguaugaggccaugucuugugauuuuaacggaggcaagaucuccgugcaguacaaucugagccacacauaugcuauugacgccgcuaaccauugcggcaccaucgccaaugggguccuccaaacauucaugcggauggcguggggaggcucuuacaucgcccuggauuccggguguggaagcugggacugcauuaugaccucuuaccaguaucuuaucauucagaacacgacaugggaagaucacugucaguuuucccgccccagcccuaucggcuaccuggggcuccugucccaaagaacccgggacauuuauaucucucgcagacuucugggaacauucaccuggacccucagcgauuccgagggcaacgaaacacccggcggguacugccugacgcgguggaugcugaucgaggcugagcucaaguguuuuggaaauaccgccguggcuaaaugcaacgaaaagcaugacgaggaguucugcgauaugcugcgccuuuuugacuucaauaaacaggccauuagacggcugaagacagaagcgcagaugagcauccagcucauuaacaaagccguuaaugcucugaucaacgaucaacuuauuaugaagaaucaucugcgcgacaucauguguaucccuuauugcaacuacucuaaguauugguaccucaaucacaccgugacaggcaaaaccucccugcccagauguuggcuggucagcaacgggucuuaccucaaugaaacgcacuucagcgacgauauugagcagcaggccgacaacaugaucacagagcugcuucaaaaggaauauauggaucggcagggaaaaaccccucugggccucguggaccuguuuguguucuccaccucuuuuuaccugauuagcaucuuccuucaccucguccgcauuccgacacauagacacguuaucgggaagcccugcccuaaaccccaucggcugaaucacaugggaauuuguuccugcggccuguauaagcacccuggcgugcccgugaaauggaagcgcugaggacuagucccuguucccagagcccacuuuuuuuucuuuuuuugaaauaaaauagccugucuuucagaucuaaaaaaaaaaaaaaaaaaaaaaaaaaaaaaaaaaaaaaaaaaaaaaaaaaaaaaaaaaaaaaaaaaaaaaaaaaaaaaaaaaaaaaaaaaaaaaaaaaaa

SEQ ID NO: 35346 - RNA, 1721 nt, Artificial Sequence
  mRNA product Design a-1 (A100) comprising derived and/or modified sequence from LASV(Lassa virus/H.sapiens-wt/NGA/2018/ISTH_0959;Clade II)__AVV65099__GPCmut9 (opt5)
aggagagucccgcagucggcguccagcggcucugcuuguucgugugugugucguugcaggccuuauucaagcuuaccaugggccagaucauuaccuucuuucaagaggugccccacgucaucgaagagguuaugaacauugugcugaucgcccucagccugcuugcuauucugaaggggaucuacaauguggucacaugcggacucuucggccugguguccuuucuucugcucugugggagaucuugcagcacgaccuauaaaggaguuuacgaacugcagacacuggagcucgacauggccucccugaacaugaccaugccucuuucuuguacaaagaauaacagccaucacuauaucauggugggcaaugaaaccgggcuggagcucacacugaccaacacguccauuaucaaucauaaauucugcaaccuuucugaugcgcacaagaaaaaucuguacgaccaugcucucaugagcauuaucuccaccuuucaccugagcauuccgaacuucaaucaguaugaggccaugucuugugauuuuaacggaggcaagaucuccguccaguacaaucugagccacgccuaugcuauugacgccgcuaaccauugcggcacaaucgccaauggggugcuccaaaccuucaugcggauggcguggggaggcucuuacaucgcccuggauuccggguguggaagcugggacugcauuaugacaucuuaccaguaucuuaucauucagaacaccacgugggaagaucacugucaguuuucccgccccagcccuaucggcuaccuggggcuccugucccaaagaacacgggacauuuauaucucucgcagacuucugggaaccuucacauggacccucagcgauuccgagggcaacgaaacccccggcggguacugccugacacgguggaugcugaucgaggcugagcucaaguguuuuggaaauacggccguugcuaaaugcaacgaaaagcaugacgaggaguucugcgauaugcugcgccuuuuugacuucaauaaacaggccauuagacggcugaagaccgaagcgcagaugagcauccagcucauuaacaaagccgugaaugcucugaucaacgaucaacuuauuaugaagaaucaucugcgcgacaucauguguaucccuuauugcaacuacucuaaguauugguaccucaaucacacagucaccggcaaaacaucccugcccagauguuggcuggugagcaacgggucuuaccucaaugaaacccacuucagcgacgauauugagcagcaggccgacaacaugaucacggagcugcuucaaaaggaauauauugaucggcagggaaaaacaccucugggccucguggaccuguuugucuucuccaccucuuuuuaccugaucagcauuuuccuucaccucguuaagaucccgacccaucgccacgugauugggaaacccugcccuaagccccauagacugaaucacaugggaaucuguuccugcggccuguauaaacacccuggcgugcccgucaaguggaagcggugaggacuagucccuguucccagagcccacuuuuuuuucuuuuuuugaaauaaaauagccugucuuucagaucuaaaaaaaaaaaaaaaaaaaaaaaaaaaaaaaaaaaaaaaaaaaaaaaaaaaaaaaaaaaaaaaaaaaaaaaaaaaaaaaaaaaaaaaaaaaaaaaaaaaa

SEQ ID NO: 35347 - RNA, 1721 nt, Artificial Sequence
  mRNA product Design a-1 (A100) comprising derived and/or modified sequence from LASV(LASV003-NIG-2008;Clade II)__AIT17580__GPCmut9 (opt5)
aggagagucccgcagucggcguccagcggcucugcuuguucgugugugugucguugcaggccuuauucaagcuuaccaugggccagaucauuaccuucuuucaagaggugccccacgucaucgaagagguuaugaacauugugcugaucgcccucagccugcuugcuauucugaaggggaucuacaauguggccacaugcggacucuucggccuggucuccuuucuucugcucugugggagaucuugcagcacgaccuauaaaggaguguacgaacugcagacacuggagcucgacauggcgucccugaacaugaccaugccucuuucuuguacaaagaauaacagccaucacuauaucaugguuggcaaugaaaccgggcuggagcucacacugaccaacacguccauuaucaaucauaaauucugcaaccuuucugaugcucacaagaaaaaucuguacgaccaugcccucaugagcauuaucuccaccuuucaccugagcauuccgaacuucaaucaguaugaggccaugucuugugauuuuaacggaggcaagaucuccgugcaguacaaucugagccacacauaugcugucgacgccgcuaaccauugcggcaccauugccaauggggugcuccaaacauucaugcggauggcguggggaggcucuuacaucgcccuggauuccggguguggaagcugggacugcaucaugaccucuuaccaguaucuuauuauccagaacacgacaugggaagaucacugucaguuuucccgccccagcccuauuggcuaccuggggcuccugucccaaagaacccgggacaucuauauuucucgcagacuucugggaacauucaccuggacccucagcgauuccgagagcaacgaaacacccggcggcuacugccugacgcgguggaugcugaucgaggcugagcucaaguguuuugggaauaccgccguugcuaaaugcaacgaaaagcaugacgaggaguucugcgauaugcugcgccuuuuugacuucaauaaacaggccaucagacggcugaaggcggaagcccagaugucuauucagcucaucaacaaagcugugaaugcccugauuaacgaucaacuuaucaugaagaaucaucugcgcgacauuauguguaucccuuauugcaacuacuccaaguauugguaccucaaucacacagucaccggaagaacaagccugccccgguguuggcuggugucuaacggcagcuaccucaaugaaacccacuucuccgacgauaucgagcagcaggcugacaacaugauuacggagcugcuucaaaaagaauauauggaucgccaggggaagacaccucugggacucguggaccuguuugucuucucuaccagcuuuuaccugaucuccauuuuccuucaccucguuaaaaucccgacccauagacacgugauuggcaagcccugcccuaaaccccaucggcugaaucacauggggaucuguagcugcggacuguauaagcacccuggcgugcccgucaaauggaagcgcugaggacuagucccuguucccagagcccacuuuuuuuucuuuuuuugaaauaaaauagccugucuuucagaucuaaaaaaaaaaaaaaaaaaaaaaaaaaaaaaaaaaaaaaaaaaaaaaaaaaaaaaaaaaaaaaaaaaaaaaaaaaaaaaaaaaaaaaaaaaaaaaaaaaaa

SEQ ID NO: 35348 - RNA, 1721 nt, Artificial Sequence
  mRNA product Design a-1 (A100) comprising derived and/or modified sequence from LASV(LASV035-NIG-2009;Clade II)__AIT17588__GPCmut9 (opt5)
aggagagucccgcagucggcguccagcggcucugcuuguucgugugugugucguugcaggccuuauucaagcuuaccaugggccagaucauuaccuucuuucaagaggugccccacgucaucgaagagguuaugaacauugugcugaucgcccucagccugcuugcuauucugaaggggaucuacaauguggccacaugcggacucuucggccuggucuccuuucuucugcucugugggagaucuugcagcacgaccuauaaaggaguguacgaacugcagacacuggagcucgacauggcgucccugaacaugaccaugccucuuucuuguacaaagaauaacagccaucacuauaucaugguuggcaaugaaaccgggcuggagcucacacugaccaacacguccauuaucaaucauaaauucugcaaccuuucugaugcucacaagaaaaaucuguacgaccaugcccucaugagcauuaucuccaccuuucaccugagcauuccgaacuucaaucaguaugaggccaugucuugugauuuuaacggaggcaagaucuccgugcaguacaaucugagccacgcuuaugccgucgacgcugccaaccauugcggcacaauugcgaauggggugcuccaaaccuucaugcggauggccuggggaggcucuuacaucgcucuggauuccggguguggaagcugggacugcaucaugacaucuuaccaguaucuuauuauccagaacaccacgugggaagaucacugucaguuuucccgccccagcccuauuggcuaccuggggcuccugucccaaagaacacgggacaucuauauuucucgcagacuucugggaaccuucacauggacccucagcgauuccgagggcaacgaaacccccggcggguacugccugacacgguggaugcugaucgaggccgagcucaaguguuuuggaaauacggcuguugccaaaugcaacgaaaagcaugacgaggaguucugcgauaugcugcgccuuuuugacuucaauaaacaggcgaucagacggcugaaggccgaagcucagaugagcauucagcucaucaacaaagccgugaaugcucugauuaacgaucaacuuaucaugaagaaucaucugcgcgacauuauguguaucccuuauugcaacuacucuaaguauugguaccucaaucacaccgucacaggcaaaaccucccugcccagauguuggcuggugagcaacgggucuuaccucaaugaaacacacuucagcgacgauaucgagcagcaggccgacaacaugauuaccgagcugcuucaaaaggaauauaucgaucggcagggaaaaacgccucugggccucguggaccuguuugucuucuccacaucuuuuuaccugauuagcaucuuccuucaccucguuaagauuccgacccaucgccacgugaucgggaaacccugcccuaagccccauagacugaaucacaugggaauuuguuccugcggccuguauaaacacccuggcgugcccgucaaguggaagcggugaggacuagucccuguucccagagcccacuuuuuuuucuuuuuuugaaauaaaauagccugucuuucagaucuaaaaaaaaaaaaaaaaaaaaaaaaaaaaaaaaaaaaaaaaaaaaaaaaaaaaaaaaaaaaaaaaaaaaaaaaaaaaaaaaaaaaaaaaaaaaaaaaaaaa

SEQ ID NO: 35349 - RNA, 1721 nt, Artificial Sequence
  mRNA product Design a-1 (A100) comprising derived and/or modified sequence from LASV(LASV1000-NIG-2009;Clade II)__AIT17782__GPCmut9 (opt5)
aggagagucccgcagucggcguccagcggcucugcuuguucgugugugugucguugcaggccuuauucaagcuuaccaugggccagaucauuaccuucuuucaagaggugccccacgucaucgaagagguuaugaacauugugcugaucgcccucagccugcuugcuauucugaaggggaucuacaauguggccacaugcggacucuucggccuggucuccuuucuucugcucugugggagaucuugcagcacgaccuauaaaggaguguacgaacugcagacacuggagcucgacauggcgucccugaacaugaccaugccucuuucuuguacaaagaauaacagccaucacuauaucaugguuggcaaugaaaccgggcuggagcucacacugaccaacacguccauuaucaaucauaaauucugcaaccuuucugaugcucacaagaaaaaucuguacgaccaugcccucaugagcauuaucuccaccuuucaccugagcauuccgaacuucaaucaguaugaggccaugucuugugauuuuaacggaggcaagaucuccgugcaguacaaucugagccacacauaugcugucgacgccgcuaaccauugcggcaccauugccaauggggugcuccaaacauucaugcggauggcguggggaggcucuuacaucgcccuggauuccggguguggaagcugggacugcaucaugaccucuuaccaguaucuuauuauccagaacacgacaugggaagaucacugucaguuuucccgccccagcccuauuggcuaccuggggcuccugucccaaagaacccgggacaucuauauuucucgcagacuucugggaacauucaccuggacccucagcgauuccgagggcaacgaaacacccggcggguacugccugacgcgguggaugcugaucgaggcugagcucaaguguuuuggaaauaccgccguugcuaaaugcaacgaaaagcaugacgaggaguucugcgauaugcugcgccuuuuugacuucaauaaacaggccaucaagagacugaaaacagaagcgcagaugagcauucagcucaucaacaaggccgugaaugcucugauuaacgaucaacuuaucaugaagaaucaucugcgggacauuauguguaucccuuauugcaacuacucuaaauauugguaccucaaucacaccgucacaggcaagaccucccugccccgcuguuggcuggugagcaacgggucuuaccucaaugaaacgcacuucagcgacgauaucgagcagcaggccgacaacaugauuacagagcugcuucaaaaagaauauaucgauagacagggaaagaccccucugggccucguggaccuguuugucuucuccaccucuuuuuaccugauuagcaucuuccuucaccucguuaaaauuccgacacaucggcacgugguggggaagcccugcccuaaaccccaucgccugaaucacaugggaaucuguuccugcggccuguauaagcacccuggcguccccgugaaguggaaaagaugaggacuagucccuguucccagagcccacuuuuuuuucuuuuuuugaaauaaaauagccugucuuucagaucuaaaaaaaaaaaaaaaaaaaaaaaaaaaaaaaaaaaaaaaaaaaaaaaaaaaaaaaaaaaaaaaaaaaaaaaaaaaaaaaaaaaaaaaaaaaaaaaaaaaa

SEQ ID NO: 35350 - RNA, 1721 nt, Artificial Sequence
  mRNA product Design a-1 (A100) comprising derived and/or modified sequence from LASV(LASV221-NIG-2010;Clade II)__AIT17624__GPCmut9 (opt5)
aggagagucccgcagucggcguccagcggcucugcuuguucgugugugugucguugcaggccuuauucaagcuuaccaugggccagaucauuaccuucuuucaagaggugccccacgucaucgaagagguuaugaacauugugcugaucgcccucagccugcuugcuauucugaaggggaucuacaauguggccacaugcggacucuucggccuggucuccuuucuucugcucugugggagaucuugcagcacgaccuauaaaggaguguacgaacugcagacacuggagcucgacauggcgucccugaacaugaccaugccucuuucuuguacaaagaauaacagccaucacuauaucaugguuggcaaugaaaccgggcuggagcucacacugaccaacacguccauuaucaaucauaaauucugcaaccuuucugaugcucacaagaaaaaucuguacgaccaugcccucaugagcauuaucuccaccuuucaccugagcauuccgaacuucaaucaguaugaggccaugucuugugauuuuaacggaggcaagaucuccgugcaguacaaucugagccacacauaugcuauugacgccgcuaaccauugcggcaccaucgccaaugggguccuccaaacauucaugcggauggcguggggaggcucuuacaucgcccuggauuccggguguggaagcugggacugcauuaugaccucuuaccaguaucuuaucauucagaacacgacaugggaagaucacugucaguuuucccgccccagcccuaucggcuaccuggggcuccugucccaaagaacccgggacauuuauaucucucgcagacuucugggaacauucaccuggacccucagcgauuccgagggcaacgaaacacccggcggguacugccugacgcgguggaugcugaucgaggcugagcucaaguguuuuggaaauaccgccguggcuaaaugcaacgaaaagcaugacgaggaguucugcgauaugcugcgccuuuuugacuucaauaaacaggccauuagacggcugaagacagaagcgcagaugagcauccagcucauuaacaaagccguuaaugcucugaucaacgaucaacuuauuaugaagaaucaucugcgcgacaucauguguaucccuuauugcaacuacucuaaguauugguaccucaaucacaccgugacaggcaaaaccucccugcccagauguuggcuggucagcaacgggucuuaccucaaugaaacgcacuucagcgacgauauugagcagcaggccgacaacaugaucacagagaugcugcaaaaggaauauauggaucggcagggaaaaaccccucuuggccugguggaccucuuuguguucuccaccucuuuuuaccugauuagcaucuuccugcaccuugucaagauuccgacacaucgccacguuaucgggaaacccugcccuaagccccauagacucaaucacaugggaauuuguuccugcggccuguauaaacacccuggcgugcccgugaaguggaagcggugaggacuagucccuguucccagagcccacuuuuuuuucuuuuuuugaaauaaaauagccugucuuucagaucuaaaaaaaaaaaaaaaaaaaaaaaaaaaaaaaaaaaaaaaaaaaaaaaaaaaaaaaaaaaaaaaaaaaaaaaaaaaaaaaaaaaaaaaaaaaaaaaaaaaa

SEQ ID NO: 35351 - RNA, 1721 nt, Artificial Sequence
  mRNA product Design a-1 (A100) comprising derived and/or modified sequence from LASV(LASV237-NIG-2010;Clade II)__AIT17638__GPCmut9 (opt5)
aggagagucccgcagucggcguccagcggcucugcuuguucgugugugugucguugcaggccuuauucaagcuuaccaugggccagaucauuaccuucuuucaagaggugccccacgucaucgaagagguuaugaacauugugcugaucgcccucagccugcuugcuauucugaaggggaucuacaauguggccacaugcggacucuucggccuggucuccuuucuucugcucugugggagaucuugcagcacgaccuauaaaggaguguacgaacugcagacacuggagcucgacauggcgucccugaacaugaccaugccucuuucuuguacaaagaauaacagccaucacuauaucaugguuggcaaugaaaccgggcuggagcucacacugaccaacacguccauuaucaaucauaaauucugcaaccuuucugaugcucacaagaaagaccuguacgaucaugcccucaugagcauuaucuccaccuuucaccugagcauuccgaauuucaaccaguaugaggccaugucuugugacuuuaauggaggcaagaucuccgugcaguacaaccugagccacacauaugcugucgaugccgcuaaucauugcggcaccauugccaacggggugcuccaaacauucaugcggauggcguggggaggcucuuacaucgcccuggacuccggguguggaagcugggauugcaucaugaccucuuaccaguaucuuauuauccagaauacgacaugggaagaccacugucaguuuucccgccccagcccuauuggcuaccuggggcuccugucccaaagaacccgggauaucuauauuucucgcagacuucugggaacauucaccuggacccucagcgacuccgagggcaacgaaacacccggcggguacugccugacgcgguggaugcugaucgaggcugagcucaaguguuuuggaaacaccgccguugcuaaaugcaaugaaaagcaugaugaggaguucugcgacaugcugcgccuuuuugauuucaacaaacaggccaucagacggcugaagacagaagcgcagaugagcauucagcucaucaauaaagccgugaacgcucugauuaaugaccaacuuaucaugaagaaccaucugcgcgacauuauguguaucccuuauugcaauuacucuaaguauugguaccucaaccacaccgucacaggcaaaaccucccugcccagauguuggcuggugagcaaugggucuuaccucaacgaaacgcacuucagcgaugacaucgagcagcaggccgauaauaugauuacagagcugcuucaaaaggaauauauggaccggcagggaaaaaccccucugggccucguggaucuguuugucuucuccaccucuuuuuaccugaucagcauuuuccuucaccucaucaagauuccgacacaucgccacaucaccgggaaacccugcccuaagccccauagacugaaccacaugggaauuuguuccugcggccuguauaaacacccuggcguucccgugaaguggaagcggugaggacuagucccuguucccagagcccacuuuuuuuucuuuuuuugaaauaaaauagccugucuuucagaucuaaaaaaaaaaaaaaaaaaaaaaaaaaaaaaaaaaaaaaaaaaaaaaaaaaaaaaaaaaaaaaaaaaaaaaaaaaaaaaaaaaaaaaaaaaaaaaaaaaaa

SEQ ID NO: 35352 - RNA, 1721 nt, Artificial Sequence
  mRNA product Design a-1 (A100) comprising derived and/or modified sequence from LASV(LASV253-NIG-2011;Clade II)__AIT17670__GPCmut9 (opt5)
aggagagucccgcagucggcguccagcggcucugcuuguucgugugugugucguugcaggccuuauucaagcuuaccaugggccagaucauuaccuucuuucaagaggugccccacgucaucgaagagguuaugaacauugugcugaucgcccucagccugcuugcuauucugaaggggaucuacaauguggccacaugcggacucuucggccuggucuccuuucuucugcucugugggagaucuugcagcacgaccuauaaaggaguguacgaacugcagacacuggagcucgacauggcgucccugaacaugaccaugccucuuucuuguacaaagaauaacagccaucacuauaucaugguuggcaaugaaaccgggcuggagcucacacugaccaacacguccauuaucaaucauaaauucugcaaccuuucugaugcucacaagaaaaaucuguacgaccaugcccucaugagcauuaucuccaccuuucaccugagcauuccgaacuucaaucaguaugaggccaugucuugugauuuuaacggaggcaagaucuccgugcaguacaaucugagccacacauaugcugucgacgccgcuaaccauugcggcaccauugccaauggggugcuccaaacauucaugcggauggcguggggaggcucuuacaucgcccuggauuccggguguggaagcugggacugcaucaugaccucuuaccaguaucuuauuauccagaacacgacaugggaagaucacugucaguuuucccgccccagcccuauuggcuaccuggggcuccugucccaaagaacccgggacaucuauauuucucgcagacuucugggaacauucaccuggacccucagcgauuccgagggcaacgaaacacccggcggguacugccugacgcgguggaugcugaucgaggcugagcucaaguguuuuggaaauaccgccguugcuaaaugcaacgaaaagcaugacgaggaguucugcgauaugcugcgccuuuuugacuucaauaaacaggccaucagacggcugaaggcggaagcccagaugagcauucagcucaucaacaaagcugugaaugcccugauuaacgaucaacuuaucaugaagaaucaucugcgcgacauuauguguaucccuuauugcaacuacucuaaguauugguaccucaaucacacagucaccggcagaacaucccugccccgguguuggcuggugagcaacgggucuuaccucaaugaaacccacuucagcgacgauaucgagcagcaggcugacaacaugauuacggagcugcuucaaaaagaauauaucgaucgccagggaaagacaccucugggccucguggaccuguuugucuucuccaccucuuuuuaccugauuagcaucuuccuucaccucguuaaaauuccgacccauagacacaucauugggaagcccugcccuaaaccccaucggcugaaucacaugggaaucuguuccugcggccuguauaagcacccuggcgugcccgugaaauggaagcgcugaggacuagucccuguucccagagcccacuuuuuuuucuuuuuuugaaauaaaauagccugucuuucagaucuaaaaaaaaaaaaaaaaaaaaaaaaaaaaaaaaaaaaaaaaaaaaaaaaaaaaaaaaaaaaaaaaaaaaaaaaaaaaaaaaaaaaaaaaaaaaaaaaaaaa

SEQ ID NO: 35353 - RNA, 1721 nt, Artificial Sequence
  mRNA product Design a-1 (A100) comprising derived and/or modified sequence from LASV(LASV254-NIG-2011;Clade II)__AIT17674__GPCmut9 (opt5)
aggagagucccgcagucggcguccagcggcucugcuuguucgugugugugucguugcaggccuuauucaagcuuaccaugggccagaucauuaccuucuuucaagaggugccccacgucaucgaagagguuaugaacauugugcugaucgcccucagccugcuugcuauucugaaggggaucuacaauguggccacaugcggacucuucggccuggucuccuuucuucugcucugugggagaucuugcagcacgaccuauaaaggaguguacgaacugcagacacuggagcucgacaugaccaaccugaauaugacaaugccucuuuccuguaccaagaacaauucucaucacuauaucaugguuggcaacgaaacagggcuggagcucacccugacgaauaccagcauuaucaaccauaaauucugcaaucuuuccgaugcgcacaagaaaaaccuguacaaucaugcucucaugucuauuaucagcacauuucaccuguccauuccgaacuucaaucaguaugaggccaugagcugugacuuuaacggaggcaagaucucugugcaguacaaucugucccacagcuaugccgucgaugcugccaaccauugcggcaccauugcuaacggggugcuccaaacauucaugcggauggccuggggaggcucuuacaucgcgcuggacuccggguguggaaauugggauugcaucaugaccagcuaccaguaucuuauuauccagaacacgacaugggaagaccacugucaguuuucucgccccuccccuauuggcuaccuggggcuccugagccaaagaacccgggauaucuauauuucccgcagacuucugggaacauucaccuggacccucucugacagcgagggcaaugaaacacccggcggguacugccugacgcgguggaugcugaucgaggccgagcucaaguguuuuggaaacaccgcuguugccaaaugcaaugaaaagcaugaugaggaguucugcgacaugcugcgccuuuuugauuucaacaaacaggcuaucagacggcugaagacagaagcccaggcgaauauucagcucaucaacaaagccgugaaugcucugauuaacgaccaacuuaucaugaagaaucaucugcgcgauauuauguguaucccuuauugcaacuacuccaaguauugguaccucaaucacaccgucacaggcaaaaccagccugcccagauguuggcuggugucuaacggguccuaccucaaugaaacgcacuucagcgacgacaucgagcagcaggccgauaacaugauuacagagcugcuucaaaaggaauauauggaccggcagggaaaaaccccucugggccucguggaucuguuugucuucucuaccagcuuuuaccugaucuccauuuuccuucaccucguuaagaucccgacacaucgccacgugauugggaaacccugcccuaagccccauagacugaaccacaugggaaucuguucuugcggccuguauaaacacccuggcgugcccgucaaguggaagcggugaggacuagucccuguucccagagcccacuuuuuuuucuuuuuuugaaauaaaauagccugucuuucagaucuaaaaaaaaaaaaaaaaaaaaaaaaaaaaaaaaaaaaaaaaaaaaaaaaaaaaaaaaaaaaaaaaaaaaaaaaaaaaaaaaaaaaaaaaaaaaaaaaaaaa

SEQ ID NO: 35354 - RNA, 1721 nt, Artificial Sequence
  mRNA product Design a-1 (A100) comprising derived and/or modified sequence from LASV(Nig08-A19;Clade III)__ADU56618__GPCmut9 (opt5)
aggagagucccgcagucggcguccagcggcucugcuuguucgugugugugucguugcaggccuuauucaagcuuaccaugggccagaucgugaccuucuuucaagaggucccccacguuauugaagaggugaugaacaucgugcugauugcccucagcauccuggcuauucuuaaggggcuguacaauaucgccacaugcggacucaucggccuggucacguuccuucugcucuccgggagaucuuguagcaugaccuauaaaggaguguacgaacugcagacacuggagcucaacaugaauacccugaacaugacaaugccucuuuccugcaccaagaauaacucucaucacuauauuaugguuggcaaugaaacagggcuggagcucacccugacgaacaccagccuucugcaucacaaauuuuguaaucucuccgacgcgcauaagaaaaaccuguacgaucacacacugaugucuaucauuagcaccuuccaccucuccaucccgaauuuuaaccaguaugaggcuaugagcugcgacuucaauggaggcaagauuacagugcaguacaaccugucucauuccuaugccaucgaugccgcuaaucacuguggcaccgucgccaacggggugcuucaaacguuuaugcggauggcuuggggaggcagcuacauugcccuggacucugggugcggaaagugggauuguaucaugacauccuaccaguaucucaucauucagaacaccacaugggaagaccauugccaguucagccgccccucuccuaucggcuaccuggggcuucugucccaaagaacccgggauauuuauaucagccgcagacuccugggaaccuuuacauggacgcuguccgacucugagggcaaugaaacccccggcggguacugucucacacgguggaugcugauugaggcggagcuuaaaugcuucggaaacaccgccguugcuaaguguaaugaaaaacacgaugaggaauuuugcgacaugcugcgccucuucgauuuuaacaagcaggccaucagacggcugaaagcugaggcccagaugagcauccagcuuauuaauaaggcggugaacgcccugaucaaugaccaacucauuaugaagaaccaucugcgcgauaucaugugcauuccuuauuguaauuacuccaaauauugguaccugaaccacacaagcaccggcagaacgucucucccccggugcuggcuggucuccaaugggagcuaccuuaacgaaacacacuucucugacgacaucgagcagcaggcugauaauaugaucaccgagaugcugcaaaaggaauaucucgaccgccagggaaaaaccccucugggccugguggaucuuuucguguuuagcacauccuucuaccucauuucuaucuuucugcaucuggucaagauuccgacccacagacauaucguugggaaacccuguccuaagccccaccggcucaaccacaugggaauuugcagcuguggccuguauaaacagccuggcgugcccgugcgcuggaagagaugaggacuagucccuguucccagagcccacuuuuuuuucuuuuuuugaaauaaaauagccugucuuucagaucuaaaaaaaaaaaaaaaaaaaaaaaaaaaaaaaaaaaaaaaaaaaaaaaaaaaaaaaaaaaaaaaaaaaaaaaaaaaaaaaaaaaaaaaaaaaaaaaaaaaa

SEQ ID NO: 35355 - RNA, 1724 nt, Artificial Sequence
  mRNA product Design a-1 (A100) comprising derived and/or modified sequence from LASV(G1180-SLE-2010;Clade IV)__AIT17168__GPCmut9 (opt5)
aggagagucccgcagucggcguccagcggcucugcuuguucgugugugugucguugcaggccuuauucaagcuuaccaugggccagaucgugaccuucuuucaagaggucccccacguuauugaagaggugaugaacaucgugcugauugcccucagcauccuggcuguccuuaaggggcuguacaauuucgccacaugcggacucgugggccugcuuacguuucugcuccugugugggagauccugcaccgcgucucgguauaaaggaguuuacgaacugcagacacucgagcugaacauggaaacccuuaauaugacaaugccucugagcuguaccaagaacaauucccaucacuauauuauggugggcaacgagacagggcucgagcugacccuuacgaauaccucuaucaucaaccauaaauucugcaaucugagcgacgcucacaagaaaaaccucuacgaucaugcccugauguccauuaucucuacauuucaccugagcauuccgaauuucaaccaguaugaagccauguccugugacuuuaauggaggcaagaucagcguccaguacaaccucucucacuccuaugcuggcgaugccgcuaaucauugcgggaccguggccaacggaguucugcaaacauucaugcgcauggcguggggcgggagcuacauugcccuugacucuggauguggcuccugggauugcaucaugaccagcuaccaguaucugauuauccagaacacgacaugggaggaccacugucaguuuucuagacccuccccuaucggguaccucggacugcuuagccaacggacccgcgauauuuauaucuccagacggcugcucggcacauucaccuggacccugucugacagcgaaggcaaggauacacccgggggauacugccugacgcgcuggaugcucauugaggcugagcugaaauguuuuggcaauaccgccguggcuaagugcaacgaaaaacaugacgaggaguucugcgauaugcuuagacuguuugacuucaauaagcaggccauccagcggcucaaagcggaagcccagauguccauucaacugaucaacaaggcugucaaugcccuuaucaacgaucagcugauuaugaagaaucaccuccgcgacaucauguguauuccuuauugcaacuacagcaaauauugguaccugaaucacacaaccacagggaagaccucucugcccaaauguuggcucguguccaacggaagcuaccugaaugaaacgcauuucucugacgauaucgagcagcaagcugacaacaugauuacagagaugcuucagaaggaauauauggagagacagggcaaaaccccucuggggcucguggaucuguuugucuucagcaccuccuuuuaccugaucucuaucuuccuucaccucguuaagauuccgacacaucggcacaucgugggaaaaagcugccccaagccucaucgccugaaucacaugggcauuuguuccugcggccuguauaagcagcccggggugccugucaaauggaagagaugaggacuagucccuguucccagagcccacuuuuuuuucuuuuuuugaaauaaaauagccugucuuucagaucuaaaaaaaaaaaaaaaaaaaaaaaaaaaaaaaaaaaaaaaaaaaaaaaaaaaaaaaaaaaaaaaaaaaaaaaaaaaaaaaaaaaaaaaaaaaaaaaaaaaa

SEQ ID NO: 35356 - RNA, 1724 nt, Artificial Sequence
  mRNA product Design a-1 (A100) comprising derived and/or modified sequence from LASV(G1442-SLE-2011;Clade IV)__AIT17180__GPCmut9 (opt5)
aggagagucccgcagucggcguccagcggcucugcuuguucgugugugugucguugcaggccuuauucaagcuuaccaugggccagaucgugaccuucuuucaagaggucccccacguuauugaagaggugaugaacaucgugcugauugcccucagcauccuggcuguccuuaaggggcuguacaauguggccacaugcggacucauuggccugguuacguuccuucugcucugugggagauccugcaccacaacccuguauaaaggaguguacgaacugcagacacucgagcugaacauggaaacccuuaauaugacaaugccucugucuuguaccaagaacaauagccaucacuauauccgggucggcaacgagacggggcucgagcugacccuuacaaauaccuccaucauuaaccauaaauuuugcaaucugucugacgcgcacaagaaaaaccucuacgaucaugcucugaugagcaucauuuccacauuccaccugucuaucccgaauuuuaaccaguaugaagccaugagcugugacuucaauggaggcaagauuuccgugcaguacaaccucagccacucuuaugccggcgaugcugccaaucauugcgggaccguugcuaacggagugcugcaaacguuuaugcgcauggccuggggcggguccuacaucgcgcuugacagcggauguggcaacugggauugcauuaugacaucuuaccaguaucugaucauccagaauaccacaugggacgaucacugucaguucuccagacccagcccuauuggguaccucggacugcuuucucaacggacccgcgacgucuauaucuccagacggcugcucggcaccuuuacauggacgcugagcgauuccgagggcaaggacacccccgggggauacugccugacacgcuggaugcucauugaagccgagcugaaauguuucggcaacaccgcuguggccaagugcaaugagaaacaugaugaagaguuuugcgacaugcuuagacuguucgauuuuaacaagcaggcuauccagcggcucaaagccgaagcgcagaugucuauucaacugaucaauaaggccgugaacgcucuuaucaaugaccagcugauuaugaagaaccaccuccgcgacaucauguguauuccuuauugcaauuacagcaaauauugguaccugaacaauacagccaccgggaagacgucccugcccaaauguuggcucaucagcaacggaucuuaccugaaugagacacacuucuccgaugacauugaacaggaggcugauaacaugaucaccgagaugcuucaaaaggaauauauggagagacagggcaaaaccccucuggggcucgucgaccuguucguuuuuagcacaucuuucuaccugaucagcauuuuucuucaucucgugaagaucccgacccaccggcauauugugggaaaauccugccccaagccucaccgccugaaucauaugggcaucuguucuugcggccuguauaagcagcccggggucccugugagauggaaacggugaggacuagucccuguucccagagcccacuuuuuuuucuuuuuuugaaauaaaauagccugucuuucagaucuaaaaaaaaaaaaaaaaaaaaaaaaaaaaaaaaaaaaaaaaaaaaaaaaaaaaaaaaaaaaaaaaaaaaaaaaaaaaaaaaaaaaaaaaaaaaaaaaaaaa

SEQ ID NO: 35357 - RNA, 1724 nt, Artificial Sequence
  mRNA product Design a-1 (A100) comprising derived and/or modified sequence from LASV(G3010-SLE-2013;Clade IV)__AIT17344__GPCmut9 (opt5)
aggagagucccgcagucggcguccagcggcucugcuuguucgugugugugucguugcaggccuuauucaagcuuaccaugggccagaucgugaccuucuuucaagaggucccccacguuauugaagaggugaugaacaucgugcugauugcccucagcauccuggcuguccuuaaggggcuguacaauuucgccacaugcggacucgugggccugguuacguuucuucugcucugugggagauccugcaccacaucucuguauaaaggaguguacgaacugcagacccucgagcugaacauggaaacacuuaauaugaccaugccucugagcuguacaaagaacaauucccaucacuauauuauggucggcaacgagaccgggcucgagcugacgcuuaccaauacaucuaucaucaaccauaaauucugcaaucugagcgacgcgcacaagaaaaaccucuacaaucaugcucugauguccauuaucucuaccuuucaccugagcauuccgaacuucaaucaguaugaagccauguccugugauuuuaacggaggcaagaucagcgugcaguacaaucucucucacuccuaugccggcgacgcugccagccauugcgggacaguugcuaacggagugcugcaaaccuucaugcggauggccuggggcgggucuuacauugcgcuugauuccggauguggcaagugggacugcaucaugacgagcuaccaguaucugauuauccagaacacaaccugggaggaucacugucaguuuucucgccccuccccuaucggguaccucggacugcuuagccaaagaacacgggacauuuauaucucccgcagacugcucggcaccuucaccuggacacugucugauagcgaaggcaaagacacgcccgggggauacugccugacccgguggaugcucauugaggccgagcugaaguguuuuggcaauacagcugucgccaaaugcaacgaaaagcaugaugaggaguucugcgacaugcuucgccuguuugauuucaauaaacaggcuauccagagacucaagaccgaagcccagauguccauucaacugaucaacaaggcggugaaugcccuuaucaacgaccagcugauuaugaaaaaucaccuccgggauaucauguguauuccuuauugcaacuacagcaaguauugguaccugaaucacacaaccacggggaaaacaucucugcccaaguguuggcucguguccaacggaagcuaccugaaugaaacccauuucucugacgacaucgagcagcaagcugauaacaugauuaccgagaugcuucagaaagaauauauggagcgccagggcaagacaccucuggggcucgucgaccuguuuguuuucagcaccuccuuuuaccugaucucuaucuuccuucaccucgugaaaauuccgacacauagacacaucgugggaaagagcugccccaagccucaucggcugaaucacaugggcauuuguuccugcggccuguauaaacagcccggggucccugugcgcuggaagagaugaggacuagucccuguucccagagcccacuuuuuuuucuuuuuuugaaauaaaauagccugucuuucagaucuaaaaaaaaaaaaaaaaaaaaaaaaaaaaaaaaaaaaaaaaaaaaaaaaaaaaaaaaaaaaaaaaaaaaaaaaaaaaaaaaaaaaaaaaaaaaaaaaaaaa

SEQ ID NO: 35358 - RNA, 1724 nt, Artificial Sequence
  mRNA product Design a-1 (A100) comprising derived and/or modified sequence from LASV(G502-SLE-2009;Clade IV)__AIT17126__GPCmut9 (opt5)
aggagagucccgcagucggcguccagcggcucugcuuguucgugugugugucguugcaggccuuauucaagcuuaccaugggccagaucgugaccuucuuucaagaggucccccacguuauugaagaggugaugaacaucgugcugauugcccucagcauccuggcuguccuuaaggggcuguacaauuucgccacaugcggacucgugggccugcuuacguuucugcuccugugugggagauccugcaccacaggacuguauaaaggcguuuacgaacuccagacccuggagcuuaacauggaaacacugaauaugaccaugccucucucuuguacaaagaacaauagccaucacuauauuaugguggggaacgagaccggacuggagcuuacgcugaccaauacauccaucaucaaccauaaauucugcaaucucucugacgcgcacaagaaaaaccuguacgaucaugcucugaugagcauuaucuccaccuuucaccucucuauuccgaauuucaaccaguaugaagccaugagcugugacuuuaauggcggcaagaucuccguccaguacaaccugagccacucuuaugccggggaugcugccgaccauugcggaacaguggcuaauggcguucuucaaaccuucaugcggauggccuggggaggguccuacauugcgcuggauagcggcugugggcgcugggacugcaucaugacgucuuaccaguaucucauuauccagaacacaaccugggaggaucacugucaguuuuccagacccagcccuaucggauaccugggccuucugucucaacggacacgcgacauuuauaucuccagacggcuccugggcaccuucaccuggacacugagcgauuccgaagggaaggacacgcccggaggcuacugccucacccgcuggaugcugauugaggccgagcuuaaauguuuugggaacacagcuguggccaagugcaaugaaaaacaugaugaggaguucugcgacaugcugagacucuuugauuucaacaagcaggcuauccagcggcugaaagccgaagcgcagaugucuauucaacuuaucaauaaggccgucaacgcucugaucaaugaccagcucgugaugaagaaccaucugcgcgacauuauguguaucccuuauugcaauuacagcagauauugguaccugaaccacaccacaaccggacggacgucccuccccaaauguuggcuggugagcaauggcucuuaccuuaacgaaacacacuucuccgaugacauugagcagcaagccgauaauaugaucaccgagaugcugcagaaggaauauauggagcgccaggggaaaaccccucucggacuggucgaccuguuuguuuucagcacaucuuuuuaccuuauuagcaucuuccuccaccuggugaagaucccgacccauagacacauugugggcaaauccugccccaagccucaucggcugaaccacaugggcaucuguucuugcgggcucuauaaacagcccggagucccugugaaguggaagcgcugaggacuagucccuguucccagagcccacuuuuuuuucuuuuuuugaaauaaaauagccugucuuucagaucuaaaaaaaaaaaaaaaaaaaaaaaaaaaaaaaaaaaaaaaaaaaaaaaaaaaaaaaaaaaaaaaaaaaaaaaaaaaaaaaaaaaaaaaaaaaaaaaaaaaa

SEQ ID NO: 35359 - RNA, 1724 nt, Artificial Sequence
  mRNA product Design a-1 (A100) comprising derived and/or modified sequence from LASV(G733-SLE-2010;Clade IV)__AIT17154__GPCmut9 (opt5)
aggagagucccgcagucggcguccagcggcucugcuuguucgugugugugucguugcaggccuuauucaagcuuaccaugggccagaucgugaccuucuuucaagaggucccccacguuauugaagaggugaugaacaucgugcugauugcccucagcauccuggcuguccuuaaggggcuguacaauuucgccacaugcggaauugugggccucguuuccuuucugcuucugugugggagaucuugcacgaccagccucuauaaaggaguguacgaacugcagacacuggagcucaacauggaaacccugaauaugacaaugccucuuuccuguaccaagaacaauucucaucacuauaucauggucggcaacgagacagggcuggagcucacccugacgaauaccagcaucauuaaccauaaauucugcaaucuuuccgacgcgcacaagaaaaaccuguacgaucaugcucucaugucuaucauuagcacauuucaccuguccaucccgaauuucaaccaguaugaagccaugagcugugacuuuaauggaggcaagauuucugugcaguacaaccugucccacagcuaugccggcgaugcugccaaucauugcgggaccaucgcuaacggaguucuccaaacauucaugcggauggccuggggcgggucuuacauugcgcuggacuccggaugugaucgcugggacugcaucaugaccagcuaccaguaucuuaucauucagaacacgacaugggaggaucacugucaguuuucuagacccuccccuaucggcuaccuggggcuccugagccaacggacccgcgacauuuauaucuccagacggcuucugggaacauucaccuggacccucucugauagcgaaggcaaggacacacccggcggguacugccugacgcgcuggaugcugauugaggccgagcucaaauguuuuggaaauaccgcuguggccaagugcaacgaaaaacaugaugaggaguucugcgacaugcugagacuuuuugauuucaauaagcaggcuauccagcggcugaaagccgaagcgcagauguccauccaacucauuaacaaggccgucaaugcucugaucaacgaccagcuuauuaugaagaaucaucugcgcgacaucauguguauuccuuauugcaacuacagcaaauauugguaccucaaucacacaaccacaggcaagaccucucugcccaaauguuggcugguguccaacgggagcuaccucaaugaaacgcacuucucugaugacaucgagcagcaagccgauaacaugaucacagagaugcugcagaaggaauauauggagagacagggaaaaaccccucuuggccugguggaccucuuugucuucagcaccuccuuuuaccugauuucuaucuuccugcaccuuguuaagauuccgacacaucggcacgugguggggaaaagcugccccaagccucaucgccucaaucacaugggaaucuguuccugcggccuguauggccagcccggggucccugugaaguggaaaagaugaggacuagucccuguucccagagcccacuuuuuuuucuuuuuuugaaauaaaauagccugucuuucagaucuaaaaaaaaaaaaaaaaaaaaaaaaaaaaaaaaaaaaaaaaaaaaaaaaaaaaaaaaaaaaaaaaaaaaaaaaaaaaaaaaaaaaaaaaaaaaaaaaaaaa

SEQ ID NO: 35360 - RNA, 1724 nt, Artificial Sequence
  mRNA product Design a-1 (A100) comprising derived and/or modified sequence from MOPV/LASV reassortant(IGS-1;Clade IV)__AFY05576__GPCmut9 (opt5)
aggagagucccgcagucggcguccagcggcucugcuuguucgugugugugucguugcaggccuuauucaagcuuaccaugggccagaucgugaccuucuuucaagaggucccccacguuauugaagaggugaugaacaucgugcugauugcccucagcguccuggcugugcuuaaggggcuguacaauuucgccacaugcggacucguuggccuggugacguuucuucugcucugugggagauccugcaccacaucucuguauaaaggagucuacgaacugcagacccucgagcugaacauggaaacacuuaauaugaccaugccucugagcuguacaaagaacaauucccaucacuauaucauggugggcaacgagaccgggcucgagcugacgcuuaccaauacaucuauuaucaaccauaaauucugcaaucugagcgacgcgcacaagaaaaaccucuacgaucaugcucugauguccaucauuucuaccuuucaccugagcaucccgaauuucaaccaguaugaagccauguccugugacuuuaauggaggcaagauuagcguucaguacaaccucucucacuccuaugccggcgaugcugccaaucauugcgggacaguggcuaacggaguccugcaaaccuucaugcggauggccuggggcgggagcuacaucgcgcuugacucuggauguggcaacugggauugcauuaugacguccuaccaguaucugaucauucagaauacaaccugggaggaccacugucaguuuagccgccccucuccuaucggguaccucggacugcuuucccaaagaacacgggauaucuauauuagccgcagacugcucggcaccuucaccuggacacuguccgacucugaaggcgaggauacgcccgggggauacugccugacccgguggaugcucaucgaggccgaacugaaguguuuuggcaacacagcuguggccaaaugcaaugagaagcaugacgaagaguucugcgauaugcuucgccuguuugacuucaacaaacaggcuauucagagacucaaggccgaagcgcagaugagcauccaacugauuaauaaagccgugaacgcucuuaucaaugaucagcugaucaugaagaaccaccuccgggacauuauguguaucccuuauugcaauuacuccaaguauugguaccugaaccacaccacaaccgggcgcacgagccugcccaaauguuggcucgucucuaauggauccuaccugaacgagacacauuucagcgacgauauugagcagcaagccgacaauaugaucaccgaaaugcuucagaaggaguauauggaaagacagggcaaaaccccucuggggcucguugaucuguuuguguucucuaccagcuuuuaccugauuuccaucuuccuucaccucgugaagaucccgacacaucggcacauugucggaaaaucuugccccaagccucaucgccugaaccacaugggcaucuguagcugcggccuguauaaacagcccggggugccuguuaaguggaagagaugaggacuagucccuguucccagagcccacuuuuuuuucuuuuuuugaaauaaaauagccugucuuucagaucuaaaaaaaaaaaaaaaaaaaaaaaaaaaaaaaaaaaaaaaaaaaaaaaaaaaaaaaaaaaaaaaaaaaaaaaaaaaaaaaaaaaaaaaaaaaaaaaaaaaa

SEQ ID NO: 35361 - RNA, 1724 nt, Artificial Sequence
  mRNA product Design a-1 (A100) comprising derived and/or modified sequence from LASV(LM765-SLE-2012;Clade IV)__AIT17814__GPCmut9 (opt5)
aggagagucccgcagucggcguccagcggcucugcuuguucgugugugugucguugcaggccuuauucaagcuuaccaugggccagaucgugaccuucuuucaagaggucccccacguuauugaagaggugaugaacaucgugcugauugcccucagcauccuggcuguccuuaaggggcuguacaauuucgccacaugcggacucgugggccugguuacguuucuucugcucugugggagauccugcaccacaucucuguauaaaggaguguacgaacugcagacccucgagcugaacauggaaacacuuaauaugaccaugccucugagcuguacaaagaacaauucccaucacuauauuauggucggcaacgagaccgggcucgagcugacgcuuaccaauacaucuaucaucgaccauaaauucugcaaccugagcgaugcgcaccggaagaaucucuacgaccaugcucugauguccauuaucucuaccuuucaccugagcauuccgaacuucaaucaguaugaagccauguccugugauuuuaacggaggcaaaaucagcgugcaguacaaucucucucacuccuaugccaaggacgcugccgaucauugcggcacaguugcuaacggggugcugcaaaccuucaugcgcauggccuggggaggcagcuacauugcgcuugacucuggguguggaagaugggauugcaucaugacguccuaccaguaucugauuauccagaauacaaccugggaggaccacugucaguuuagccggcccucuccuaucggcuaccucgggcugcuuucccaacgcacaagagauauuuauaucagccggcgccugcucggaaccuucaccuggacacuguccgacucugaaggcaaggauacgcccggcggguacugccugaccagauggaugcucauugaggccgagcugaaauguuuuggaaacacagcugucgccaagugcaacgaaaaacaugacgaggaguucugcgauaugcuucggcuguuugacuucaauaagcaggcuauccagcgccucaaagccgaagcgcagaugagcauucaacugaucaacaaggccgugaaugcucuuaucaacgaccagcugauuaugaagaaucaccucagagauaucauguguauuccuuauugcaacuacuccaaauauugguaccugaaucacaccacaaccggcaagacgagccugcccaaauguuggcucgugucuaacggguccuaccugaaugaaacacauuucagcgacgauaucgagcagcaagccgacaacaugauuaccgagaugcuucagaaggaauauauggagcggcagggaaaaaccccucugggccucgucgaucuguuuguuuucucuaccagcuuuuaccugaucuccaucuuccuucaccucgugaagauuccgacacaucgccacaucguggggaaacccugcccuaagccccauagacugaaucacaugggaauuuguucuugcggccuguauaagcagccuggcguccccgugaaauggaagcggugaggacuagucccuguucccagagcccacuuuuuuuucuuuuuuugaaauaaaauagccugucuuucagaucuaaaaaaaaaaaaaaaaaaaaaaaaaaaaaaaaaaaaaaaaaaaaaaaaaaaaaaaaaaaaaaaaaaaaaaaaaaaaaaaaaaaaaaaaaaaaaaaaaaaa

SEQ ID NO: 35362 - RNA, 1724 nt, Artificial Sequence
  mRNA product Design a-1 (A100) comprising derived and/or modified sequence from LASV(LM776-SLE-2012;Clade IV)__AIT17824__GPCmut9 (opt5)
aggagagucccgcagucggcguccagcggcucugcuuguucgugugugugucguugcaggccuuauucaagcuuaccaugggccagaucgugaccuucuuucaagaggucccccacguuauugaagaggugaugaacaucgugcugauugcccucagcauccuggcuguccuuaaggggcuguacaauuucgccacaugcggacucgugggccugguuacguuucuucugcucugugggagauccugcaccacaucuguguauaaaggagucuacgaacugcagacccuggagcucaacauggaaacacugaauaugaccaugccucuuagcuguacaaagaacaauucccaucacuauauuauggugggcaacgagaccgggcuggagcucacgcugaccaauacaucuaucaucaaccauaaauucugcaaucuuagcgacgcgcacaagaaaaaccuguacgaucaugcucucauguccauuaucucuaccuuucaccugagcauuccgaauuucaaccaguaugaagccauguccugugacuuuaauggaggcaagaucagcguucaguacaaccugucucacuccuaugccggcgaugcugccaaucauugcgggacaguggcuaacggaguccuccaaaccuucaugcggauggccuggggcgggagcuacauugcgcuggacucuggauguggcaagugggauugcaucaugacguccuaccaguaucuuauuauccagaacacaaccugggaggaccacugucaguuuagccgccccucuccuaucggguaccugggacuccugucccaaagaacacgggauauuuauaucagccgcagacuucugggcaccuucaccuggacacucuccgacucugaaggcaaagauacgcccgggggauacugccugacccgguggaugcugauugaggccgagcucaaguguuuuggcaauacagcuguggccaaaugcaacgaaaagcaugacgaggaguucugcgauaugcugcgccuuuuugacuucaauaaacaggcuauccagagacugaaggccgaagcgcagaugagcauucaacucaucaacaaggccgugaaugcucugaucaacgaucagcuuauuaugaaaaaucaucugcgggacaucauguguauuccuuauugcaacuacuccaaguauugguaccucaaucacaccacaaccgggaaaacgagccugcccaaguguuggcuggucucuaacggauccuaccucaaugaaacacacuucagcgacgauaucgagcagcaagccgacaacaugauuaccgagaugcugcagaaagaauauauggagcgccagggcaagaccccucuugggcugguugaucucuuuguguucucuaccagcuuuuaccugaucuccaucuuccugcaccuugugaaaauuccgacacauagacacaucgucggaaagucuugccccaagccucaucggcucaaucacaugggcauuuguagcugcggccuguauaaacagcccggggugccuguucgcuggaagagaugaggacuagucccuguucccagagcccacuuuuuuuucuuuuuuugaaauaaaauagccugucuuucagaucuaaaaaaaaaaaaaaaaaaaaaaaaaaaaaaaaaaaaaaaaaaaaaaaaaaaaaaaaaaaaaaaaaaaaaaaaaaaaaaaaaaaaaaaaaaaaaaaaaaaa

SEQ ID NO: 35363 - RNA, 1724 nt, Artificial Sequence
  mRNA product Design a-1 (A100) comprising derived and/or modified sequence from LASV(Mad39;Clade IV)__ANH09722__GPCmut9 (opt5)
aggagagucccgcagucggcguccagcggcucugcuuguucgugugugugucguugcaggccuuauucaagcuuaccaugggccagaucgugaccuucuuucaagaggucccccacguuauugaagaggugaugaacaucgugcugauugcccucagcauccuggcuguccuuaaggggcuguacaauguggccacaugcggacucauuggccugguuacguuccuucugcucugugggagauccugcaccacaacccuguauaaaggaguguacgaacugcaggcgcucgagcugaacauggaaacacuuaauaugaccaugccucugucuuguacaaagaacaauagccaucacuauauccgggucggcaacgagaccgggcucgagcugacgcuuaccaauacaucccugaucaaccauaaauuuugcaaucucucugacgcucacaagaaaaaccuguacgaucaugcccugaugagcauuaucuccaccuuccaccucucuauuccgaauuuuaaccaguaugaagccaugagcugugacuucaaugauggaaagaucuccgugcaguacaaccugagccacacauaugcuggcgacaccgccaaucauugcggcacgguugcuaacggggugcuucaaacauuuaugcgcauggccuggggaggcucuuacauugcgcuggauuccggguguggaggcugggacugcaucaugaccagcuaccaguaucucauuauccagaacacaaccugggaggaucacugucaguucucuagacccuccccuaucggguaccugggacuucugagccaacggacccgcgacauuuauaucucuagacggcuccugggcacauuuacguggacccuguccgauagcgaaggcaaggacacacccgggggauacugccucacccgcuggaugcugauugaggccgagcuuaaauguuucggcaauacagcugucgccaagugcaacgaaaaacaugaugaggaauuuugcgacaugcugagacucuucgauuuuaauaagcaggcuauccagcggcugaaagccgaggcgcagauguccauucaacuuaucaacaaggccgugaaugcucugaucaacgaccagcucauuaugaagaaucaucugcgcgacaucauguguauuccuuauugcaacuacucuaaauauugguaccugaaucacaccgugacggggaagacaagccuccccaaauguuggcuggucuccaacggaagcuaccuuaaugaaacccacuucucugaugacaucgagcagcaagccgauaacaugauuaccgagaugcugcagaaggaauauauggagagacagggcaaaacaccucucgggcugguugaccuguucguguuuuccaccagcuucuaccuuaucucuaucuuucuccaccuggugaagauuccgacacaucggcacgucgugggaaaacccugcccuaagccccaucgccugaaucacaugggcaucuguagcugcggcuucuauaagcagccugggguucccgugagauggaaacggugaggacuagucccuguucccagagcccacuuuuuuuucuuuuuuugaaauaaaauagccugucuuucagaucuaaaaaaaaaaaaaaaaaaaaaaaaaaaaaaaaaaaaaaaaaaaaaaaaaaaaaaaaaaaaaaaaaaaaaaaaaaaaaaaaaaaaaaaaaaaaaaaaaaaa

SEQ ID NO: 35364 - RNA, 1724 nt, Artificial Sequence
  mRNA product Design a-1 (A100) comprising derived and/or modified sequence from LASV(Z0947-SLE-2011;Clade IV)__AIT17840__GPCmut9 (opt5)
aggagagucccgcagucggcguccagcggcucugcuuguucgugugugugucguugcaggccuuauucaagcuuaccaugggccagaucgugaccuucuuucaagaggucccccacguuauugaagaggugaugaacaucgugcugauugcccucagcauccuggcuguccuuaaggggcuguacaauuucgccacaugcggacucgugggccugguuacguuucuucugcucugugggagauccugcaccauuucucuguauaaaggaguguacgaacugcagacacucgagcugaacauggaaacccuuaauaugacaaugccucugagcuguaccaagaacaauucccaucacuauaucauggucggcaacgagacagggcucgagcugacccuuacgaauaccucuaucauuaaccauaaauucugcaaucugagcgacgcgcacaagaaaaaccucuacgaucaugcucugauguccaucauuucuacauuucaccugagcaucccgaauuucaaccaguaugaagccauguccugugacuuuaauggaggcaagauuagcgugcaguacaaccucucucacuccuaugccggcgaugcugccaaucauugcgggaccguugcuaacggagugcugcaaacauucaugcggauggccuggggcgggagcuacaucgcgcuugacucuggaugugaucgcugggacugcauuaugaccuccuaccaguaucugaucauccagaacacgacaugggaggaucacugucaguuuagcagacccucuccuauuggcuaccucgggcugcuuucccaacggacccgcgacaucuauauuagcagacggcugcucggaacauucaccuggacccuguccgauucugaaggcaaggacacacccggcggguacugccugacgcgcuggaugcucaucgaggccgagcugaaauguuuuggaaauaccgcugucgccaagugcaacgaaaaacaugaugaggaguucugcgacaugcuuagacuguuugauuucaauaagcaggcuauucagcggcucaaagccgaagcgcagaugagcauccaacugaucaacaaggccgugaaugcucuuauuaacgaccagcugaucaugaagaaucaccuccgcgacauuauguguaucccuuauugcaacuacuccaaauauugguaccugaaucacacaaccacaggcaagaccagccugcccaaauguuggcucgugucuaacggguccuaccugaaugaaacgcauuucagcgaugacauugagcagcaagccgauaacaugaucacagagaugcuucagaaggaauauauggagagacagggaaaaaccccucugggccucgucgaccuguuuguuuucucuaccagcuuuuaccugaucuccauuuuccuucaccucgugaagaucccgacacaucggcacauuguggggaaacccugcccuaagccccaucgccugaaucacaugggaaucuguucuugcggccuguauaagcagccuggcguccccgugaaauggaagagaugaggacuagucccuguucccagagcccacuuuuuuuucuuuuuuugaaauaaaauagccugucuuucagaucuaaaaaaaaaaaaaaaaaaaaaaaaaaaaaaaaaaaaaaaaaaaaaaaaaaaaaaaaaaaaaaaaaaaaaaaaaaaaaaaaaaaaaaaaaaaaaaaaaaaa

SEQ ID NO: 35365 - RNA, 1736 nt, Artificial Sequence
  mRNA product Design a-2 (hSL-A64-N5) comprising derived and/or modified sequence from LASV(Josiah;Clade IV)__NP_694870__GPCmut9 (opt1)
aggagaguccgcucagccagguugcagaagcggcuuagcguguguccuaaucuucucucugcguguagguaggccugugccgcaaacaagcuuaccaugggccagaucgugaccuucuuccaggaggucccccacgugaucgaggaggugaugaacaucguccugaucgcccucagcgugcuggccgugcugaaggggcucuacaacuucgcgaccugcggccuggucgggcuggugacguuccuccugcugugcggccgcuccugcaccaccagccucuacaaggggguguacgagcugcagacccuggagcucaacauggagacgcugaacaugaccaugccgcuguccugcaccaagaacaacagccaccacuacaucauggucggcaacgagaccggccucgagcugacgcugaccaacaccuccaucaucaaccacaaguucugcaaccucagcgacgcccacaagaagaaccuguacgaccacgcccugauguccaucaucagcaccuuccaccucuccauccccaacuucaaccaguacgaggccaugagcugcgacuucaacgggggcaagaucuccgugcaguacaaccugagccacuccuacgccggggacgcggccaaccacugcggcacgguggccaacgggguccugcagaccuucaugcggauggccuggggcggcagcuacaucgcgcucgacuccgggugcggcaacugggacugcaucaugaccagcuaccaguaccugaucauccagaacaccacgugggaggaccacugccaguucucccggcccagccccaucggguaccugggccuccugucccagcgcacccgggacaucuacaucagccgccggcugcucggcaccuucaccuggacgcugagcgacuccgaggggaaggacaccccgggcggguacugccugacccgcuggaugcucaucgaggccgagcugaagugcuucggcaacaccgccguggccaagugcaacgagaagcacgacgaggaguucugcgacaugcugcggcuguucgacuucaacaagcaggccauccagcgccugaaggcggaggcccagaugagcauccagcugaucaacaaggccgugaacgcccucaucaacgaccagcugaucaugaagaaccaccuccgggacaucaugugcauccccuacugcaacuacuccaaguacugguaccucaaccacacgaccaccggccgcaccagccugcccaagugcuggcuggucuccaacggcagcuaccucaacgagacgcacuucuccgacgacaucgagcagcaggccgacaacaugaucaccgagaugcugcagaaggaguacauggagcggcaggggaagacgccccugggccucguggaccuguucguguucagcaccuccuucuaccugaucagcaucuuccugcaccucgucaagaucccgacccaccgccacaucguggggaaguccugccccaagccccaccggcugaaccacaugggcaucugcagcugcgggcuguacaagcagcccggcgugccggucaaguggaagcgcugaggacuagucccuguucccagagcccacuuuuuuuucuuuuuuugaaauaaaauagccugucuuucagaucucaaaggcucuuuucagagccaccaaaaaaaaaaaaaaaaaaaaaaaaaaaaaaaaaaaaaaaaaaaaaaaaaaaaaaaaaaaaaaaaagaauu

SEQ ID NO: 35366 - RNA, 1733 nt, Artificial Sequence
  mRNA product Design a-2 (hSL-A64-N5) comprising derived and/or modified sequence from LASV(LP;Clade I)__AAF86701__GPCmut9 (opt1)
aggagaguccgcucagccagguugcagaagcggcuuagcguguguccuaaucuucucucugcguguagguaggccugugccgcaaacaagcuuaccaugggccagaucaucaccuucuuccaggaggugccccacgucaucgaggaggugaugaacaucgugcugaucgcccucagccugcuggccauccucaaggggcuguacaacaucgcgaccugcggcaucaucgggcuggucgccuuccucuuccugugcggcaaguccugcagccugacgcucaagggcggguacgagcugcagacccuggagcucaacauggagacccugaacaugaccaugccgcuguccugcacgaagaacagcucccaccacuacauccgcgugggcaacgagaccgggcucgagcugacccugaccaacacgagcaucaucaaccacaaguucugcaaccucuccgacgcccacaagaagaaccuguacgaccacgcccugaugagcaucaucuccaccuuccaccucagcauccccaacuucaaccaguacgaggccauguccugcgacuucaacggcgggaagaucagcgugcaguacaaccugucccacagcuacgcgggcgacgccgccgagcacugcgggaccgucgccaacggcgugcugcagaccuucaugcggauggcguggggcgggcgcuacaucgcccucgacuccggcugcgggaacugggacugcaucaugacgagcuaccaguaccugaucauccagaacaccaccugggaggaccacugccaguucucccggcccagccccaucggcuaccugggccuccugucccagcgcacccgggacaucuacaucagccgccggcugcucgggacguucaccuggacccugagcgacuccgagggcaacgagacccccgggggcuacugccugacgcgcuggaugcucaucgaggccgagcugaagugcuucgggaacaccgccguggccaagugcaacgagaagcacgacgaggaguucugcgacaugcugcggcuguucgacuucaacaagcaggcgauccgccggcugaaggccgaggcccagaugagcauccagcugaucaacaaggccgucaacgcccucaucaacgaccagcugaucaugaagaaccaccuccgcgacaucaugugcauccccuacugcaacuacuccaaguacugguaccucaaccacaccagcuccggccggaccagccugcccaagugcuggcugaucuccaacgggagcuaccucaacgagacgcaguucuccgacgacaucgagcagcaggcggacaacaugaucaccgagaugcugcagaaggaguacaucgagcgccagggcaagaccccgcuggggcucguggacaucuucaucuucagcaccuccuucuaccugaucagcaucuuccugcaccugaucaagaucccgacgcaccggcacaucgugggcaagcccugccccaagccccaccgccucaaccacaugggggucugcuccugcggccuguacaagcacccgggcgugcccaccaaguggaagcggugaggacuagucccuguucccagagcccacuuuuuuuucuuuuuuugaaauaaaauagccugucuuucagaucucaaaggcucuuuucagagccaccaaaaaaaaaaaaaaaaaaaaaaaaaaaaaaaaaaaaaaaaaaaaaaaaaaaaaaaaaaaaaaaaagaauu

SEQ ID NO: 35367 - RNA, 1733 nt, Artificial Sequence
  mRNA product Design a-2 (hSL-A64-N5) comprising derived and/or modified sequence from LASV(803213;Clade II)__AAF86703__GPCmut9 (opt1)
aggagaguccgcucagccagguugcagaagcggcuuagcguguguccuaaucuucucucugcguguagguaggccugugccgcaaacaagcuuaccaugggccagaucaucaccuucuuccaggaggugccccacgucaucgaggaggugaugaacaucgugcugaucgcccucagccugcuggccauccucaaggggaucuacaacgucgcgaccugcggccuguucgggcugaucuccuuccuccugcugugcggccgcagcugcuccgugacguacaaggggguguacgagcuccagacccuggagcugaacauggccaaccucaacaugaccaugccgcugagcugcaccaagaacaacucccaccacuacaucauggucggcaacgagacgggccuggagcucacccugaccaacaccagcaucaucaaccacaaguucugcaaccuguccgacgcccacaagaagaaccucuacgaccacgcccugaugagcaucaucuccacguuccaccugagcauccccaacuucaaccaguacgaggccauguccugcgacuucaacgggggcaagaucagcgugcaguacaaccucucccacagcuucgcgguggacgccgccaaccacugcgggaccaucgccaacggcguccugcagaccuucaugcggauggcguggggcggguccuacaucgcccuggacagcggcugcgggaacugggacugcaucaugaccuccuaccaguaccucaucauccagaacacgaccugggaggaccacugccaguucagccgccccucccccaucggcuaccuggggcugcucagccagcggacccgcgacaucuacaucagccggcgccugcugggcaccuucacguggacccucuccgacagcgagggcaacgaggcccccgggggcuacugccugacccgguggaugcugaucgaggccgagcucaagugcuucgggaacaccgccguggcgaagugcaacgagaagcacgacgaggaguucugcgacaugcugcgccuguucgacuucaacaagcaggccaucaagcggcucaagacggaggcccagauguccauccagcugaucaacaaggccgugaacgcccugaucaacgaccagcucaucaugaagaaccaccuccgcgacaucaugugcauccccuacugcaacuacagccgguacugguaccugaaccacaccgucaccgggaagaccucccugccccgcugcuggcuggugagcaacggcuccuaccugaacgagacgcacuucagcgacgacaucgagcagcaggcggacaacaugaucaccgagaugcuccagaaggaguacauggaccggcagggcaagaccccgcuggggcugguggaccucuucgucuucuccaccagcuucuaccugaucuccaucuuccugcaccuggugaagaucccgacgcaccgccacaucgugggcaagcccugccccaagccccaccggcucaaccacauggggaucugcagcugcggccuguacaagcacccggggguccccgugaaguggaagcgcugaggacuagucccuguucccagagcccacuuuuuuuucuuuuuuugaaauaaaauagccugucuuucagaucucaaaggcucuuuucagagccaccaaaaaaaaaaaaaaaaaaaaaaaaaaaaaaaaaaaaaaaaaaaaaaaaaaaaaaaaaaaaaaaaagaauu

SEQ ID NO: 35368 - RNA, 1733 nt, Artificial Sequence
  mRNA product Design a-2 (hSL-A64-N5) comprising derived and/or modified sequence from LASV(GA391;Clade III)__CAA36645__GPCmut9 (opt1)
aggagaguccgcucagccagguugcagaagcggcuuagcguguguccuaaucuucucucugcguguagguaggccugugccgcaaacaagcuuaccaugggccagaucgugaccuucuuccaggaggucccccacgugaucgaggaggugaugaacaucguccugaucgcccucagcauccuggccauccugaaggggcucuacaacguggcgaccugcggccugaucgggcuggugacguuccuccugcuguccggccgcagcugcucccucaucuacaaggggaccuacgagcugcagacccuggagcucaacauggagacccugaacaugacgaugccgcugagcugcaccaagaacaacucccaccacuacauccgggucggcaacgagaccggccucgagcugacccugacgaacaccagcauccucaaccacaaguucugcaaccuguccgacgcccacaagcgcaaccuguacgaccacagccucauguccaucaucagcaccuuccaccuguccauccccaacuucaaccaguacgaggccaugagcugcgacuucaacgggggcaagaucaccgugcaguacaaccugucccacagcuucgccguggacgccgcggggcacugcggcacgcucgccaacgggguccugcagaccuucaugcggauggccuggggcggcuccuacaucgcccuggacagcgggugcggcaacugggacugcaucaugaccuccuaccaguaccucaucauccagaacaccacgugggacgaccacugccaguucagccggcccucccccaucggguaccugggccugcucagccagcgcacccgggacaucuacaucagccgccggcugcugggcaccuucaccuggacgcucuccgacagcgaggggaacgagaccccgggcggguacugccugacccgcuggaugcugaucgaggcggagcucaagugcuucggcaacaccgccguggccaagugcaacgagaagcacgacgaggaguucugcgacaugcugcggcuguucgacuucaacaagcaggccauccgccggcucaagacggaggcccagauguccauccagcugaucaacaaggcggugaacgcccugaucaacgaccagcucaucaugaagaaccaccuccgcgacaucaugugcauccccuacugcaacuacagccgguacugguaccugaaccacaccuccaccggcaagaccagccugccccgcugcuggcugaucuccaacggcagcuaccugaacgagacgaaguucuccgacgacaucgagcagcaggccgacaacaugaucaccgagaugcuccagaaggaguacaucgaccggcaggggaagacgccccugggccuggucgaccuguucguguucagcaccuccuucuaccucaucagcaucuuccugcaccuggugaagaucccgacccaccgccacaucgucgggaagcccugccccaagccccaccggcucaaccacaugggcaucugcuccugcgggcuguacaagcagccgggcgugcccgugcgcuggaagcggugaggacuagucccuguucccagagcccacuuuuuuuucuuuuuuugaaauaaaauagccugucuuucagaucucaaaggcucuuuucagagccaccaaaaaaaaaaaaaaaaaaaaaaaaaaaaaaaaaaaaaaaaaaaaaaaaaaaaaaaaaaaaaaaaagaauu

SEQ ID NO: 35369 - RNA, 1736 nt, Artificial Sequence
  mRNA product Design a-2 (hSL-A64-N5) comprising derived and/or modified sequence from LASV(AV;Clade V)__CCA30314__GPCmut9 (opt1)
aggagaguccgcucagccagguugcagaagcggcuuagcguguguccuaaucuucucucugcguguagguaggccugugccgcaaacaagcuuaccaugggccagaucgugaccuucuuccaggaggucccccacgugaucgaggaggugaugaacaucguccugaucgcccucagcauccuggccgugcugaaggggcucuacaacaucgcgaccugcggccugaucgggcugaucacguuccuccugcugugcggccgcuccugcagcuccaaccucuacaaggggguguacgagcugcagagccuggaccucaacauggagacccugaacaugaccaugccgcuguccugcaccaagaacaacagccaccacuacauccgggucggcaacgacacgggccucgagcugacccugaccaacaccuccauccucaaccacaaguucugcaaccugagcgacgcccacaagaaggaccuguacgaccacgcccucauguccaucaucagcacguuccaccuguccauccccaacuucaaccaguacgaggccaugagcugcgacuucaacgggggcaagaucuccgugcaguacaaccugagccacuccuacgccaucgacgcggccaaccacugcgggaccguggccaacggcauccuccagaccuucaugcgcauggccuggggcgggagcuacaucgcgcuggacuccggcugcgggaacugggacugcaucaugaccagcuaccaguaccugaucauccagaacacgaccugggagaaccacugccaguucucccgccccagccccaucggcuaccucgggcugcugagccagcggacccgcgacaucuacaucucccggcgccuccugggcaccuucacguggacccugagcgacuccgagggcaacgccacccccgggggcuacugccucacccgguggaugcugaucgaggccgagcugaagugcuucgggaacacggccgucgccaagugcaacgagaagcacgacgaggaguucugcgacaugcuccgccuguucgacuucaacaagcaggcgaucagccggcugaaguccgaggcccagaugagcauccagcucaucaacaaggccgugaacgcccugaucaacgaccagcugaucaugaagaaccaccuccgcgacaucaugugcauccccuacugcaacuacuccaaguacugguaccugaaccacaccaucaccgggaagaccagccugcccaagugcuggcucguguccaacggcagcuaccugaacgagacgcacuucuccgacgacaucgagcagcaggccgacaacaugaucaccgagaugcugcagaaggaguacauggagcggcagggcaagaccccgcucgggcuggucgaccuguucguguucagcaccuccuucuaccugaucagcaucuuccuccgccuggugaagaucccgacgcaccggcacaucgucggcaagcccugccccaagccccaccgccugaaccacauggggaucugcuccugcggccucuacaagcagccgggggugcccgugcgguggaagcgcugaggacuagucccuguucccagagcccacuuuuuuuucuuuuuuugaaauaaaauagccugucuuucagaucucaaaggcucuuuucagagccaccaaaaaaaaaaaaaaaaaaaaaaaaaaaaaaaaaaaaaaaaaaaaaaaaaaaaaaaaaaaaaaaaagaauu

SEQ ID NO: 35370 - RNA, 1733 nt, Artificial Sequence
  mRNA product Design a-2 (hSL-A64-N5) comprising derived and/or modified sequence from LASV(Togo/2016/7082;Clade VI)__AMR44577__GPCmut9 (opt1)
aggagaguccgcucagccagguugcagaagcggcuuagcguguguccuaaucuucucucugcguguagguaggccugugccgcaaacaagcuuaccaugggccagaucaucaccuucuuccaggaggugccccacgucaucgaggaggugaugaacaucgugcugaucgcccucagccugcuggccauccucaagggggucuacaacguggcgaccugcggcaucaucgggcuggugacguuccuguuccucugcggccgcuccugcagccugaucuacaagggguccuacgagcugcagacccucgagcugaacauggagacccugaacaugaccaugccgcucagcugcacgaagaacuccagccaccacuacauccgggucggcaacgagaccggccuggagcugacccucaccaacacguccaucaucaaccacaaguucugcaaccugagcgacgcccacaagcgcaaccuguacgaccacgcccucauguccauccugagcaccuuccaccuguccauccccaacuucaaccaguacgaggccaugagcugcgacuucaacgggggcaagaucuccgugcaguacaaccucagccacgccuacgcgguggacgccgccgagcacugcgggaccgucgccaacggcgugcugcagaccuucaugcggauggcguggggcggguccuacaucgcccuggacagcggcugcgggaacugggacugcaucaugacguccuaccaguaccucaucauccagaacaccaccugggaggaccacugccaguucagccggcccucccccaucggcuaccuggggcugcucagccagcgcacccgggacaucuacaucagccgccggcugcugggcacguucaccuggacccucuccgacagcgagggcaacgagacccccgggggcuacugccugacgcgcuggaugcugaucgaggccgagcucaagugcuucgggaacaccgccguggccaagugcaacgagaagcacgacgaggaguucugcgacaugcugcggcuguucgacuucaacaagcaggcgauccagcgccucaaguccgaggcccagaugagcauccagcugaucaacaaggccgucaacgcccugaucaacgaccagcucaucaugaagaaccaccuccgggacaugaugugcauccccuacugcaacuacuccaaguacugguaccugaaccacaccagcuccgggcgcaccagccugcccaagugcuggcugguguccaacggcagcuaccugaacgagacgcacuucuccgacgacaucgagcagcaggccgacaacaugaucaccgagaugcuccagaaggaguacaucgaccggcagggcaagaccccgcuggggcugguggaccucuucgucuucagcaccuccuucuaccugaucagcaucuuccugcaccugaucaagaucccgacgcaccgccacaucgugggcaagcccugccccaagccccaccggcucaaccacauggggaucugcuccugcggccuguacaagcagccgggggugcccacccgcuggaagcggugaggacuagucccuguucccagagcccacuuuuuuuucuuuuuuugaaauaaaauagccugucuuucagaucucaaaggcucuuuucagagccaccaaaaaaaaaaaaaaaaaaaaaaaaaaaaaaaaaaaaaaaaaaaaaaaaaaaaaaaaaaaaaaaaagaauu

SEQ ID NO: 35371 - RNA, 1733 nt, Artificial Sequence
  mRNA product Design a-2 (hSL-A64-N5) comprising derived and/or modified sequence from LASV(KAK-428;Clade n.d. (VII))__ANH09740__GPCmut9 (opt1)
aggagaguccgcucagccagguugcagaagcggcuuagcguguguccuaaucuucucucugcguguagguaggccugugccgcaaacaagcuuaccaugggccagaucgugaccuucuuccaggaggucccccacgugaucgaggaggugaugaacaucguccugaucgcccucagccugcuggccauccucaaggggcuguacaacuucgcgaccugcggcgugaucgggcugaucacguuccuccugcugugcggccgcuccugcagcgccaccuacaaggggcaguacgagcuccagacccuggagcugaacauggagucccucaacaugaccaugccgcugagcugcacgaagaacaacucccaccacuacauccgggccggcaacaacaccggccuggagcucacccugaccaacacgagcaucaucucccacaaguucugcaaccugagcgacgcccacaagaagaaccucuacgaccacacccugauguccaucaucaccaccuuccaccugagcauccccaacuucaaccaguacgaggccauguccugcgacuucaacgggggcaagaucagcauccaguacaaccucucccacagcuacgcgggggacgccgcccagcacugcggcacgguggccaacgggguccugcagaccuucaugcgcauggcguggggcggcuccuaccuggcccucgacagcgggugccgcggcugggacugcaucaucuccagcuaccaguaccugaucauccagaacaccaccugggacgaccacugccaguucucccggcccagccccaucggguaccugggcuucgugagccagaagacgcgcgacaucuacaucucccggcgccuccugggcaccuucaccuggacccugagcgacuccgaggggcacgacaugccgggcggguacugccucacgcgguggaugcugaucgaggccgaccugaagugcuucggcaacaccgccguggccaagugcaacgagaagcacgacgaggaguucugcgacauguggcgccucuucgacuucaacaagcaggcgauccagcggcugaaggccgaggcccagaugaacauccagcugaucaacaaggccgucaacgcccucaucaacgaccagcugaugaugaagaaccaccuccgcgacaucaugugcauccccuacugcaacuacagcaaguucugguaccugaacaacaccaccacgggccggaccucccugccccgcugcuggcugaucagcaacggcuccuaccucaacgagacccacuucagcgacgacaucgagcagcaggcggacaacaugaucaccgagaugcugcagaaggaguacauggaccggcaggggaagacgccccugggccucguggaccuguucguguucuccaccagcuucuaccugaucaccaucuuccuccaccuggucaagaucccgacccaccgccacaucguggggaagcccugccccaagccccaccggcugaaccacaugggcaucugcuccugcgggcuguacaagcagccgggcgugcccguccgcuggaagcggugaggacuagucccuguucccagagcccacuuuuuuuucuuuuuuugaaauaaaauagccugucuuucagaucucaaaggcucuuuucagagccaccaaaaaaaaaaaaaaaaaaaaaaaaaaaaaaaaaaaaaaaaaaaaaaaaaaaaaaaaaaaaaaaaagaauu

SEQ ID NO: 35372 - RNA, 1733 nt, Artificial Sequence; identical to SEQ ID NO: 35366
  mRNA product Design a-2 (hSL-A64-N5) comprising derived and/or modified sequence from LASV(Pinneo-NIG-1969;Clade I)__AIT17836__GPCmut9 (opt1)

SEQ ID NO: 35373 - RNA, 1733 nt, Artificial Sequence
  mRNA product Design a-2 (hSL-A64-N5) comprising derived and/or modified sequence from LASV(ISTH0009-NIG-2011;Clade II)__AIT17404__GPCmut9 (opt1)
aggagaguccgcucagccagguugcagaagcggcuuagcguguguccuaaucuucucucugcguguagguaggccugugccgcaaacaagcuuaccaugggccagaucaucaccuucuuccaggaggugccccacgucaucgaggaggugaugaacaucgugcugaucgcccucagccugcuggccauccucaaggggaucuacaacgucgcgaccugcggccuguucgggcugguguccuuccuccugcugugcggccgcagcugcuccacgaccuacaaggggguguacgagcuccagacccuggagcuggacauggccagccucaacaugaccaugccgcuguccugcacgaagaacaacagccaccacuacaucauggucggcaacgagaccggccuggagcucacccugaccaacacguccaucaucaaccacaaguucugcaaccugagcgacgcccacaagaagaaccucuacgaccacgcccugauguccaucaucagcaccuuccaccuguccauccccaacuucaaccaguacgaggccaugagcugcgacuucaacgggggcaagaucuccgugcaguacaaccucagccacgcguacgccguggacgccgccaaccacugcgggaccaucgcgaacggcguccugcagaccuucaugcggauggccuggggcggguccuacaucgcccuggacagcggcugcggguccugggacugcaucaugacgagcuaccaguaccucaucauccagaacaccaccugggaggaccacugccaguucucccgccccagccccaucggcuaccuggggcugcucagccagcggacccgcgacaucuacaucucccggcgccugcugggcacguucaccuggacccucagcgacuccgagggcaacgagacccccgggggcuacugccugacgcgguggaugcugaucgaggccgagcucaagugcuucgggaacaccgccguggcgaagugcaacgagaagcacgacgaggaguucugcgacaugcugcgccuguucgacuucaacaagcaggccauccggcgccucaagaccgaggcccagaugagcauccagcugaucaacaaggccgugaacgcccugaucaacgaccagcucaucaugaagaaccaccuccgggacaucaugugcaucccguacugcaacuacuccaaguacugguaccugaaccacaccgucacggggaagaccagccugccccgcugcuggcugguguccaacggcagcuaccugaacgagacccacuucuccgacgacaucgagcagcaggcggacaacaugaucaccgagcuccugcagaaggaguacauggaccggcagggcaagacgccccuggggcucguggaccuguucgucuucagcaccuccuucuaccugaucagcaucuuccugcaccucaucaagaucccgacccaccgccacaucaccggcaagcccugccccaagccccaccggcugaaccacauggggaucugcuccugcggccuguacaagcacccgggggugcccgugaaguggaagcgcugaggacuagucccuguucccagagcccacuuuuuuuucuuuuuuugaaauaaaauagccugucuuucagaucucaaaggcucuuuucagagccaccaaaaaaaaaaaaaaaaaaaaaaaaaaaaaaaaaaaaaaaaaaaaaaaaaaaaaaaaaaaaaaaaagaauu

SEQ ID NO: 35374 - RNA, 1733 nt, Artificial Sequence
  mRNA product Design a-2 (hSL-A64-N5) comprising derived and/or modified sequence from LASV(ISTH2010-NIG-2012;Clade II)__AIT17482__GPCmut9 (opt1)
aggagaguccgcucagccagguugcagaagcggcuuagcguguguccuaaucuucucucugcguguagguaggccugugccgcaaacaagcuuaccaugggccagaucaucaccuucuuccaggaggugccccacgucaucgaggaggugaugaacaucgugcugaucgcccucagccugcuggccauccucaaggggaucuacaacgucgcgaccugcggccuguucgggcugguguccuuccuccugcugugcggccgcagcugcuccacgaccuacaaggggguguacgagcuccagacccuggagcuggacauggccagccucaacaugaccaugccgcuguccugcacgaagaacaacagccaccacuacaucauggucggcaacgagaccggccuggagcucacccugaccaacacguccaucaucaaccacaaguucugcaaccugagcgacgcccacaagaagaaccucuacgaccacgcccugauguccaucaucagcaccuuccaccuguccauccccaacuucaaccaguacgaggccaugagcugcgacuucaacgggggcaagaucuccgugcaguacaaccucagccacgcguacgccguggacgccgccaaccacugcgggaccaucgcgaacggcguccugcagaccuucaugcggauggccuggggcggguccuacaucgcccuggacagcggcugcggguccugggacugcaucaugacgagcuaccaguaccucaucauccagaacaucaccugggaggaccacugccaguucucccgccccagccccaucggcuaccuggggcugcucagccagcggacccgcgacaucuacaucucccggcgccugcugggcaccuucacguggacccucagcgacuccgagggcaacgagacccccgggggcuacugccugacccgguggaugcugaucgaggccgagcucaagugcuucgggaacacggccguggcgaagugcaacgagaagcacgacgaggaguucugcgacaugcugcgccuguucgacuucaacaagcaggccauccggcgccucaagaccgaggcccagaugagcauccagcugaucaacaaggccgugaacgcccugaucaacgaccagcucaucaugaagaaccaccuccgggacaucaugugcauccccuacugcaacuacuccaaguacugguaccugaaccacaccgucaccgggaagacgagccugccccgcugcuggcugguguccaacggcagcuaccugaacgagacccacuucuccgacgacaucgagcagcaggcggacaacaugaucaccgagcuccugcagaaggaguacaucgaccggcagggcaagaccccgcuggggcucguggaccuguucgucuucagcacguccuucuaccugaucagcaucuuccugcaccucgugaagaucccgacccaccgccacguggucggcaagcccugccccaagccccaccggcugaaccacauggggaucugcuccugcggccuguacaagcacccgggggugcccgugaaguggaagcgcugaggacuagucccuguucccagagcccacuuuuuuuucuuuuuuugaaauaaaauagccugucuuucagaucucaaaggcucuuuucagagccaccaaaaaaaaaaaaaaaaaaaaaaaaaaaaaaaaaaaaaaaaaaaaaaaaaaaaaaaaaaaaaaaaagaauu

SEQ ID NO: 35375 - RNA, 1733 nt, Artificial Sequence
  mRNA product Design a-2 (hSL-A64-N5) comprising derived and/or modified sequence from LASV(Lassa virus/H.sapiens-wt/NGA/2015/ISTH_0543;Clade II)__AVO03639__GPCmut9 (opt1)
aggagaguccgcucagccagguugcagaagcggcuuagcguguguccuaaucuucucucugcguguagguaggccugugccgcaaacaagcuuaccaugggccagaucaucaccuucuuccaggaggugccccacgucaucgaggaggugaugaacaucgugcugaucgcccucagccugcuggccauccucaaggggaucuacaacgucgcgaccugcggccuguucgggcugguguccuuccuccugcugugcggccgcagcugcuccacgaccuacaaggggguguacgagcuccagacccuggagcuggacauggccaaccucaacaugaccaugccgcugagcugcacgaagaacaacucccaccacuacaucauggucggcaacgagaccggccuggagcucacccugaccaacacgagcaucaucaaccacaaguucugcaaccuguccgacgcccacaagaagaaccucuacgaccacgcccugaugagcaucaucuccaccuuccaccugagcauccccaacuucaaccaguacgaggccauguccugcgacuucaacgggggcaagaucagcgugcaguacaaccucucccacaccuacgcgguggacgccgccaaccacugcgggaccaucgccaacggcguccugcagacguucaugcggauggcguggggcgggagcuacaucgcccuggacuccggcugcgggagcugggacugcaucaugaccuccuaccaguaccucgugauccagaacaccaccugggaggaccacugccaguucagccgccccucccccaucggcuaccuggggcugcucagccagcggacgcgcgacaucuacaucagccggcgccugcugggcaccuucaccuggacccucuccgacagcgagggcaacgagacgcccgggggcuacugccugacccgguggaugcugaucgaggccgagcucaagugcuucgggaacaccgccguggccaagugcaacgagaagcacgacgaggaguucugcgacaugcugcgccuguucgacuucaacaagcaggcgauccggcgccucaagaccgaggcccagauguccauccagcugaucaacaaggccgucaacgcccugaucaacgaccagcucaucaugaagaaccaccuccgggacaucaugugcauccccuacugcaacuacagcaaguacugguaccugaaccacacggugaccgggaagaccucccugccccgcugcuggcuggugagcaacggcuccuaccugaacgagacccacuucagcgacgacaucgagcagcaggccgacaacaugaucacggagcuccugcagaaggaguacaucgaccggcagggcaagaccccgcuggggcucgucgaccuguucguguucuccaccagcuucuaccugaucuccaucuuccugcaccucgugaagaucccgacccaccgccacaucacgggcaagcccugccccaagccccaccggcugaaccacauggggaucugcagcugcggccuguacaagcacccggggguccccgugaaguggaagcgcugaggacuagucccuguucccagagcccacuuuuuuuucuuuuuuugaaauaaaauagccugucuuucagaucucaaaggcucuuuucagagccaccaaaaaaaaaaaaaaaaaaaaaaaaaaaaaaaaaaaaaaaaaaaaaaaaaaaaaaaaaaaaaaaaagaauu

SEQ ID NO: 35376 - RNA, 1733 nt, Artificial Sequence
  mRNA product Design a-2 (hSL-A64-N5) comprising derived and/or modified sequence from LASV(Lassa virus/H.sapiens-wt/NGA/2016/ISTH_0009;Clade II)__AVO03571__GPCmut9 (opt1)
aggagaguccgcucagccagguugcagaagcggcuuagcguguguccuaaucuucucucugcguguagguaggccugugccgcaaacaagcuuaccaugggccagaucaucaccuucuuccaggaggugccccacgucaucgaggaggugaugaacaucgugcugaucgcccucagccugcuggccauccucaaggggaucuacaacgucgcgaccugcggccugcuggggcucguguccuuccugcugcucugcggccgcagcugcuccacgaccuacaaggggguguacgagcugcagacccuggagcucgacauggccagccugaacaugaccaugccgcuguccugcacgaagaacaacagccaccacuacaucauggucggcaacgagaccggccucgagcugacccugaccaacacguccaucaucaaccacaaguucugcaaccucagcgacgcccacaagaagaaccuguacgaccacgcccugauguccaucaucagcaccuuccaccucuccauccccaacuucaaccaguacgaggccaugagcugcgacuucaacgggggccggaucuccgugcaguacaaccugagccacuccuacgcgguggacgccgccaaccacugcgggaccaucgccaacggcguccugcagaccuucaugcgcauggcguggggcgggagcuacaucgcccucgacuccggcugcgggagcugggacugcaucaugacguccuaccaguaccugaucauccagaacaccaccugggaggaccacugccaguucagccggcccagccccaucggcuaccuggggcuccugucccagcgcacccgggacaucuacaucagccgccggcugcucggcacguucaccuggacccuguccgacagcgagggcaacgagacccccgggggcuacugccugacgcgcuggaugcucaucgaggccgagcugaagugcuucgggaacaccgccguggccaagugcaacgagaagcacgacgaggaguucugcgacaugcugcggcuguucgacuucaacaagcaggcgauccgccggcugaagaccgaggcccagauguccauccagcugaucaacaaggccgugaacgcccucaucaacgaccagcugaucaugaagaaccaccuccgcgacaucaugugcaucccguacugcaacuacagcaaguacugguaccucaaccacaccgucacggggaagaccucccugccccggugcuggcuggugagcaacggcuccuaccucaacgagacccacuucagcgacgacaucgagcagcaggccgacaacaugaucaccgagcugcugcagaaggaguacaucgaccgccagggcaagacgccccucgggcugguggaccuguucgucuucuccaccagcuucuaccugaucuccaucuuccuccaccuggugaagaucccgacccaccggcacaucaccggcaagcccugccccaagccccaccgccugaaccacauggggaucugcagcugcggccucuacaaccacccgggggugcccgucaaguggaagcggugaggacuagucccuguucccagagcccacuuuuuuuucuuuuuuugaaauaaaauagccugucuuucagaucucaaaggcucuuuucagagccaccaaaaaaaaaaaaaaaaaaaaaaaaaaaaaaaaaaaaaaaaaaaaaaaaaaaaaaaaaaaaaaaaagaauu

SEQ ID NO: 35377 - RNA, 1733 nt, Artificial Sequence
  mRNA product Design a-2 (hSL-A64-N5) comprising derived and/or modified sequence from LASV(Lassa virus/H.sapiens-wt/NGA/2016/ISTH_0017;Clade II)__AVO03567__GPCmut9 (opt1)
aggagaguccgcucagccagguugcagaagcggcuuagcguguguccuaaucuucucucugcguguagguaggccugugccgcaaacaagcuuaccaugggccagaucaucaccuucuuccaggaggugccccacgucaucgaggaggugaugaacaucgugcugaucgcccucagccugcuggccauccucaaggggaucuacaacgucgcgaccugcggccuguucgggcugguguccuuccuccugcugugcggccgcagcugcuccacgaccuacaaggggguguacgagcuccagacccuggagcuggacauggccagccucaacaugaccaugccgcuguccugcacgaagaacaacagccaccacuacaucauggucggcaacgagaccggccuggagcucacccugaccaacacguccaucaucaaccacaaguucugcaaccugagcgacgcccacaagaagaaccucuacgaccacgcccugauguccaucaucagcaccuuccaccuguccauccccaacuucaaccaguacgaggccaugagcugcgacuucaacgggggcaagaucuccgugcaguacaaccucagccacaccuacgcgaucgacgccgccaaccacugcgggaccaucgccaacggcgugcugcagacguucaugcggauggcguggggcggguccuacaucgcccuggacagcggcugcggguccugggacugcaucaugaccagcuaccaguaccucaucauccagaacaccaccugggaggaccacugccaguucucccgccccagccccaucggcuaccuggggcugcucagccagcggacgcgcgacaucuacaucucccggcgccugcugggcaccuucaccuggacccucagcgacuccgagggcaacgagacgcccgggggcuacugccugacccgguggaugcugaucgaggccgagcucaagugcuucgggaacaccgccgucgccaagugcaacgagaagcacgacgaggaguucugcgacaugcugcgccuguucgacuucaacaagcaggcgauccggcgccucaagaccgaggcccagaugagcauccagcugaucaacaaggccgugaacgcccugaucaacgaccagcucaucaugaagaaccaccuccgggacaucaugugcauccccuacugcaacuacuccaaguacugguaccugaaccacacggugaccgggaagaccagccugccccgcugcuggcuggucuccaacggcagcuaccugaacgagacccacuucuccgacgacaucgagcagcaggccgacaacaugaucacggagcuccugcagaaggaguacauggaccggcagggcaagaccccgcuggggcucguggaccuguucguguucagcaccuccuucuaccugaucagcaucuuccugcaccucguccgcaucccgacccaccggcacgugaucggcaagcccugccccaagccccaccgccugaaccacauggggaucugcuccugcggccuguacaagcacccgggggugcccgucaaguggaagcggugaggacuagucccuguucccagagcccacuuuuuuuucuuuuuuugaaauaaaauagccugucuuucagaucucaaaggcucuuuucagagccaccaaaaaaaaaaaaaaaaaaaaaaaaaaaaaaaaaaaaaaaaaaaaaaaaaaaaaaaaaaaaaaaaagaauu

SEQ ID NO: 35378 - RNA, 1733 nt, Artificial Sequence
  mRNA product Design a-2 (hSL-A64-N5) comprising derived and/or modified sequence from LASV(Lassa virus/H.sapiens-wt/NGA/2018/ISTH_0959;Clade II)__AVV65099__GPCmut9 (opt1)
aggagaguccgcucagccagguugcagaagcggcuuagcguguguccuaaucuucucucugcguguagguaggccugugccgcaaacaagcuuaccaugggccagaucaucaccuucuuccaggaggugccccacgucaucgaggaggugaugaacaucgugcugaucgcccucagccugcuggccauccucaaggggaucuacaacgucgugaccugcggccuguucgggcugguguccuuccuccugcugugcggccgcagcugcuccacgaccuacaagggggucuacgagcuccagacccuggagcuggacauggcgagccucaacaugaccaugccgcuguccugcacgaagaacaacagccaccacuacaucauggugggcaacgagaccggccuggagcucacccugaccaacacguccaucaucaaccacaaguucugcaaccugagcgacgcccacaagaagaaccucuacgaccacgcccugauguccaucaucagcaccuuccaccuguccauccccaacuucaaccaguacgaggccaugagcugcgacuucaacgggggcaagaucuccgugcaguacaaccucagccacgccuacgcgaucgacgccgccaaccacugcgggaccaucgccaacggcguccugcagaccuucaugcggauggcguggggcggguccuacaucgcccuggacagcggcugcggguccugggacugcaucaugacgagcuaccaguaccucaucauccagaacaccaccugggaggaccacugccaguucucccgccccagccccaucggcuaccuggggcugcucagccagcggacccgcgacaucuacaucucccggcgccugcugggcacguucaccuggacccucagcgacuccgagggcaacgagacccccgggggcuacugccugacgcgguggaugcugaucgaggccgagcucaagugcuucgggaacaccgccguggccaagugcaacgagaagcacgacgaggaguucugcgacaugcugcgccuguucgacuucaacaagcaggcgauccggcgccucaagaccgaggcccagaugagcauccagcugaucaacaaggccgugaacgcccugaucaacgaccagcucaucaugaagaaccaccuccgggacaucaugugcaucccguacugcaacuacuccaaguacugguaccugaaccacaccgucacggggaagaccagccugccccgcugcuggcugguguccaacggcagcuaccugaacgagacccacuucuccgacgacaucgagcagcaggccgacaacaugaucaccgagcuccugcagaaggaguacaucgaccggcagggcaagacgccccuggggcucguggaccuguucgucuucagcaccuccuucuaccugaucagcaucuuccugcaccucgugaagaucccgacccaccgccacgugaucggcaagcccugccccaagccccaccggcugaaccacauggggaucugcuccugcggccuguacaagcacccggggguccccgugaaguggaagcgcugaggacuagucccuguucccagagcccacuuuuuuuucuuuuuuugaaauaaaauagccugucuuucagaucucaaaggcucuuuucagagccaccaaaaaaaaaaaaaaaaaaaaaaaaaaaaaaaaaaaaaaaaaaaaaaaaaaaaaaaaaaaaaaaaagaauu

SEQ ID NO: 35379 - RNA, 1733 nt, Artificial Sequence
  mRNA product Design a-2 (hSL-A64-N5) comprising derived and/or modified sequence from LASV(LASV003-NIG-2008;Clade II)__AIT17580__GPCmut9 (opt1)
aggagaguccgcucagccagguugcagaagcggcuuagcguguguccuaaucuucucucugcguguagguaggccugugccgcaaacaagcuuaccaugggccagaucaucaccuucuuccaggaggugccccacgucaucgaggaggugaugaacaucgugcugaucgcccucagccugcuggccauccucaaggggaucuacaacgucgcgaccugcggccuguucgggcugguguccuuccuccugcugugcggccgcagcugcuccacgaccuacaaggggguguacgagcuccagacccuggagcuggacauggccagccucaacaugaccaugccgcuguccugcacgaagaacaacagccaccacuacaucauggucggcaacgagaccggccuggagcucacccugaccaacacguccaucaucaaccacaaguucugcaaccugagcgacgcccacaagaagaaccucuacgaccacgcccugauguccaucaucagcaccuuccaccuguccauccccaacuucaaccaguacgaggccaugagcugcgacuucaacgggggcaagaucuccgugcaguacaaccucagccacaccuacgcgguggacgccgccaaccacugcgggaccaucgccaacggcguccugcagacguucaugcggauggcguggggcggguccuacaucgcccuggacagcggcugcggguccugggacugcaucaugaccagcuaccaguaccucaucauccagaacaccaccugggaggaccacugccaguucucccgccccagccccaucggcuaccuggggcugcucagccagcggacgcgcgacaucuacaucucccggcgccugcugggcaccuucaccuggacccucagcgacuccgagagcaacgagacgccgggcggguacugccugacccgguggaugcugaucgaggccgagcucaagugcuucggcaacaccgccguggccaagugcaacgagaagcacgacgaggaguucugcgacaugcugcgccuguucgacuucaacaagcaggcgauccggcgccucaaggccgaggcccagauguccauccagcugaucaacaaggccgugaacgcccugaucaacgaccagcucaucaugaagaaccaccuccgggacaucaugugcauccccuacugcaacuacagcaaguacugguaccugaaccacaccgucacgggccgcaccucccugccccggugcuggcuggugagcaacggguccuaccugaacgagacccacuucagcgacgacaucgagcagcaggcggacaacaugaucaccgagcuccugcagaaggaguacauggaccgccagggcaagacgccccugggccucguggaccuguucgucuucuccaccagcuucuaccugaucuccaucuuccugcaccucgugaagaucccgacccaccggcacgugaucgggaagcccugccccaagccccaccgccugaaccacaugggcaucugcagcugcgggcuguacaagcacccgggcguccccgugaaguggaagcggugaggacuagucccuguucccagagcccacuuuuuuuucuuuuuuugaaauaaaauagccugucuuucagaucucaaaggcucuuuucagagccaccaaaaaaaaaaaaaaaaaaaaaaaaaaaaaaaaaaaaaaaaaaaaaaaaaaaaaaaaaaaaaaaaagaauu

SEQ ID NO: 35380 - RNA, 1733 nt, Artificial Sequence
  mRNA product Design a-2 (hSL-A64-N5) comprising derived and/or modified sequence from LASV(LASV035-NIG-2009;Clade II)__AIT17588__GPCmut9 (opt1)
aggagaguccgcucagccagguugcagaagcggcuuagcguguguccuaaucuucucucugcguguagguaggccugugccgcaaacaagcuuaccaugggccagaucaucaccuucuuccaggaggugccccacgucaucgaggaggugaugaacaucgugcugaucgcccucagccugcuggccauccucaaggggaucuacaacgucgcgaccugcggccuguucgggcugguguccuuccuccugcugugcggccgcagcugcuccacgaccuacaaggggguguacgagcuccagacccuggagcuggacauggccagccucaacaugaccaugccgcuguccugcacgaagaacaacagccaccacuacaucauggucggcaacgagaccggccuggagcucacccugaccaacacguccaucaucaaccacaaguucugcaaccugagcgacgcccacaagaagaaccucuacgaccacgcccugauguccaucaucagcaccuuccaccuguccauccccaacuucaaccaguacgaggccaugagcugcgacuucaacgggggcaagaucuccgugcaguacaaccucagccacgcguacgccguggacgccgccaaccacugcgggaccaucgcgaacggcguccugcagaccuucaugcggauggccuggggcggguccuacaucgcccuggacagcggcugcggguccugggacugcaucaugacgagcuaccaguaccucaucauccagaacaccaccugggaggaccacugccaguucucccgccccagccccaucggcuaccuggggcugcucagccagcggacccgcgacaucuacaucucccggcgccugcugggcacguucaccuggacccucagcgacuccgagggcaacgagacccccgggggcuacugccugacgcgguggaugcugaucgaggccgagcucaagugcuucgggaacaccgccguggcgaagugcaacgagaagcacgacgaggaguucugcgacaugcugcgccuguucgacuucaacaagcaggccauccggcgccucaaggccgaggcccagaugagcauccagcugaucaacaaggccgugaacgcgcugaucaacgaccagcucaucaugaagaaccaccuccgggacaucaugugcauccccuacugcaacuacuccaaguacugguaccugaaccacaccgucaccgggaagacgagccugccccgcugcuggcugguguccaacggcagcuaccugaacgagacccacuucuccgacgacaucgagcagcaggccgacaacaugaucaccgagcuccugcagaaggaguacaucgaccggcagggcaagaccccgcuggggcucguggaccuguucgucuucagcacguccuucuaccugaucagcaucuuccugcaccucgugaagaucccgacccaccgccacgugaucggcaagcccugccccaagccccaccggcugaaccacauggggaucugcuccugcggccuguacaagcacccggggguccccgugaaguggaagcgcugaggacuagucccuguucccagagcccacuuuuuuuucuuuuuuugaaauaaaauagccugucuuucagaucucaaaggcucuuuucagagccaccaaaaaaaaaaaaaaaaaaaaaaaaaaaaaaaaaaaaaaaaaaaaaaaaaaaaaaaaaaaaaaaaagaauu

SEQ ID NO: 35381 - RNA, 1733 nt, Artificial Sequence
  mRNA product Design a-2 (hSL-A64-N5) comprising derived and/or modified sequence from LASV(LASV1000-NIG-2009;Clade II)__AIT17782__GPCmut9 (opt1)
aggagaguccgcucagccagguugcagaagcggcuuagcguguguccuaaucuucucucugcguguagguaggccugugccgcaaacaagcuuaccaugggccagaucaucaccuucuuccaggaggugccccacgucaucgaggaggugaugaacaucgugcugaucgcccucagccugcuggccauccucaaggggaucuacaacgucgcgaccugcggccuguucgggcugguguccuuccuccugcugugcggccgcagcugcuccacgaccuacaaggggguguacgagcuccagacccuggagcuggacauggccagccucaacaugaccaugccgcuguccugcacgaagaacaacagccaccacuacaucauggucggcaacgagaccggccuggagcucacccugaccaacacguccaucaucaaccacaaguucugcaaccugagcgacgcccacaagaagaaccucuacgaccacgcccugauguccaucaucagcaccuuccaccuguccauccccaacuucaaccaguacgaggccaugagcugcgacuucaacgggggcaagaucuccgugcaguacaaccucagccacaccuacgcgguggacgccgccaaccacugcgggaccaucgccaacggcguccugcagacguucaugcggauggcguggggcggguccuacaucgcccuggacagcggcugcggguccugggacugcaucaugaccagcuaccaguaccucaucauccagaacaccaccugggaggaccacugccaguucucccgccccagccccaucggcuaccuggggcugcucagccagcggacgcgcgacaucuacaucucccggcgccugcugggcaccuucaccuggacccucagcgacuccgagggcaacgagacgcccgggggcuacugccugacccgguggaugcugaucgaggccgagcucaagugcuucgggaacaccgccguggccaagugcaacgagaagcacgacgaggaguucugcgacaugcugcgccuguucgacuucaacaagcaggcgaucaagcggcucaagaccgaggcccagaugagcauccagcugaucaacaaggccgugaacgcccugaucaacgaccagcucaucaugaagaaccaccuccgcgacaucaugugcauccccuacugcaacuacuccaaguacugguaccugaaccacacggucaccgggaagaccagccugccccggugcuggcugguguccaacggcagcuaccugaacgagacccacuucuccgacgacaucgagcagcaggccgacaacaugaucacggagcuccugcagaaggaguacaucgaccgccagggcaagaccccgcuggggcucguggaccuguucgucuucagcaccuccuucuaccugaucagcaucuuccugcaccucgugaagaucccgacccaccggcacguggucggcaagcccugccccaagccccaccgccugaaccacauggggaucugcuccugcggccuguacaagcacccgggggugcccgugaaguggaagcggugaggacuagucccuguucccagagcccacuuuuuuuucuuuuuuugaaauaaaauagccugucuuucagaucucaaaggcucuuuucagagccaccaaaaaaaaaaaaaaaaaaaaaaaaaaaaaaaaaaaaaaaaaaaaaaaaaaaaaaaaaaaaaaaaagaauu

SEQ ID NO: 35382 - RNA, 1733 nt, Artificial Sequence
  mRNA product Design a-2 (hSL-A64-N5) comprising derived and/or modified sequence from LASV(LASV221-NIG-2010;Clade II)__AIT17624__GPCmut9 (opt1)
aggagaguccgcucagccagguugcagaagcggcuuagcguguguccuaaucuucucucugcguguagguaggccugugccgcaaacaagcuuaccaugggccagaucaucaccuucuuccaggaggugccccacgucaucgaggaggugaugaacaucgugcugaucgcccucagccugcuggccauccucaaggggaucuacaacgucgcgaccugcggccuguucgggcugguguccuuccuccugcugugcggccgcagcugcuccacgaccuacaaggggguguacgagcuccagacccuggagcuggacauggccagccucaacaugaccaugccgcuguccugcacgaagaacaacagccaccacuacaucauggucggcaacgagaccggccuggagcucacccugaccaacacguccaucaucaaccacaaguucugcaaccugagcgacgcccacaagaagaaccucuacgaccacgcccugauguccaucaucagcaccuuccaccuguccauccccaacuucaaccaguacgaggccaugagcugcgacuucaacgggggcaagaucuccgugcaguacaaccucagccacaccuacgcgaucgacgccgccaaccacugcgggaccaucgccaacggcgugcugcagacguucaugcggauggcguggggcggguccuacaucgcccuggacagcggcugcggguccugggacugcaucaugaccagcuaccaguaccucaucauccagaacaccaccugggaggaccacugccaguucucccgccccagccccaucggcuaccuggggcugcucagccagcggacgcgcgacaucuacaucucccggcgccugcugggcaccuucaccuggacccucagcgacuccgagggcaacgagacgcccgggggcuacugccugacccgguggaugcugaucgaggccgagcucaagugcuucgggaacaccgccgucgccaagugcaacgagaagcacgacgaggaguucugcgacaugcugcgccuguucgacuucaacaagcaggcgauccggcgccucaagaccgaggcccagaugagcauccagcugaucaacaaggccgugaacgcccugaucaacgaccagcucaucaugaagaaccaccuccgggacaucaugugcauccccuacugcaacuacuccaaguacugguaccugaaccacacggugaccgggaagaccagccugccccgcugcuggcuggucuccaacggcagcuaccugaacgagacccacuucuccgacgacaucgagcagcaggccgacaacaugaucacggagaugcuccagaaggaguacauggaccggcagggcaagaccccgcuggggcugguggaccucuucguguucagcaccuccuucuaccugaucagcaucuuccugcaccuggucaagaucccgacccaccgccacgugaucggcaagcccugccccaagccccaccggcucaaccacauggggaucugcuccugcggccuguacaagcacccgggggugcccgucaaguggaagcgcugaggacuagucccuguucccagagcccacuuuuuuuucuuuuuuugaaauaaaauagccugucuuucagaucucaaaggcucuuuucagagccaccaaaaaaaaaaaaaaaaaaaaaaaaaaaaaaaaaaaaaaaaaaaaaaaaaaaaaaaaaaaaaaaaagaauu

SEQ ID NO: 35383 - RNA, 1733 nt, Artificial Sequence
  mRNA product Design a-2 (hSL-A64-N5) comprising derived and/or modified sequence from LASV(LASV237-NIG-2010;Clade II)__AIT17638__GPCmut9 (opt1)
aggagaguccgcucagccagguugcagaagcggcuuagcguguguccuaaucuucucucugcguguagguaggccugugccgcaaacaagcuuaccaugggccagaucaucaccuucuuccaggaggugccccacgucaucgaggaggugaugaacaucgugcugaucgcccucagccugcuggccauccucaaggggaucuacaacgucgcgaccugcggccuguucgggcugguguccuuccuccugcugugcggccgcagcugcuccacgaccuacaaggggguguacgagcuccagacccuggagcuggacauggccagccucaacaugaccaugccgcuguccugcacgaagaacaacagccaccacuacaucauggucggcaacgagaccggccuggagcucacccugaccaacacguccaucaucaaccacaaguucugcaaccugagcgacgcccacaagaaggaccucuacgaccacgcccugauguccaucaucagcaccuuccaccuguccauccccaacuucaaccaguacgaggccaugagcugcgacuucaacgggggcaagaucuccgugcaguacaaccucagccacaccuacgcgguggacgccgccaaccacugcgggaccaucgccaacggcguccugcagacguucaugcggauggcguggggcggguccuacaucgcccuggacagcggcugcggguccugggacugcaucaugaccagcuaccaguaccucaucauccagaacaccaccugggaggaccacugccaguucucccgccccagccccaucggcuaccuggggcugcucagccagcggacgcgcgacaucuacaucucccggcgccugcugggcaccuucaccuggacccucagcgacuccgagggcaacgagacgcccgggggcuacugccugacccgguggaugcugaucgaggccgagcucaagugcuucgggaacaccgccguggccaagugcaacgagaagcacgacgaggaguucugcgacaugcugcgccuguucgacuucaacaagcaggcgauccggcgccucaagaccgaggcccagaugagcauccagcugaucaacaaggccgugaacgcccugaucaacgaccagcucaucaugaagaaccaccuccgggacaucaugugcauccccuacugcaacuacuccaaguacugguaccugaaccacacggucaccgggaagaccagccugccccgcugcuggcugguguccaacggcagcuaccugaacgagacccacuucuccgacgacaucgagcagcaggccgacaacaugaucacggagcuccugcagaaggaguacauggaccggcagggcaagaccccgcuggggcucguggaccuguucgucuucagcaccuccuucuaccugaucagcaucuuccugcaccucaucaagaucccgacccaccgccacaucacgggcaagcccugccccaagccccaccggcugaaccacauggggaucugcuccugcggccuguacaagcacccgggggugcccgugaaguggaagcgcugaggacuagucccuguucccagagcccacuuuuuuuucuuuuuuugaaauaaaauagccugucuuucagaucucaaaggcucuuuucagagccaccaaaaaaaaaaaaaaaaaaaaaaaaaaaaaaaaaaaaaaaaaaaaaaaaaaaaaaaaaaaaaaaaagaauu

SEQ ID NO: 35384 - RNA, 1733 nt, Artificial Sequence
  mRNA product Design a-2 (hSL-A64-N5) comprising derived and/or modified sequence from LASV(LASV253-NIG-2011;Clade II)__AIT17670__GPCmut9 (opt1)
aggagaguccgcucagccagguugcagaagcggcuuagcguguguccuaaucuucucucugcguguagguaggccugugccgcaaacaagcuuaccaugggccagaucaucaccuucuuccaggaggugccccacgucaucgaggaggugaugaacaucgugcugaucgcccucagccugcuggccauccucaaggggaucuacaacgucgcgaccugcggccuguucgggcugguguccuuccuccugcugugcggccgcagcugcuccacgaccuacaaggggguguacgagcuccagacccuggagcuggacauggccagccucaacaugaccaugccgcuguccugcacgaagaacaacagccaccacuacaucauggucggcaacgagaccggccuggagcucacccugaccaacacguccaucaucaaccacaaguucugcaaccugagcgacgcccacaagaagaaccucuacgaccacgcccugauguccaucaucagcaccuuccaccuguccauccccaacuucaaccaguacgaggccaugagcugcgacuucaacgggggcaagaucuccgugcaguacaaccucagccacaccuacgcgguggacgccgccaaccacugcgggaccaucgccaacggcguccugcagacguucaugcggauggcguggggcggguccuacaucgcccuggacagcggcugcggguccugggacugcaucaugaccagcuaccaguaccucaucauccagaacaccaccugggaggaccacugccaguucucccgccccagccccaucggcuaccuggggcugcucagccagcggacgcgcgacaucuacaucucccggcgccugcugggcaccuucaccuggacccucagcgacuccgagggcaacgagacgcccgggggcuacugccugacccgguggaugcugaucgaggccgagcucaagugcuucgggaacaccgccguggccaagugcaacgagaagcacgacgaggaguucugcgacaugcugcgccuguucgacuucaacaagcaggcgauccggcgccucaaggccgaggcccagaugagcauccagcugaucaacaaggccgugaacgcccugaucaacgaccagcucaucaugaagaaccaccuccgggacaucaugugcaucccguacugcaacuacuccaaguacugguaccugaaccacaccgucacggggcgcaccagccugccccggugcuggcugguguccaacggcagcuaccugaacgagacccacuucuccgacgacaucgagcagcaggcggacaacaugaucaccgagcuccugcagaaggaguacaucgaccgccagggcaagacgccccuggggcucguggaccuguucgucuucagcaccuccuucuaccugaucagcaucuuccugcaccucgugaagaucccgacccaccggcacaucaucggcaagcccugccccaagccccaccgccugaaccacauggggaucugcuccugcggccuguacaagcacccgggggugcccgucaaguggaagcggugaggacuagucccuguucccagagcccacuuuuuuuucuuuuuuugaaauaaaauagccugucuuucagaucucaaaggcucuuuucagagccaccaaaaaaaaaaaaaaaaaaaaaaaaaaaaaaaaaaaaaaaaaaaaaaaaaaaaaaaaaaaaaaaaagaauu

SEQ ID NO: 35385 - RNA, 1733 nt, Artificial Sequence
  mRNA product Design a-2 (hSL-A64-N5) comprising derived and/or modified sequence from LASV(LASV254-NIG-2011;Clade II)__AIT17674__GPCmut9 (opt1)
aggagaguccgcucagccagguugcagaagcggcuuagcguguguccuaaucuucucucugcguguagguaggccugugccgcaaacaagcuuaccaugggccagaucaucaccuucuuccaggaggugccccacgucaucgaggaggugaugaacaucgugcugaucgcccucagccugcuggccauccucaaggggaucuacaacgucgcgaccugcggccuguucgggcugguguccuuccuccugcugugcggccgcagcugcuccacgaccuacaaggggguguacgagcuccagacccuggagcuggacaugaccaaccucaacaugacgaugccgcugagcugcaccaagaacaacucccaccacuacaucauggucggcaacgagaccggccuggagcucacccugacgaacaccagcaucaucaaccacaaguucugcaaccuguccgacgcccacaagaagaaccucuacaaccacgcccugaugagcaucaucuccaccuuccaccugagcauccccaacuucaaccaguacgaggccauguccugcgacuucaacgggggcaagaucagcgugcaguacaaccucucccacagcuacgccguggacgcggccaaccacugcgggaccaucgccaacggcguccugcagacguucaugcggauggccuggggcggguccuacaucgcgcuggacagcggcugcgggaacugggacugcaucaugaccuccuaccaguaccucaucauccagaacaccaccugggaggaccacugccaguucagccgccccucccccaucggcuaccuggggcugcucagccagcggacgcgcgacaucuacaucagccggcgccugcugggcaccuucaccuggacccucuccgacagcgagggcaacgagacgcccgggggcuacugccugacccgguggaugcugaucgaggccgagcucaagugcuucgggaacaccgccguggccaagugcaacgagaagcacgacgaggaguucugcgacaugcugcgccuguucgacuucaacaagcaggccauccggcgccucaagaccgaggcgcaggccaacauccagcugaucaacaaggccgugaacgcccugaucaacgaccagcucaucaugaagaaccaccuccgggacaucaugugcauccccuacugcaacuacuccaaguacugguaccugaaccacacggucaccgggaagaccagccugccccgcugcuggcugguguccaacggcagcuaccugaacgagacccacuucuccgacgacaucgagcagcaggccgacaacaugaucacggagcuccugcagaaggaguacauggaccggcagggcaagaccccgcuggggcucguggaccuguucgucuucagcaccuccuucuaccugaucagcaucuuccugcaccucgugaagaucccgacccaccgccacgugaucggcaagcccugccccaagccccaccggcugaaccacauggggaucugcuccugcggccuguacaagcacccggggguccccgugaaguggaagcgcugaggacuagucccuguucccagagcccacuuuuuuuucuuuuuuugaaauaaaauagccugucuuucagaucucaaaggcucuuuucagagccaccaaaaaaaaaaaaaaaaaaaaaaaaaaaaaaaaaaaaaaaaaaaaaaaaaaaaaaaaaaaaaaaaagaauu

SEQ ID NO: 35386 - RNA, 1733 nt, Artificial Sequence
  mRNA product Design a-2 (hSL-A64-N5) comprising derived and/or modified sequence from LASV(Nig08-A19;Clade III)__ADU56618__GPCmut9 (opt1)
aggagaguccgcucagccagguugcagaagcggcuuagcguguguccuaaucuucucucugcguguagguaggccugugccgcaaacaagcuuaccaugggccagaucgugaccuucuuccaggaggucccccacgugaucgaggaggugaugaacaucguccugaucgcccucagcauccuggccauccugaaggggcucuacaacaucgcgaccugcggccugaucgggcuggugacguuccuccugcuguccggccgcagcugcuccaugaccuacaaggggguguacgagcuccagacccuggagcugaacaugaacacccucaacaugacgaugccgcugagcugcaccaagaacaacucccaccacuacaucauggucggcaacgagaccggccuggagcucacccugacgaacaccagccugcuccaccacaaguucugcaaccuguccgacgcccacaagaagaaccuguacgaccacacccucaugagcaucaucuccaccuuccaccugagcauccccaacuucaaccaguacgaggccauguccugcgacuucaacgggggcaagaucacggugcaguacaaccugagccacuccuacgccaucgacgccgcgaaccacugcgggaccguggccaacggcguccuccagaccuucaugcggauggccuggggcgggagcuacaucgcccuggacuccggcugcgggaagugggacugcaucaugaccagcuaccaguaccugaucauccagaacacgaccugggaggaccacugccaguucucccggcccagccccaucggcuaccucgggcugcugucccagcgcacccgggacaucuacaucagccgccggcuccugggcaccuucacguggacccugagcgacuccgagggcaacgagacccccgggggcuacugccucacccgcuggaugcugaucgaggcggagcugaagugcuucgggaacacggccguggccaagugcaacgagaagcacgacgaggaguucugcgacaugcuccggcuguucgacuucaacaagcaggccauccgccggcugaaggccgaggcgcagaugagcauccagcucaucaacaaggccgugaacgcccugaucaacgaccagcugaucaugaagaaccaccuccgcgacaucaugugcauccccuacugcaacuacuccaaguacugguaccugaaccacaccagcaccgggcggaccucccugccccgcugcuggcucgucagcaacggcuccuaccugaacgagacgcacuucagcgacgacaucgagcagcaggccgacaacaugaucaccgagaugcugcagaaggaguaccucgaccggcagggcaagaccccgcuggggcugguggaccuguucguguucuccaccagcuucuaccucaucuccaucuuccugcaccuggucaagaucccgacgcaccgccacaucgugggcaagcccugccccaagccccaccggcucaaccacauggggaucugcagcugcggccuguacaagcagccgggggugcccguccgcuggaagcggugaggacuagucccuguucccagagcccacuuuuuuuucuuuuuuugaaauaaaauagccugucuuucagaucucaaaggcucuuuucagagccaccaaaaaaaaaaaaaaaaaaaaaaaaaaaaaaaaaaaaaaaaaaaaaaaaaaaaaaaaaaaaaaaaagaauu

SEQ ID NO: 35387 - RNA, 1736 nt, Artificial Sequence
  mRNA product Design a-2 (hSL-A64-N5) comprising derived and/or modified sequence from LASV(G1180-SLE-2010;Clade IV)__AIT17168__GPCmut9 (opt1)
aggagaguccgcucagccagguugcagaagcggcuuagcguguguccuaaucuucucucugcguguagguaggccugugccgcaaacaagcuuaccaugggccagaucgugaccuucuuccaggaggucccccacgugaucgaggaggugaugaacaucguccugaucgcccucagcauccuggccgugcugaaggggcucuacaacuucgcgaccugcggccugguggggcugcucaccuuccugcugcucugcggccgcuccugcaccgccagccgguacaagggggucuacgagcugcagacccuggagcucaacauggagacccugaacaugacgaugccgcuguccugcaccaagaacaacagccaccacuacaucauggugggcaacgagaccggccucgagcugacccugacgaacaccuccaucaucaaccacaaguucugcaaccucagcgacgcccacaagaagaaccuguacgaccacgcccugauguccaucaucagcaccuuccaccucuccauccccaacuucaaccaguacgaggccaugagcugcgacuucaacgggggcaagaucuccgugcaguacaaccugagccacuccuacgcgggggacgccgccaaccacugcggcaccgucgccaacggggugcugcagacguucaugcgcauggcguggggcggcagcuacaucgcccucgacuccgggugcggcagcugggacugcaucaugaccuccuaccaguaccugaucauccagaacaccaccugggaggaccacugccaguucagccggcccucccccaucggguaccugggccuccugagccagcgcacgcgggacaucuacaucagccgccggcugcucggcaccuucaccuggacccuguccgacagcgaggggaaggacacgccgggcggguacugccugacccgcuggaugcucaucgaggccgagcugaagugcuucggcaacaccgccguggccaagugcaacgagaagcacgacgaggaguucugcgacaugcugcggcuguucgacuucaacaagcaggcgauccagcgccugaaggccgaggcccagauguccauccagcugaucaacaaggccgucaacgcccucaucaacgaccagcugaucaugaagaaccaccuccgggacaucaugugcauccccuacugcaacuacagcaaguacugguaccucaaccacaccacgaccggcaagaccucccugcccaagugcuggcuggugagcaacggcuccuaccucaacgagacccacuucagcgacgacaucgagcagcaggcggacaacaugaucacggagaugcugcagaaggaguacauggagcgccaggggaagacgccccugggccucguggaccuguucgucuucuccaccagcuucuaccugaucuccaucuuccugcaccucgugaagaucccgacccaccggcacaucgugggcaagagcugccccaagccccaccgccugaaccacauggggaucugcuccugcgggcuguacaagcagcccggcgucccggugaaguggaagcggugaggacuagucccuguucccagagcccacuuuuuuuucuuuuuuugaaauaaaauagccugucuuucagaucucaaaggcucuuuucagagccaccaaaaaaaaaaaaaaaaaaaaaaaaaaaaaaaaaaaaaaaaaaaaaaaaaaaaaaaaaaaaaaaaagaauu

SEQ ID NO: 35388 - RNA, 1736 nt, Artificial Sequence
  mRNA product Design a-2 (hSL-A64-N5) comprising derived and/or modified sequence from LASV(G1442-SLE-2011;Clade IV)__AIT17180__GPCmut9 (opt1)
aggagaguccgcucagccagguugcagaagcggcuuagcguguguccuaaucuucucucugcguguagguaggccugugccgcaaacaagcuuaccaugggccagaucgugaccuucuuccaggaggucccccacgugaucgaggaggugaugaacaucguccugaucgcccucagcauccuggccgugcugaaggggcucuacaacguggcgaccugcggccugaucgggcuggucacguuccuccugcugugcggccgcuccugcaccaccacccucuacaaggggguguacgagcugcagacgcuggagcucaacauggagacccugaacaugaccaugccgcugagcugcaccaagaacaacucccaccacuacauccgggugggcaacgagacgggccucgagcugacccugaccaacaccagcaucaucaaccacaaguucugcaaccucuccgacgcccacaagaagaaccuguacgaccacgcccugaugagcaucaucuccacguuccaccucagcauccccaacuucaaccaguacgaggccauguccugcgacuucaacgggggcaagaucagcguccaguacaaccugucccacagcuacgccggggacgcggccaaccacugcggcaccguggccaacggggugcugcagaccuucaugcgcauggccuggggcggcuccuacaucgcgcucgacagcgggugcggcaacugggacugcaucaugaccuccuaccaguaccugaucauccagaacacgaccugggacgaccacugccaguucagccgccccucccccaucggguaccugggccuccugagccagcggacccgcgacgucuacaucucccggcgccugcucggcaccuucacguggacccugagcgacagcgaggggaaggacaccccgggcggguacugccugacccgguggaugcucaucgaggccgagcugaagugcuucggcaacacggccguggccaagugcaacgagaagcacgacgaggaguucugcgacaugcugcgccucuucgacuucaacaagcaggccauccagcggcugaaggcggaggcccagauguccauccagcugaucaacaaggccgugaacgcccucaucaacgaccagcugaucaugaagaaccaccuccgcgacaucaugugcauccccuacugcaacuacagcaaguacugguaccugaacaacaccgccaccggcaagaccucccugcccaagugcuggcugaucagcaacggcuccuaccucaacgagacgcacuucagcgacgacaucgagcaggaggcggacaacaugaucaccgagaugcugcagaaggaguacauggagcggcaggggaagacgccccugggccucgucgaccuguucguguucuccaccagcuucuaccugaucuccaucuuccugcaccucgugaagaucccgacccaccgccacaucgucggcaagagcugccccaagccccaccggcugaaccacauggggaucugcuccugcgggcuguacaagcagcccggcgugccggugcgcuggaagcggugaggacuagucccuguucccagagcccacuuuuuuuucuuuuuuugaaauaaaauagccugucuuucagaucucaaaggcucuuuucagagccaccaaaaaaaaaaaaaaaaaaaaaaaaaaaaaaaaaaaaaaaaaaaaaaaaaaaaaaaaaaaaaaaaagaauu

SEQ ID NO: 35389 - RNA, 1736 nt, Artificial Sequence
  mRNA product Design a-2 (hSL-A64-N5) comprising derived and/or modified sequence from LASV(G3010-SLE-2013;Clade IV)__AIT17344__GPCmut9 (opt1)
aggagaguccgcucagccagguugcagaagcggcuuagcguguguccuaaucuucucucugcguguagguaggccugugccgcaaacaagcuuaccaugggccagaucgugaccuucuuccaggaggucccccacgugaucgaggaggugaugaacaucguccugaucgcccucagcauccuggccgugcugaaggggcucuacaacuucgcgaccugcggccugguggggcuggucacguuccuccugcugugcggccgcuccugcaccaccagccucuacaaggggguguacgagcugcagacccuggagcucaacauggagacgcugaacaugaccaugccgcuguccugcaccaagaacaacagccaccacuacaucauggugggcaacgagaccggccucgagcugacgcugaccaacaccuccaucaucaaccacaaguucugcaaccucagcgacgcccacaagaagaaccuguacaaccacgcccugauguccaucaucagcaccuuccaccucuccauccccaacuucaaccaguacgaggccaugagcugcgacuucaacgggggcaagaucuccguccaguacaaccugagccacuccuacgccggggacgcggccagccacugcggcacgguggccaacggggugcugcagaccuucaugcggauggccuggggcggcuccuacaucgcgcucgacagcgggugcggcaagugggacugcaucaugaccuccuaccaguaccugaucauccagaacaccacgugggaggaccacugccaguucagccgccccucccccaucggguaccugggccuccugagccagcggacccgcgacaucuacaucagccggcgccugcucggcaccuucaccuggacgcuguccgacagcgaggggaaggacaccccgggcggguacugccugacccgguggaugcucaucgaggccgagcugaagugcuucggcaacaccgccgucgccaagugcaacgagaagcacgacgaggaguucugcgacaugcugcgccucuucgacuucaacaagcaggccauccagcggcugaagacggaggcgcagauguccauccagcugaucaacaaggccgugaacgcccucaucaacgaccagcugaucaugaagaaccaccuccgcgacaucaugugcauccccuacugcaacuacagcaaguacugguaccugaaccacaccaccaccggcaagacgucccugcccaagugcuggcuggugagcaacggcuccuaccucaacgagacccacuucagcgacgacaucgagcagcaggccgacaacaugaucaccgagaugcugcagaaggaguacauggagcggcaggggaagacgccccugggccucgucgaccuguucguguucuccaccagcuucuaccugaucuccaucuuccugcaccucgugaagaucccgacccaccgccacaucgucggcaagagcugccccaagccccaccggcugaaccacauggggaucugcuccugcgggcuguacaagcagcccggcgugccggugcgcuggaagcggugaggacuagucccuguucccagagcccacuuuuuuuucuuuuuuugaaauaaaauagccugucuuucagaucucaaaggcucuuuucagagccaccaaaaaaaaaaaaaaaaaaaaaaaaaaaaaaaaaaaaaaaaaaaaaaaaaaaaaaaaaaaaaaaaagaauu

SEQ ID NO: 35390 - RNA, 1736 nt, Artificial Sequence
  mRNA product Design a-2 (hSL-A64-N5) comprising derived and/or modified sequence from LASV(G502-SLE-2009;Clade IV)__AIT17126__GPCmut9 (opt1)
aggagaguccgcucagccagguugcagaagcggcuuagcguguguccuaaucuucucucugcguguagguaggccugugccgcaaacaagcuuaccaugggccagaucgugaccuucuuccaggaggucccccacgugaucgaggaggugaugaacaucguccugaucgcccucagcauccuggccgugcugaaggggcucuacaacuucgcgaccugcggccugguggggcugcucacguuccugcugcucugcggccgcuccugcaccaccgggcuguacaagggcgucuacgagcugcagacccucgagcugaacauggagacgcugaacaugaccaugccgcucagcugcaccaagaacaacucccaccacuacaucauggugggcaacgagaccgggcuggagcugacgcucaccaacaccagcaucaucaaccacaaguucugcaaccuguccgacgcccacaagaagaaccuguacgaccacgcccucaugagcaucaucuccaccuuccaccugagcauccccaacuucaaccaguacgaggccauguccugcgacuucaacggcgggaagaucagcgugcaguacaaccugucccacagcuacgccggcgacgcggccgaccacugcgggacggucgccaacggcgugcuccagaccuucaugcggauggccuggggcggguccuacaucgcgcuggacagcggcugcgggcggugggacugcaucaugaccuccuaccaguaccugaucauccagaacaccacgugggaggaccacugccaguucagccgccccucccccaucggcuaccucggccugcugagccagcggacccgcgacaucuacaucucccggcgccuccuggggaccuucaccuggacgcugagcgacagcgagggcaaggacacccccgggggcuacugccucacccgguggaugcugaucgaggccgagcugaagugcuucgggaacaccgccguggccaagugcaacgagaagcacgacgaggaguucugcgacaugcuccgccuguucgacuucaacaagcaggccauccagcggcugaaggcggaggcccagauguccauccagcucaucaacaaggccgucaacgcccugaucaacgaccagcuggugaugaagaaccaccuccgcgacaucaugugcauccccuacugcaacuacagccgguacugguaccugaaccacacgaccaccggccgcaccucccugcccaagugcuggcucgugagcaacggguccuaccugaacgagacgcacuucagcgacgacaucgagcagcaggccgacaacaugaucaccgagaugcugcagaaggaguacauggagcggcagggcaagaccccgcucgggcuggucgaccuguucguguucuccaccagcuucuaccugaucuccaucuuccuccaccuggugaagaucccgacgcaccgccacaucgucggcaagagcugccccaagccccaccggcugaaccacauggggaucugcuccugcggccucuacaagcagcccggcgugccggugaaguggaagcgcugaggacuagucccuguucccagagcccacuuuuuuuucuuuuuuugaaauaaaauagccugucuuucagaucucaaaggcucuuuucagagccaccaaaaaaaaaaaaaaaaaaaaaaaaaaaaaaaaaaaaaaaaaaaaaaaaaaaaaaaaaaaaaaaaagaauu

SEQ ID NO: 35391 - RNA, 1736 nt, Artificial Sequence
  mRNA product Design a-2 (hSL-A64-N5) comprising derived and/or modified sequence from LASV(G733-SLE-2010;Clade IV)__AIT17154__GPCmut9 (opt1)
aggagaguccgcucagccagguugcagaagcggcuuagcguguguccuaaucuucucucugcguguagguaggccugugccgcaaacaagcuuaccaugggccagaucgugaccuucuuccaggaggucccccacgugaucgaggaggugaugaacaucguccugaucgcccucagcauccuggccgugcugaaggggcucuacaacuucgcgaccugcggcaucguggggcuggucuccuuccugcuccugugcggccgcagcugcacgaccucccuguacaaggggguguacgagcuccagacccuggagcugaacauggagacccucaacaugacgaugccgcugagcugcaccaagaacaacucccaccacuacaucauggugggcaacgagaccggccuggagcucacccugacgaacaccagcaucaucaaccacaaguucugcaaccuguccgacgcccacaagaagaaccucuacgaccacgcccugaugagcaucaucuccaccuuccaccugagcauccccaacuucaaccaguacgaggccauguccugcgacuucaacgggggcaagaucagcguccaguacaaccucucccacagcuacgccggggacgcggccaaccacugcggcaccaucgccaacggggugcugcagacguucaugcggauggccuggggcggcuccuacaucgcgcuggacagcgggugcgaccggugggacugcaucaugaccuccuaccaguaccucaucauccagaacaccaccugggaggaccacugccaguucagccgccccucccccaucggcuaccuggggcugcucagccagcggacgcgcgacaucuacaucagccggcgccugcugggcaccuucaccuggacccucuccgacagcgagggcaaggacacgcccgggggcuacugccugacccgguggaugcugaucgaggccgagcucaagugcuucgggaacaccgccguggccaagugcaacgagaagcacgacgaggaguucugcgacaugcugcgccuguucgacuucaacaagcaggccauccagcggcucaaggcggaggcccagauguccauccagcugaucaacaaggccgucaacgcccugaucaacgaccagcucaucaugaagaaccaccuccgcgacaucaugugcauccccuacugcaacuacagcaaguacugguaccugaaccacaccacgaccgggaagaccucccugcccaagugcuggcuggugagcaacggcuccuaccugaacgagacccacuucagcgacgacaucgagcagcaggccgacaacaugaucacggagaugcuccagaaggaguacauggagcggcagggcaagaccccgcuggggcugguggaccucuucgucuucuccaccagcuucuaccugaucuccaucuuccugcaccuggugaagaucccgacccaccgccacguggucggcaagagcugccccaagccccaccggcucaaccacauggggaucugcuccugcggccuguacgggcagcccggcgugccggugaaguggaagcgcugaggacuagucccuguucccagagcccacuuuuuuuucuuuuuuugaaauaaaauagccugucuuucagaucucaaaggcucuuuucagagccaccaaaaaaaaaaaaaaaaaaaaaaaaaaaaaaaaaaaaaaaaaaaaaaaaaaaaaaaaaaaaaaaaagaauu

SEQ ID NO: 35392 - RNA, 1736 nt, Artificial Sequence
  mRNA product Design a-2 (hSL-A64-N5) comprising derived and/or modified sequence from MOPV/LASV reassortant(IGS-1;Clade IV)__AFY05576__GPCmut9 (opt1)
aggagaguccgcucagccagguugcagaagcggcuuagcguguguccuaaucuucucucugcguguagguaggccugugccgcaaacaagcuuaccaugggccagaucgugaccuucuuccaggaggucccccacgugaucgaggaggugaugaacaucguccugaucgcccucagcgugcuggccgugcugaaggggcucuacaacuucgcgaccugcggccuggucgggcuggugacguuccuccugcugugcggccgcuccugcaccaccagccucuacaaggggguguacgagcugcagacccuggagcucaacauggagacgcugaacaugaccaugccgcuguccugcaccaagaacaacagccaccacuacaucauggucggcaacgagaccggccucgagcugacgcugaccaacaccuccaucaucaaccacaaguucugcaaccucagcgacgcccacaagaagaaccuguacgaccacgcccugauguccaucaucagcaccuuccaccucuccauccccaacuucaaccaguacgaggccaugagcugcgacuucaacgggggcaagaucuccgugcaguacaaccugagccacuccuacgccggggacgcggccaaccacugcggcacgguggccaacgggguccugcagaccuucaugcggauggccuggggcggcagcuacaucgcgcucgacuccgggugcggcaacugggacugcaucaugaccagcuaccaguaccugaucauccagaacaccacgugggaggaccacugccaguucucccggcccagccccaucggguaccugggccuccugucccagcgcacccgggacaucuacaucagccgccggcugcucggcaccuucaccuggacgcugagcgacuccgagggggaggacaccccgggcggguacugccugacccgcuggaugcucaucgaggccgagcugaagugcuucggcaacaccgccguggccaagugcaacgagaagcacgacgaggaguucugcgacaugcugcggcuguucgacuucaacaagcaggccauccagcgccugaaggcggaggcccagaugagcauccagcugaucaacaaggccgugaacgcccucaucaacgaccagcugaucaugaagaaccaccuccgggacaucaugugcauccccuacugcaacuacuccaaguacugguaccucaaccacacgaccaccggccgcaccagccugcccaagugcuggcuggucuccaacggcagcuaccucaacgagacgcacuucuccgacgacaucgagcagcaggccgacaacaugaucaccgagaugcugcagaaggaguacauggagcggcaggggaagacgccccugggccucguggaccuguucguguucagcaccuccuucuaccugaucagcaucuuccugcaccucgucaagaucccgacccaccgccacaucguggggaaguccugccccaagccccaccggcugaaccacaugggcaucugcagcugcgggcuguacaagcagcccggcgugccggucaaguggaagcgcugaggacuagucccuguucccagagcccacuuuuuuuucuuuuuuugaaauaaaauagccugucuuucagaucucaaaggcucuuuucagagccaccaaaaaaaaaaaaaaaaaaaaaaaaaaaaaaaaaaaaaaaaaaaaaaaaaaaaaaaaaaaaaaaaagaauu

SEQ ID NO: 35393 - RNA, 1736 nt, Artificial Sequence
  mRNA product Design a-2 (hSL-A64-N5) comprising derived and/or modified sequence from LASV(LM765-SLE-2012;Clade IV)__AIT17814__GPCmut9 (opt1)
aggagaguccgcucagccagguugcagaagcggcuuagcguguguccuaaucuucucucugcguguagguaggccugugccgcaaacaagcuuaccaugggccagaucgugaccuucuuccaggaggucccccacgugaucgaggaggugaugaacaucguccugaucgcccucagcauccuggccgugcugaaggggcucuacaacuucgcgaccugcggccugguggggcuggucacguuccuccugcugugcggccgcuccugcaccaccagccucuacaaggggguguacgagcugcagacccuggagcucaacauggagacgcugaacaugaccaugccgcuguccugcaccaagaacaacagccaccacuacaucauggugggcaacgagaccggccucgagcugacgcugaccaacaccuccaucaucgaccacaaguucugcaaccucagcgacgcccaccggaagaaccuguacgaccacgcccugauguccaucaucagcaccuuccaccucuccauccccaacuucaaccaguacgaggccaugagcugcgacuucaacgggggcaagaucuccguccaguacaaccugagccacuccuacgccaaggacgcggccgaccacugcgggacgguggccaacggcgugcugcagaccuucaugcgcauggccuggggcgggagcuacaucgcgcucgacuccggcugcgggcgcugggacugcaucaugaccagcuaccaguaccugaucauccagaacaccacgugggaggaccacugccaguucucccggcccagccccaucggcuaccuggggcuccugucccagcgcacccgggacaucuacaucagccgccggcugcucggcaccuucaccuggacgcugagcgacuccgagggcaaggacacccccgggggcuacugccugacccgcuggaugcucaucgaggccgagcugaagugcuucgggaacaccgccgucgccaagugcaacgagaagcacgacgaggaguucugcgacaugcugcggcuguucgacuucaacaagcaggccauccagcgccugaaggcggaggcccagaugagcauccagcugaucaacaaggccgugaacgcccucaucaacgaccagcugaucaugaagaaccaccuccgggacaucaugugcauccccuacugcaacuacuccaaguacugguaccucaaccacacgaccaccgggaagaccagccugcccaagugcuggcugguguccaacggcagcuaccucaacgagacgcacuucuccgacgacaucgagcagcaggccgacaacaugaucaccgagaugcugcagaaggaguacauggagcgccagggcaagaccccgcuggggcucgucgaccuguucguguucagcaccuccuucuaccugaucagcaucuuccugcaccucgugaagaucccgacgcaccggcacaucgucggcaagcccugccccaagccccaccgccugaaccacauggggaucugcuccugcggccuguacaagcagccgggggugcccgugaaguggaagcggugaggacuagucccuguucccagagcccacuuuuuuuucuuuuuuugaaauaaaauagccugucuuucagaucucaaaggcucuuuucagagccaccaaaaaaaaaaaaaaaaaaaaaaaaaaaaaaaaaaaaaaaaaaaaaaaaaaaaaaaaaaaaaaaaagaauu

SEQ ID NO: 35394 - RNA, 1736 nt, Artificial Sequence
  mRNA product Design a-2 (hSL-A64-N5) comprising derived and/or modified sequence from LASV(LM776-SLE-2012;Clade IV)__AIT17824__GPCmut9 (opt1)
aggagaguccgcucagccagguugcagaagcggcuuagcguguguccuaaucuucucucugcguguagguaggccugugccgcaaacaagcuuaccaugggccagaucgugaccuucuuccaggaggucccccacgugaucgaggaggugaugaacaucguccugaucgcccucagcauccuggccgugcugaaggggcucuacaacuucgcgaccugcggccugguggggcuggucacguuccuccugcugugcggccgcuccugcaccaccagcguguacaaggggguguacgagcuccagacccuggagcugaacauggagacgcucaacaugaccaugccgcuguccugcaccaagaacaacagccaccacuacaucauggucggcaacgagaccggccuggagcucacgcugaccaacaccuccaucaucaaccacaaguucugcaaccugagcgacgcccacaagaagaaccucuacgaccacgcccugauguccaucaucagcaccuuccaccuguccauccccaacuucaaccaguacgaggccaugagcugcgacuucaacgggggcaagaucuccgugcaguacaaccucagccacuccuacgccggggacgcggccaaccacugcggcacgguggccaacgggguccugcagaccuucaugcggauggccuggggcggcagcuacaucgcgcuggacuccgggugcggcaagugggacugcaucaugaccagcuaccaguaccucaucauccagaacaccacgugggaggaccacugccaguucucccgccccagccccaucggguaccugggccugcucucccagcggacccgcgacaucuacaucagccggcgccugcugggcaccuucaccuggacgcucagcgacuccgaggggaaggacaccccgggcggguacugccugacccgguggaugcugaucgaggccgagcucaagugcuucggcaacaccgccguggccaagugcaacgagaagcacgacgaggaguucugcgacaugcugcgccuguucgacuucaacaagcaggccauccagcggcucaaggcggaggcccagaugagcauccagcugaucaacaaggccgugaacgcccugaucaacgaccagcucaucaugaagaaccaccuccgcgacaucaugugcauccccuacugcaacuacuccaaguacugguaccugaaccacacgaccaccggcaagaccagccugcccaagugcuggcuggucuccaacggcagcuaccugaacgagacgcacuucuccgacgacaucgagcagcaggccgacaacaugaucaccgagaugcuccagaaggaguacauggagcggcaggggaagacgccccugggccugguggaccucuucguguucagcaccuccuucuaccugaucagcaucuuccugcaccuggucaagaucccgacccaccgccacaucguggggaaguccugccccaagccccaccggcucaaccacaugggcaucugcagcugcgggcuguacaagcagcccggcgugccgguccgcuggaagcggugaggacuagucccuguucccagagcccacuuuuuuuucuuuuuuugaaauaaaauagccugucuuucagaucucaaaggcucuuuucagagccaccaaaaaaaaaaaaaaaaaaaaaaaaaaaaaaaaaaaaaaaaaaaaaaaaaaaaaaaaaaaaaaaaagaauu

SEQ ID NO: 35395 - RNA, 1736 nt, Artificial Sequence
  mRNA product Design a-2 (hSL-A64-N5) comprising derived and/or modified sequence from LASV(Mad39;Clade IV)__ANH09722__GPCmut9 (opt1)
aggagaguccgcucagccagguugcagaagcggcuuagcguguguccuaaucuucucucugcguguagguaggccugugccgcaaacaagcuuaccaugggccagaucgugaccuucuuccaggaggucccccacgugaucgaggaggugaugaacaucguccugaucgcccucagcauccuggccgugcugaaggggcucuacaacguggcgaccugcggccugaucgggcuggucacguuccuccugcugugcggccgcuccugcaccaccacccucuacaaggggguguacgagcugcaggcccuggagcucaacauggagacgcugaacaugaccaugccgcugagcugcaccaagaacaacucccaccacuacauccgggugggcaacgagaccggccucgagcugacgcugaccaacaccagccucaucaaccacaaguucugcaaccuguccgacgcccacaagaagaaccuguacgaccacgcccucaugagcaucaucuccaccuuccaccugagcauccccaacuucaaccaguacgaggccauguccugcgacuucaacgacgggaagaucagcguccaguacaaccugucccacacguacgcgggcgacaccgccaaccacugcgggaccguggccaacggcgugcuccagaccuucaugcgcauggccuggggcgggagcuacaucgcgcuggacuccggcugcgggggcugggacugcaucaugacgagcuaccaguaccugaucauccagaacaccaccugggaggaccacugccaguucucccggcccagccccaucggguaccucggccugcugucccagcggacccgcgacaucuacaucagccggcgccuccugggcacguucaccuggacccuguccgacagcgaggggaaggacaccccgggcggguacugccucacgcgguggaugcugaucgaggccgagcugaagugcuucggcaacaccgccgucgccaagugcaacgagaagcacgacgaggaguucugcgacaugcuccgccuguucgacuucaacaagcaggccauccagcggcugaaggcggaggcccagaugagcauccagcucaucaacaaggccgugaacgcccugaucaacgaccagcugaucaugaagaaccaccuccgcgacaucaugugcauccccuacugcaacuacuccaaguacugguaccugaaccacaccgugaccggcaagacgagccugcccaagugcuggcucgucuccaacggcagcuaccugaacgagacccacuucuccgacgacaucgagcagcaggccgacaacaugaucaccgagaugcugcagaaggaguacauggagcggcaggggaagacgccccucggccugguggaccuguucguguucagcaccuccuucuaccugaucagcaucuuccuccaccuggucaagaucccgacccaccgccacgugguggggaagcccugccccaagccccaccggcugaaccacaugggcaucugcuccugcggguucuacaagcagccgggcguccccgugcgcuggaagcggugaggacuagucccuguucccagagcccacuuuuuuuucuuuuuuugaaauaaaauagccugucuuucagaucucaaaggcucuuuucagagccaccaaaaaaaaaaaaaaaaaaaaaaaaaaaaaaaaaaaaaaaaaaaaaaaaaaaaaaaaaaaaaaaaagaauu

SEQ ID NO: 35396 - RNA, 1736 nt, Artificial Sequence
  mRNA product Design a-2 (hSL-A64-N5) comprising derived and/or modified sequence from LASV(Z0947-SLE-2011;Clade IV)__AIT17840__GPCmut9 (opt1)
aggagaguccgcucagccagguugcagaagcggcuuagcguguguccuaaucuucucucugcguguagguaggccugugccgcaaacaagcuuaccaugggccagaucgugaccuucuuccaggaggucccccacgugaucgaggaggugaugaacaucguccugaucgcccucagcauccuggccgugcugaaggggcucuacaacuucgcgaccugcggccugguggggcuggucacguuccuccugcugugcggccgcuccugcaccaucagccucuacaaggggguguacgagcugcagacccuggagcucaacauggagacccugaacaugacgaugccgcuguccugcaccaagaacaacagccaccacuacaucauggugggcaacgagaccggccucgagcugacccugacgaacaccuccaucaucaaccacaaguucugcaaccucagcgacgcccacaagaagaaccuguacgaccacgcccugauguccaucaucagcaccuuccaccucuccauccccaacuucaaccaguacgaggccaugagcugcgacuucaacgggggcaagaucuccguccaguacaaccugagccacuccuacgccggggacgcggccaaccacugcggcaccguggccaacggggugcugcagacguucaugcggauggccuggggcggcagcuacaucgcgcucgacuccgggugcgaccggugggacugcaucaugaccagcuaccaguaccugaucauccagaacaccaccugggaggaccacugccaguucucccgccccagccccaucggcuaccuggggcuccugucccagcggacgcgcgacaucuacaucagccggcgccugcucggcaccuucaccuggacccugagcgacuccgagggcaaggacacgcccgggggcuacugccugacccgguggaugcucaucgaggccgagcugaagugcuucgggaacaccgccgucgccaagugcaacgagaagcacgacgaggaguucugcgacaugcugcgccucuucgacuucaacaagcaggccauccagcggcugaaggcggaggcccagaugagcauccagcugaucaacaaggccgugaacgcccucaucaacgaccagcugaucaugaagaaccaccuccgcgacaucaugugcauccccuacugcaacuacuccaaguacugguaccugaaccacaccacgaccgggaagaccagccugcccaagugcuggcugguguccaacggcagcuaccucaacgagacccacuucuccgacgacaucgagcagcaggccgacaacaugaucacggagaugcugcagaaggaguacauggagcggcagggcaagaccccgcuggggcucgucgaccuguucguguucagcaccuccuucuaccugaucagcaucuuccugcaccucgugaagaucccgacccaccgccacaucgucggcaagcccugccccaagccccaccggcugaaccacauggggaucugcuccugcggccuguacaagcagccgggggugcccgugaaguggaagcgcugaggacuagucccuguucccagagcccacuuuuuuuucuuuuuuugaaauaaaauagccugucuuucagaucucaaaggcucuuuucagagccaccaaaaaaaaaaaaaaaaaaaaaaaaaaaaaaaaaaaaaaaaaaaaaaaaaaaaaaaaaaaaaaaaagaauu

SEQ ID NO: 35397 - RNA, 1736 nt, Artificial Sequence
  mRNA product Design a-2 (hSL-A64-N5) comprising derived and/or modified sequence from LASV(Josiah;Clade IV)__NP_694870__GPCmut9 (opt1)
aggagaguccgcucagccagguugcagaagcggcuuagcguguguccuaaucuucucucugcguguagguaggccugugccgcaaacaagcuuaccaugggccagaucgugaccuucuuccaggaggucccccacgugaucgaggaggugaugaacaucguccugaucgcccucagcgugcuggccgugcugaaggggcucuacaacuucgcgaccugcggccuggucgggcuggugacguuccuccugcugugcggccgcuccugcaccaccagccucuacaaggggguguacgagcugcagacccuggagcucaacauggagacgcugaacaugaccaugccgcuguccugcaccaagaacaacagccaccacuacaucauggucggcaacgagaccggccucgagcugacgcugaccaacaccuccaucaucaaccacaaguucugcaaccucagcgacgcccacaagaagaaccuguacgaccacgcccugauguccaucaucagcaccuuccaccucuccauccccaacuucaaccaguacgaggccaugagcugcgacuucaacgggggcaagaucuccgugcaguacaaccugagccacuccuacgccggggacgcggccaaccacugcggcacgguggccaacgggguccugcagaccuucaugcggauggccuggggcggcagcuacaucgcgcucgacuccgggugcggcaacugggacugcaucaugaccagcuaccaguaccugaucauccagaacaccacgugggaggaccacugccaguucucccgccccagccccaucggguaccugggccuccugucccagcggacccgcgacaucuacaucagccggcgccugcucggcaccuucaccuggacgcugagcgacuccgaggggaaggacaccccgggcggguacugccugacccgguggaugcucaucgaggccgagcugaagugcuucggcaacaccgccguggccaagugcaacgagaagcacgacgaggaguucugcgacaugcugcgccucuucgacuucaacaagcaggccauccagcggcugaaggcggaggcccagaugagcauccagcugaucaacaaggccgugaacgcccucaucaacgaccagcugaucaugaagaaccaccuccgcgacaucaugugcauccccuacugcaacuacuccaaguacugguaccugaaccacacgaccaccgggcggaccagccugcccaagugcuggcuggucuccaacggcagcuaccucaacgagacgcacuucuccgacgacaucgagcagcaggccgacaacaugaucaccgagaugcugcagaaggaguacauggagcgccagggcaagacgccccuggggcugguggaccucuucguguucagcaccuccuucuaccugaucagcaucuuccugcaccucgucaagaucccgacccaccggcacaucgugggcaaguccugccccaagccccaccgccugaaccacauggggaucugcagcugcggccuguacaagcagcccggggugccggucaaguggaagcggugaggacuagucccuguucccagagcccacuuuuuuuucuuuuuuugaaauaaaauagccugucuuucagaucucaaaggcucuuuucagagccaccaaaaaaaaaaaaaaaaaaaaaaaaaaaaaaaaaaaaaaaaaaaaaaaaaaaaaaaaaaaaaaaaagaauu

SEQ ID NO: 35398 - RNA, 1733 nt, Artificial Sequence
  mRNA product Design a-2 (hSL-A64-N5) comprising derived and/or modified sequence from LASV(LP;Clade I)__AAF86701__GPCmut9 (opt1)
aggagaguccgcucagccagguugcagaagcggcuuagcguguguccuaaucuucucucugcguguagguaggccugugccgcaaacaagcuuaccaugggccagaucaucaccuucuuccaggaggugccccacgucaucgaggaggugaugaacaucgugcugaucgcccucagccugcuggccauccucaaggggcuguacaacaucgcgaccugcggcaucaucgggcuggucgccuuccucuuccugugcggcaaguccugcagccugacgcucaagggcggguacgagcugcagacccuggagcucaacauggagacccugaacaugaccaugccgcuguccugcacgaagaacagcucccaccacuacauccgcgugggcaacgagaccgggcucgagcugacccugaccaacacgagcaucaucaaccacaaguucugcaaccucuccgacgcccacaagaagaaccuguacgaccacgcccugaugagcaucaucuccaccuuccaccucagcauccccaacuucaaccaguacgaggccauguccugcgacuucaacggcgggaagaucagcgugcaguacaaccugucccacagcuacgcgggcgacgccgccgagcacugcgggaccgucgccaacggcgugcugcagaccuucaugcggauggcguggggcgggcgcuacaucgcccucgacuccggcugcgggaacugggacugcaucaugacgagcuaccaguaccugaucauccagaacaccaccugggaggaccacugccaguucucccggcccagccccaucggcuaccugggccuccugucccagcgcacccgggacaucuacaucagccgccggcugcucgggacguucaccuggacccugagcgacuccgagggcaacgagacccccgggggcuacugccugacgcgcuggaugcucaucgaggccgagcugaagugcuucgggaacaccgccguggccaagugcaacgagaagcacgacgaggaguucugcgacaugcugcggcuguucgacuucaacaagcaggcgauccgccggcugaaggccgaggcccagaugagcauccagcugaucaacaaggccgucaacgcccucaucaacgaccagcugaucaugaagaaccaccuccgcgacaucaugugcauccccuacugcaacuacuccaaguacugguaccucaaccacaccagcuccggccggaccagccugcccaagugcuggcugaucuccaacggcagcuaccucaacgagacgcaguucuccgacgacaucgagcagcaggcggacaacaugaucaccgagaugcugcagaaggaguacaucgagcgccaggggaagaccccgcugggccugguggacaucuucaucuucagcaccuccuucuaccucaucagcaucuuccugcaccugaucaagaucccgacgcaccggcacaucguggggaagcccugccccaagccccaccgccucaaccacaugggcgucugcuccugcgggcuguacaagcacccgggcgugcccaccaaguggaagcggugaggacuagucccuguucccagagcccacuuuuuuuucuuuuuuugaaauaaaauagccugucuuucagaucucaaaggcucuuuucagagccaccaaaaaaaaaaaaaaaaaaaaaaaaaaaaaaaaaaaaaaaaaaaaaaaaaaaaaaaaaaaaaaaaagaauu

SEQ ID NO: 35399 - RNA, 1733 nt, Artificial Sequence
  mRNA product Design a-2 (hSL-A64-N5) comprising derived and/or modified sequence from LASV(803213;Clade II)__AAF86703__GPCmut9 (opt1)
aggagaguccgcucagccagguugcagaagcggcuuagcguguguccuaaucuucucucugcguguagguaggccugugccgcaaacaagcuuaccaugggccagaucaucaccuucuuccaggaggugccccacgucaucgaggaggugaugaacaucgugcugaucgcccucagccugcuggccauccucaaggggaucuacaacgucgcgaccugcggccuguucgggcugaucuccuuccuccugcugugcggccgcagcugcuccgugacguacaaggggguguacgagcuccagacccuggagcugaacauggccaaccucaacaugaccaugccgcugagcugcaccaagaacaacucccaccacuacaucauggucggcaacgagacgggccuggagcucacccugaccaacaccagcaucaucaaccacaaguucugcaaccuguccgacgcccacaagaagaaccucuacgaccacgcccugaugagcaucaucuccacguuccaccugagcauccccaacuucaaccaguacgaggccauguccugcgacuucaacgggggcaagaucagcgugcaguacaaccucucccacagcuucgcgguggacgccgccaaccacugcgggaccaucgccaacggcguccugcagaccuucaugcggauggcguggggcggguccuacaucgcccuggacagcggcugcgggaacugggacugcaucaugaccuccuaccaguaccucaucauccagaacacgaccugggaggaccacugccaguucagccgccccucccccaucggcuaccuggggcugcucagccagcggacccgcgacaucuacaucagccggcgccugcugggcaccuucacguggacccucuccgacagcgagggcaacgaggcccccgggggcuacugccugacccgguggaugcugaucgaggccgagcucaagugcuucgggaacaccgccguggcgaagugcaacgagaagcacgacgaggaguucugcgacaugcugcgccuguucgacuucaacaagcaggccaucaagcggcucaagacggaggcccagauguccauccagcugaucaacaaggccgugaacgcccugaucaacgaccagcucaucaugaagaaccaccuccgcgacaucaugugcauccccuacugcaacuacagccgguacugguaccugaaccacaccgucaccggcaagaccucccugccccgcugcuggcuggugagcaacggguccuaccugaacgagacgcacuucagcgacgacaucgagcagcaggcggacaacaugaucaccgagaugcuccagaaggaguacauggaccggcagggcaagaccccgcugggccugguggaccuguucgucuucuccaccagcuucuaccucaucuccaucuuccugcaccuggugaagaucccgacgcaccgccacaucguggggaagcccugccccaagccccaccggcucaaccacaugggcaucugcagcugcgggcuguacaagcacccgggcguccccgugaaguggaagcgcugaggacuagucccuguucccagagcccacuuuuuuuucuuuuuuugaaauaaaauagccugucuuucagaucucaaaggcucuuuucagagccaccaaaaaaaaaaaaaaaaaaaaaaaaaaaaaaaaaaaaaaaaaaaaaaaaaaaaaaaaaaaaaaaaagaauu

SEQ ID NO: 35400 - RNA, 1733 nt, Artificial Sequence
  mRNA product Design a-2 (hSL-A64-N5) comprising derived and/or modified sequence from LASV(GA391;Clade III)__CAA36645__GPCmut9 (opt1)
aggagaguccgcucagccagguugcagaagcggcuuagcguguguccuaaucuucucucugcguguagguaggccugugccgcaaacaagcuuaccaugggccagaucgugaccuucuuccaggaggucccccacgugaucgaggaggugaugaacaucguccugaucgcccucagcauccuggccauccugaaggggcucuacaacguggcgaccugcggccugaucgggcuggugacguuccuccugcuguccggccgcagcugcucccucaucuacaaggggaccuacgagcugcagacccuggagcucaacauggagacccugaacaugacgaugccgcugagcugcaccaagaacaacucccaccacuacauccgggucggcaacgagaccggccucgagcugacccugacgaacaccagcauccucaaccacaaguucugcaaccuguccgacgcccacaagcgcaaccuguacgaccacagccucauguccaucaucagcaccuuccaccuguccauccccaacuucaaccaguacgaggccaugagcugcgacuucaacgggggcaagaucaccgugcaguacaaccugucccacagcuucgccguggacgccgcggggcacugcggcacgcucgccaacgggguccugcagaccuucaugcggauggccuggggcggcuccuacaucgcccuggacagcgggugcggcaacugggacugcaucaugaccuccuaccaguaccucaucauccagaacaccacgugggacgaccacugccaguucagccgccccucccccaucggguaccugggccugcucagccagcggacccgcgacaucuacaucagccggcgccugcugggcaccuucaccuggacgcucuccgacagcgaggggaacgagaccccgggcggguacugccugacccgguggaugcugaucgaggcggagcucaagugcuucggcaacaccgccguggccaagugcaacgagaagcacgacgaggaguucugcgacaugcugcgccuguucgacuucaacaagcaggccauccggcgccucaagacggaggcccagauguccauccagcugaucaacaaggcggugaacgcccugaucaacgaccagcucaucaugaagaaccaccuccgggacaucaugugcauccccuacugcaacuacagccgcuacugguaccugaaccacaccuccaccgggaagaccagccugccccggugcuggcugaucuccaacggcagcuaccugaacgagacgaaguucuccgacgacaucgagcagcaggccgacaacaugaucaccgagaugcugcagaaggaguacaucgaccgccagggcaagacgccccucgggcuggucgaccuguucguguucagcaccuccuucuaccucaucagcaucuuccugcaccuggugaagaucccgacccaccggcacaucgucggcaagcccugccccaagccccaccgccucaaccacauggggaucugcuccugcggccuguacaagcagccgggggugcccgugcgguggaagcgcugaggacuagucccuguucccagagcccacuuuuuuuucuuuuuuugaaauaaaauagccugucuuucagaucucaaaggcucuuuucagagccaccaaaaaaaaaaaaaaaaaaaaaaaaaaaaaaaaaaaaaaaaaaaaaaaaaaaaaaaaaaaaaaaaagaauu

SEQ ID NO: 35401 - RNA, 1736 nt, Artificial Sequence
  mRNA product Design a-2 (hSL-A64-N5) comprising derived and/or modified sequence from LASV(AV;Clade V)__CCA30314__GPCmut9 (opt1)
aggagaguccgcucagccagguugcagaagcggcuuagcguguguccuaaucuucucucugcguguagguaggccugugccgcaaacaagcuuaccaugggccagaucgugaccuucuuccaggaggucccccacgugaucgaggaggugaugaacaucguccugaucgcccucagcauccuggccgugcugaaggggcucuacaacaucgcgaccugcggccugaucgggcugaucacguuccuccugcugugcggccgcuccugcagcuccaaccucuacaaggggguguacgagcugcagagccuggaccucaacauggagacccugaacaugaccaugccgcuguccugcaccaagaacaacagccaccacuacauccgggucggcaacgacacgggccucgagcugacccugaccaacaccuccauccucaaccacaaguucugcaaccugagcgacgcccacaagaaggaccuguacgaccacgcccucauguccaucaucagcacguuccaccuguccauccccaacuucaaccaguacgaggccaugagcugcgacuucaacgggggcaagaucuccgugcaguacaaccugagccacuccuacgccaucgacgcggccaaccacugcgggaccguggccaacggcauccuccagaccuucaugcgcauggccuggggcgggagcuacaucgcgcuggacuccggcugcgggaacugggacugcaucaugaccagcuaccaguaccugaucauccagaacacgaccugggagaaccacugccaguucucccggcccagccccaucggcuaccucgggcugcugagccagcgcacccgggacaucuacaucucccgccggcuccugggcaccuucacguggacccugagcgacuccgagggcaacgccacccccgggggcuacugccucacccgcuggaugcugaucgaggccgagcugaagugcuucgggaacacggccgucgccaagugcaacgagaagcacgacgaggaguucugcgacaugcuccggcuguucgacuucaacaagcaggcgaucagccgccugaaguccgaggcccagaugagcauccagcucaucaacaaggccgugaacgcccugaucaacgaccagcugaucaugaagaaccaccuccgggacaucaugugcauccccuacugcaacuacuccaaguacugguaccugaaccacaccaucaccggcaagaccagccugcccaagugcuggcucguguccaacgggagcuaccugaacgagacgcacuucuccgacgacaucgagcagcaggccgacaacaugaucaccgagaugcugcagaaggaguacauggagcgccagggcaagaccccgcugggccucgucgaccuguucguguucagcaccuccuucuaccugaucagcaucuuccuccggcuggugaagaucccgacgcaccgccacaucgucgggaagcccugccccaagccccaccggcugaaccacaugggcaucugcuccugcgggcucuacaagcagccgggcgugcccgugcgcuggaagcggugaggacuagucccuguucccagagcccacuuuuuuuucuuuuuuugaaauaaaauagccugucuuucagaucucaaaggcucuuuucagagccaccaaaaaaaaaaaaaaaaaaaaaaaaaaaaaaaaaaaaaaaaaaaaaaaaaaaaaaaaaaaaaaaaagaauu

SEQ ID NO: 35402 - RNA, 1733 nt, Artificial Sequence
  mRNA product Design a-2 (hSL-A64-N5) comprising derived and/or modified sequence from LASV(Togo/2016/7082;Clade VI)__AMR44577__GPCmut9 (opt1)
aggagaguccgcucagccagguugcagaagcggcuuagcguguguccuaaucuucucucugcguguagguaggccugugccgcaaacaagcuuaccaugggccagaucaucaccuucuuccaggaggugccccacgucaucgaggaggugaugaacaucgugcugaucgcccucagccugcuggccauccucaagggggucuacaacguggcgaccugcggcaucaucgggcuggugacguuccuguuccucugcggccgcuccugcagccugaucuacaagggguccuacgagcugcagacccucgagcugaacauggagacccugaacaugaccaugccgcucagcugcacgaagaacuccagccaccacuacauccgggucggcaacgagaccggccuggagcugacccucaccaacacguccaucaucaaccacaaguucugcaaccugagcgacgcccacaagcgcaaccuguacgaccacgcccucauguccauccugagcaccuuccaccuguccauccccaacuucaaccaguacgaggccaugagcugcgacuucaacgggggcaagaucuccgugcaguacaaccucagccacgccuacgcgguggacgccgccgagcacugcgggaccgucgccaacggcgugcugcagaccuucaugcggauggcguggggcggguccuacaucgcccuggacagcggcugcgggaacugggacugcaucaugacguccuaccaguaccucaucauccagaacaccaccugggaggaccacugccaguucagccgccccucccccaucggcuaccuggggcugcucagccagcggacccgcgacaucuacaucagccggcgccugcugggcacguucaccuggacccucuccgacagcgagggcaacgagacccccgggggcuacugccugacgcgguggaugcugaucgaggccgagcucaagugcuucgggaacaccgccguggccaagugcaacgagaagcacgacgaggaguucugcgacaugcugcgccuguucgacuucaacaagcaggcgauccagcggcucaaguccgaggcccagaugagcauccagcugaucaacaaggccgucaacgcccugaucaacgaccagcucaucaugaagaaccaccuccgcgacaugaugugcauccccuacugcaacuacuccaaguacugguaccugaaccacaccagcuccggccggaccagccugcccaagugcuggcugguguccaacgggagcuaccugaacgagacgcacuucuccgacgacaucgagcagcaggccgacaacaugaucaccgagaugcuccagaaggaguacaucgaccgccagggcaagaccccgcugggccugguggaccuguucgucuucagcaccuccuucuaccucaucagcaucuuccugcaccugaucaagaucccgacgcaccggcacaucguggggaagcccugccccaagccccaccgccucaaccacaugggcaucugcuccugcgggcuguacaagcagccgggcgugcccacccgguggaagcgcugaggacuagucccuguucccagagcccacuuuuuuuucuuuuuuugaaauaaaauagccugucuuucagaucucaaaggcucuuuucagagccaccaaaaaaaaaaaaaaaaaaaaaaaaaaaaaaaaaaaaaaaaaaaaaaaaaaaaaaaaaaaaaaaaagaauu

SEQ ID NO: 35403 - RNA, 1733 nt, Artificial Sequence
  mRNA product Design a-2 (hSL-A64-N5) comprising derived and/or modified sequence from LASV(KAK-428;Clade n.d. (VII))__ANH09740__GPCmut9 (opt1)
aggagaguccgcucagccagguugcagaagcggcuuagcguguguccuaaucuucucucugcguguagguaggccugugccgcaaacaagcuuaccaugggccagaucgugaccuucuuccaggaggucccccacgugaucgaggaggugaugaacaucguccugaucgcccucagccugcuggccauccucaaggggcuguacaacuucgcgaccugcggcgugaucgggcugaucacguuccuccugcugugcggccgcuccugcagcgccaccuacaaggggcaguacgagcuccagacccuggagcugaacauggagucccucaacaugaccaugccgcugagcugcacgaagaacaacucccaccacuacauccgggccggcaacaacaccggccuggagcucacccugaccaacacgagcaucaucucccacaaguucugcaaccugagcgacgcccacaagaagaaccucuacgaccacacccugauguccaucaucaccaccuuccaccugagcauccccaacuucaaccaguacgaggccauguccugcgacuucaacgggggcaagaucagcauccaguacaaccucucccacagcuacgcgggggacgccgcccagcacugcggcacgguggccaacgggguccugcagaccuucaugcgcauggcguggggcggcuccuaccuggcccucgacagcgggugccggggcugggacugcaucaucuccagcuaccaguaccugaucauccagaacaccaccugggacgaccacugccaguucucccgccccagccccaucggguaccugggcuucgugagccagaagacgcgggacaucuacaucucccgccggcuccugggcaccuucaccuggacccugagcgacuccgaggggcacgacaugccgggcggguacugccucacgcgcuggaugcugaucgaggccgaccugaagugcuucggcaacaccgccguggccaagugcaacgagaagcacgacgaggaguucugcgacauguggcggcuguucgacuucaacaagcaggcgauccagcgccugaaggccgaggcccagaugaacauccagcugaucaacaaggccgucaacgcccucaucaacgaccagcugaugaugaagaaccaccuccgggacaucaugugcauccccuacugcaacuacagcaaguucugguaccucaacaacaccaccacggggcgcaccucccugccccggugcuggcugaucagcaacggcuccuaccucaacgagacccacuucagcgacgacaucgagcagcaggcggacaacaugaucaccgagaugcugcagaaggaguacauggaccgccagggcaagacgccccuggggcucguggaccuguucguguucuccaccagcuucuaccugaucaccaucuuccugcaccucgucaagaucccgacccaccggcacaucgugggcaagcccugccccaagccccaccgccugaaccacauggggaucugcuccugcggccuguacaagcagccgggggugcccguccgguggaagcgcugaggacuagucccuguucccagagcccacuuuuuuuucuuuuuuugaaauaaaauagccugucuuucagaucucaaaggcucuuuucagagccaccaaaaaaaaaaaaaaaaaaaaaaaaaaaaaaaaaaaaaaaaaaaaaaaaaaaaaaaaaaaaaaaaagaauu

SEQ ID NO: 35404 - RNA, 1733 nt, Artificial Sequence; identical to SEQ ID NO: 35398
  mRNA product Design a-2 (hSL-A64-N5) comprising derived and/or modified sequence from LASV(Pinneo-NIG-1969;Clade I)__AIT17836__GPCmut9 (opt1)

SEQ ID NO: 35405 - RNA, 1733 nt, Artificial Sequence
  mRNA product Design a-2 (hSL-A64-N5) comprising derived and/or modified sequence from LASV(ISTH0009-NIG-2011;Clade II)__AIT17404__GPCmut9 (opt1)
aggagaguccgcucagccagguugcagaagcggcuuagcguguguccuaaucuucucucugcguguagguaggccugugccgcaaacaagcuuaccaugggccagaucaucaccuucuuccaggaggugccccacgucaucgaggaggugaugaacaucgugcugaucgcccucagccugcuggccauccucaaggggaucuacaacgucgcgaccugcggccuguucgggcugguguccuuccuccugcugugcggccgcagcugcuccacgaccuacaaggggguguacgagcuccagacccuggagcuggacauggccagccucaacaugaccaugccgcuguccugcacgaagaacaacagccaccacuacaucauggucggcaacgagaccggccuggagcucacccugaccaacacguccaucaucaaccacaaguucugcaaccugagcgacgcccacaagaagaaccucuacgaccacgcccugauguccaucaucagcaccuuccaccuguccauccccaacuucaaccaguacgaggccaugagcugcgacuucaacgggggcaagaucuccgugcaguacaaccucagccacgcguacgccguggacgccgccaaccacugcgggaccaucgcgaacggcguccugcagaccuucaugcggauggccuggggcggguccuacaucgcccuggacagcggcugcggguccugggacugcaucaugacgagcuaccaguaccucaucauccagaacaccaccugggaggaccacugccaguucucccgccccagccccaucggcuaccuggggcugcucagccagcggacccgcgacaucuacaucucccggcgccugcugggcacguucaccuggacccucagcgacuccgagggcaacgagacccccgggggcuacugccugacgcgguggaugcugaucgaggccgagcucaagugcuucgggaacaccgccguggcgaagugcaacgagaagcacgacgaggaguucugcgacaugcugcgccuguucgacuucaacaagcaggccauccggcgccucaagaccgaggcccagaugagcauccagcugaucaacaaggccgugaacgcccugaucaacgaccagcucaucaugaagaaccaccuccgggacaucaugugcaucccguacugcaacuacuccaaguacugguaccugaaccacaccgucacgggcaagaccagccugccccgcugcuggcugguguccaacgggagcuaccugaacgagacccacuucuccgacgacaucgagcagcaggcggacaacaugaucaccgagcuccugcagaaggaguacauggaccggcagggcaagacgccccugggccugguggaccucuucgucuucagcaccuccuucuaccugaucagcaucuuccugcaccucaucaagaucccgacccaccgccacaucaccgggaagcccugccccaagccccaccggcugaaccacaugggcaucugcuccugcgggcuguacaagcacccgggcgugcccgugaaguggaagcgcugaggacuagucccuguucccagagcccacuuuuuuuucuuuuuuugaaauaaaauagccugucuuucagaucucaaaggcucuuuucagagccaccaaaaaaaaaaaaaaaaaaaaaaaaaaaaaaaaaaaaaaaaaaaaaaaaaaaaaaaaaaaaaaaaagaauu

SEQ ID NO: 35406 - RNA, 1733 nt, Artificial Sequence
  mRNA product Design a-2 (hSL-A64-N5) comprising derived and/or modified sequence from LASV(ISTH2010-NIG-2012;Clade II)__AIT17482__GPCmut9 (opt1)
aggagaguccgcucagccagguugcagaagcggcuuagcguguguccuaaucuucucucugcguguagguaggccugugccgcaaacaagcuuaccaugggccagaucaucaccuucuuccaggaggugccccacgucaucgaggaggugaugaacaucgugcugaucgcccucagccugcuggccauccucaaggggaucuacaacgucgcgaccugcggccuguucgggcugguguccuuccuccugcugugcggccgcagcugcuccacgaccuacaaggggguguacgagcuccagacccuggagcuggacauggccagccucaacaugaccaugccgcuguccugcacgaagaacaacagccaccacuacaucauggucggcaacgagaccggccuggagcucacccugaccaacacguccaucaucaaccacaaguucugcaaccugagcgacgcccacaagaagaaccucuacgaccacgcccugauguccaucaucagcaccuuccaccuguccauccccaacuucaaccaguacgaggccaugagcugcgacuucaacgggggcaagaucuccgugcaguacaaccucagccacgcguacgccguggacgccgccaaccacugcgggaccaucgcgaacggcguccugcagaccuucaugcggauggccuggggcggguccuacaucgcccuggacagcggcugcggguccugggacugcaucaugacgagcuaccaguaccucaucauccagaacaucaccugggaggaccacugccaguucucccgccccagccccaucggcuaccuggggcugcucagccagcggacccgcgacaucuacaucucccggcgccugcugggcaccuucacguggacccucagcgacuccgagggcaacgagacccccgggggcuacugccugacccgguggaugcugaucgaggccgagcucaagugcuucgggaacacggccguggcgaagugcaacgagaagcacgacgaggaguucugcgacaugcugcgccuguucgacuucaacaagcaggccauccggcgccucaagaccgaggcccagaugagcauccagcugaucaacaaggccgugaacgcccugaucaacgaccagcucaucaugaagaaccaccuccgggacaucaugugcauccccuacugcaacuacuccaaguacugguaccugaaccacaccgucaccggcaagacgagccugccccgcugcuggcugguguccaacgggagcuaccugaacgagacccacuucuccgacgacaucgagcagcaggcggacaacaugaucaccgagcuccugcagaaggaguacaucgaccggcagggcaagaccccgcugggccugguggaccucuucgucuucagcacguccuucuaccugaucagcaucuuccugcaccucgugaagaucccgacccaccgccacguggucgggaagcccugccccaagccccaccggcugaaccacaugggcaucugcuccugcgggcuguacaagcacccgggcgugcccgugaaguggaagcgcugaggacuagucccuguucccagagcccacuuuuuuuucuuuuuuugaaauaaaauagccugucuuucagaucucaaaggcucuuuucagagccaccaaaaaaaaaaaaaaaaaaaaaaaaaaaaaaaaaaaaaaaaaaaaaaaaaaaaaaaaaaaaaaaaagaauu

SEQ ID NO: 35407 - RNA, 1733 nt, Artificial Sequence
  mRNA product Design a-2 (hSL-A64-N5) comprising derived and/or modified sequence from LASV(Lassa virus/H.sapiens-wt/NGA/2015/ISTH_0543;Clade II)__AVO03639__GPCmut9 (opt1)
aggagaguccgcucagccagguugcagaagcggcuuagcguguguccuaaucuucucucugcguguagguaggccugugccgcaaacaagcuuaccaugggccagaucaucaccuucuuccaggaggugccccacgucaucgaggaggugaugaacaucgugcugaucgcccucagccugcuggccauccucaaggggaucuacaacgucgcgaccugcggccuguucgggcugguguccuuccuccugcugugcggccgcagcugcuccacgaccuacaaggggguguacgagcuccagacccuggagcuggacauggccaaccucaacaugaccaugccgcugagcugcacgaagaacaacucccaccacuacaucauggucggcaacgagaccggccuggagcucacccugaccaacacgagcaucaucaaccacaaguucugcaaccuguccgacgcccacaagaagaaccucuacgaccacgcccugaugagcaucaucuccaccuuccaccugagcauccccaacuucaaccaguacgaggccauguccugcgacuucaacgggggcaagaucagcgugcaguacaaccucucccacaccuacgcgguggacgccgccaaccacugcgggaccaucgccaacggcguccugcagacguucaugcggauggcguggggcgggagcuacaucgcccuggacuccggcugcgggagcugggacugcaucaugaccuccuaccaguaccucgugauccagaacaccaccugggaggaccacugccaguucagccgccccucccccaucggcuaccuggggcugcucagccagcggacgcgcgacaucuacaucagccggcgccugcugggcaccuucaccuggacccucuccgacagcgagggcaacgagacgcccgggggcuacugccugacccgguggaugcugaucgaggccgagcucaagugcuucgggaacaccgccguggccaagugcaacgagaagcacgacgaggaguucugcgacaugcugcgccuguucgacuucaacaagcaggcgauccggcgccucaagaccgaggcccagauguccauccagcugaucaacaaggccgucaacgcccugaucaacgaccagcucaucaugaagaaccaccuccgggacaucaugugcauccccuacugcaacuacagcaaguacugguaccugaaccacacggugaccggcaagaccucccugccccgcugcuggcuggugagcaacggguccuaccugaacgagacccacuucagcgacgacaucgagcagcaggccgacaacaugaucacggagcuccugcagaaggaguacaucgaccggcagggcaagaccccgcugggccuggucgaccucuucguguucuccaccagcuucuaccugaucuccaucuuccugcaccucgugaagaucccgacccaccgccacaucacggggaagcccugccccaagccccaccggcugaaccacaugggcaucugcagcugcgggcuguacaagcacccgggcguccccgugaaguggaagcgcugaggacuagucccuguucccagagcccacuuuuuuuucuuuuuuugaaauaaaauagccugucuuucagaucucaaaggcucuuuucagagccaccaaaaaaaaaaaaaaaaaaaaaaaaaaaaaaaaaaaaaaaaaaaaaaaaaaaaaaaaaaaaaaaaagaauu

SEQ ID NO: 35408 - RNA, 1733 nt, Artificial Sequence
  mRNA product Design a-2 (hSL-A64-N5) comprising derived and/or modified sequence from LASV(Lassa virus/H.sapiens-wt/NGA/2016/ISTH_0009;Clade II)__AVO03571__GPCmut9 (opt1)
aggagaguccgcucagccagguugcagaagcggcuuagcguguguccuaaucuucucucugcguguagguaggccugugccgcaaacaagcuuaccaugggccagaucaucaccuucuuccaggaggugccccacgucaucgaggaggugaugaacaucgugcugaucgcccucagccugcuggccauccucaaggggaucuacaacgucgcgaccugcggccugcuggggcucguguccuuccugcugcucugcggccgcagcugcuccacgaccuacaaggggguguacgagcugcagacccuggagcucgacauggccagccugaacaugaccaugccgcuguccugcacgaagaacaacagccaccacuacaucauggucggcaacgagaccggccucgagcugacccugaccaacacguccaucaucaaccacaaguucugcaaccucagcgacgcccacaagaagaaccuguacgaccacgcccugauguccaucaucagcaccuuccaccucuccauccccaacuucaaccaguacgaggccaugagcugcgacuucaacgggggccggaucuccgugcaguacaaccugagccacuccuacgcgguggacgccgccaaccacugcgggaccaucgccaacggcguccugcagaccuucaugcgcauggcguggggcgggagcuacaucgcccucgacuccggcugcgggagcugggacugcaucaugacguccuaccaguaccugaucauccagaacaccaccugggaggaccacugccaguucagccggcccagccccaucggcuaccuggggcuccugucccagcgcacccgggacaucuacaucagccgccggcugcucggcacguucaccuggacccuguccgacagcgagggcaacgagacccccgggggcuacugccugacgcgcuggaugcucaucgaggccgagcugaagugcuucgggaacaccgccguggccaagugcaacgagaagcacgacgaggaguucugcgacaugcugcggcuguucgacuucaacaagcaggcgauccgccggcugaagaccgaggcccagauguccauccagcugaucaacaaggccgugaacgcccucaucaacgaccagcugaucaugaagaaccaccuccgcgacaucaugugcaucccguacugcaacuacagcaaguacugguaccucaaccacaccgucacgggcaagaccucccugccccggugcuggcuggugagcaacggguccuaccucaacgagacccacuucagcgacgacaucgagcagcaggccgacaacaugaucaccgagcugcugcagaaggaguacaucgaccgccagggcaagacgccccugggccucguggaccuguucgucuucuccaccagcuucuaccugaucuccaucuuccuccaccuggugaagaucccgacccaccggcacaucaccgggaagcccugccccaagccccaccgccugaaccacaugggcaucugcagcugcgggcucuacaaccacccgggcgugcccgucaaguggaagcggugaggacuagucccuguucccagagcccacuuuuuuuucuuuuuuugaaauaaaauagccugucuuucagaucucaaaggcucuuuucagagccaccaaaaaaaaaaaaaaaaaaaaaaaaaaaaaaaaaaaaaaaaaaaaaaaaaaaaaaaaaaaaaaaaagaauu

SEQ ID NO: 35409 - RNA, 1733 nt, Artificial Sequence
  mRNA product Design a-2 (hSL-A64-N5) comprising derived and/or modified sequence from LASV(Lassa virus/H.sapiens-wt/NGA/2016/ISTH_0017;Clade II)__AVO03567__GPCmut9 (opt1)
aggagaguccgcucagccagguugcagaagcggcuuagcguguguccuaaucuucucucugcguguagguaggccugugccgcaaacaagcuuaccaugggccagaucaucaccuucuuccaggaggugccccacgucaucgaggaggugaugaacaucgugcugaucgcccucagccugcuggccauccucaaggggaucuacaacgucgcgaccugcggccuguucgggcugguguccuuccuccugcugugcggccgcagcugcuccacgaccuacaaggggguguacgagcuccagacccuggagcuggacauggccagccucaacaugaccaugccgcuguccugcacgaagaacaacagccaccacuacaucauggucggcaacgagaccggccuggagcucacccugaccaacacguccaucaucaaccacaaguucugcaaccugagcgacgcccacaagaagaaccucuacgaccacgcccugauguccaucaucagcaccuuccaccuguccauccccaacuucaaccaguacgaggccaugagcugcgacuucaacgggggcaagaucuccgugcaguacaaccucagccacaccuacgcgaucgacgccgccaaccacugcgggaccaucgccaacggcgugcugcagacguucaugcggauggcguggggcggguccuacaucgcccuggacagcggcugcggguccugggacugcaucaugaccagcuaccaguaccucaucauccagaacaccaccugggaggaccacugccaguucucccgccccagccccaucggcuaccuggggcugcucagccagcggacgcgcgacaucuacaucucccggcgccugcugggcaccuucaccuggacccucagcgacuccgagggcaacgagacgcccgggggcuacugccugacccgguggaugcugaucgaggccgagcucaagugcuucgggaacaccgccgucgccaagugcaacgagaagcacgacgaggaguucugcgacaugcugcgccuguucgacuucaacaagcaggcgauccggcgccucaagaccgaggcccagaugagcauccagcugaucaacaaggccgugaacgcccugaucaacgaccagcucaucaugaagaaccaccuccgggacaucaugugcauccccuacugcaacuacuccaaguacugguaccugaaccacacggugaccggcaagaccagccugccccgcugcuggcuggucuccaacgggagcuaccugaacgagacccacuucuccgacgacaucgagcagcaggccgacaacaugaucacggagcuccugcagaaggaguacauggaccggcagggcaagaccccgcugggccugguggaccucuucguguucagcaccuccuucuaccugaucagcaucuuccugcaccucguccgcaucccgacccaccggcacgugaucgggaagcccugccccaagccccaccgccugaaccacaugggcaucugcuccugcgggcuguacaagcacccgggcgugcccgucaaguggaagcggugaggacuagucccuguucccagagcccacuuuuuuuucuuuuuuugaaauaaaauagccugucuuucagaucucaaaggcucuuuucagagccaccaaaaaaaaaaaaaaaaaaaaaaaaaaaaaaaaaaaaaaaaaaaaaaaaaaaaaaaaaaaaaaaaagaauu

SEQ ID NO: 35410 - RNA, 1733 nt, Artificial Sequence
  mRNA product Design a-2 (hSL-A64-N5) comprising derived and/or modified sequence from LASV(Lassa virus/H.sapiens-wt/NGA/2018/ISTH_0959;Clade II)__AVV65099__GPCmut9 (opt1)
aggagaguccgcucagccagguugcagaagcggcuuagcguguguccuaaucuucucucugcguguagguaggccugugccgcaaacaagcuuaccaugggccagaucaucaccuucuuccaggaggugccccacgucaucgaggaggugaugaacaucgugcugaucgcccucagccugcuggccauccucaaggggaucuacaacgucgugaccugcggccuguucgggcugguguccuuccuccugcugugcggccgcagcugcuccacgaccuacaagggggucuacgagcuccagacccuggagcuggacauggcgagccucaacaugaccaugccgcuguccugcacgaagaacaacagccaccacuacaucauggugggcaacgagaccggccuggagcucacccugaccaacacguccaucaucaaccacaaguucugcaaccugagcgacgcccacaagaagaaccucuacgaccacgcccugauguccaucaucagcaccuuccaccuguccauccccaacuucaaccaguacgaggccaugagcugcgacuucaacgggggcaagaucuccgugcaguacaaccucagccacgccuacgcgaucgacgccgccaaccacugcgggaccaucgccaacggcguccugcagaccuucaugcggauggcguggggcggguccuacaucgcccuggacagcggcugcggguccugggacugcaucaugacgagcuaccaguaccucaucauccagaacaccaccugggaggaccacugccaguucucccgccccagccccaucggcuaccuggggcugcucagccagcggacccgcgacaucuacaucucccggcgccugcugggcacguucaccuggacccucagcgacuccgagggcaacgagacccccgggggcuacugccugacgcgguggaugcugaucgaggccgagcucaagugcuucgggaacaccgccguggccaagugcaacgagaagcacgacgaggaguucugcgacaugcugcgccuguucgacuucaacaagcaggcgauccggcgccucaagaccgaggcccagaugagcauccagcugaucaacaaggccgugaacgcccugaucaacgaccagcucaucaugaagaaccaccuccgggacaucaugugcaucccguacugcaacuacuccaaguacugguaccugaaccacaccgucacgggcaagaccagccugccccgcugcuggcugguguccaacgggagcuaccugaacgagacccacuucuccgacgacaucgagcagcaggccgacaacaugaucaccgagcuccugcagaaggaguacaucgaccggcagggcaagacgccccugggccugguggaccucuucgucuucagcaccuccuucuaccugaucagcaucuuccugcaccucgugaagaucccgacccaccgccacgugaucgggaagcccugccccaagccccaccggcugaaccacaugggcaucugcuccugcgggcuguacaagcacccgggcguccccgugaaguggaagcgcugaggacuagucccuguucccagagcccacuuuuuuuucuuuuuuugaaauaaaauagccugucuuucagaucucaaaggcucuuuucagagccaccaaaaaaaaaaaaaaaaaaaaaaaaaaaaaaaaaaaaaaaaaaaaaaaaaaaaaaaaaaaaaaaaagaauu

SEQ ID NO: 35411 - RNA, 1733 nt, Artificial Sequence
  mRNA product Design a-2 (hSL-A64-N5) comprising derived and/or modified sequence from LASV(LASV003-NIG-2008;Clade II)__AIT17580__GPCmut9 (opt1)
aggagaguccgcucagccagguugcagaagcggcuuagcguguguccuaaucuucucucugcguguagguaggccugugccgcaaacaagcuuaccaugggccagaucaucaccuucuuccaggaggugccccacgucaucgaggaggugaugaacaucgugcugaucgcccucagccugcuggccauccucaaggggaucuacaacgucgcgaccugcggccuguucgggcugguguccuuccuccugcugugcggccgcagcugcuccacgaccuacaaggggguguacgagcuccagacccuggagcuggacauggccagccucaacaugaccaugccgcuguccugcacgaagaacaacagccaccacuacaucauggucggcaacgagaccggccuggagcucacccugaccaacacguccaucaucaaccacaaguucugcaaccugagcgacgcccacaagaagaaccucuacgaccacgcccugauguccaucaucagcaccuuccaccuguccauccccaacuucaaccaguacgaggccaugagcugcgacuucaacgggggcaagaucuccgugcaguacaaccucagccacaccuacgcgguggacgccgccaaccacugcgggaccaucgccaacggcguccugcagacguucaugcggauggcguggggcggguccuacaucgcccuggacagcggcugcggguccugggacugcaucaugaccagcuaccaguaccucaucauccagaacaccaccugggaggaccacugccaguucucccgccccagccccaucggcuaccuggggcugcucagccagcggacgcgcgacaucuacaucucccggcgccugcugggcaccuucaccuggacccucagcgacuccgagagcaacgagacgccgggcggguacugccugacccgguggaugcugaucgaggccgagcucaagugcuucggcaacaccgccguggccaagugcaacgagaagcacgacgaggaguucugcgacaugcugcgccuguucgacuucaacaagcaggcgauccggcgccucaaggccgaggcccagauguccauccagcugaucaacaaggccgugaacgcccugaucaacgaccagcucaucaugaagaaccaccuccgggacaucaugugcauccccuacugcaacuacagcaaguacugguaccugaaccacaccgucacggggcgcaccucccugccccggugcuggcuggugagcaacggcuccuaccugaacgagacccacuucagcgacgacaucgagcagcaggcggacaacaugaucaccgagcuccugcagaaggaguacauggaccgccaggggaagacgccccugggccugguggaccucuucgucuucuccaccagcuucuaccugaucuccaucuuccugcaccucgugaagaucccgacccaccggcacgugaucggcaagcccugccccaagccccaccgccugaaccacauggggaucugcagcugcggccuguacaagcacccggggguccccgugaaguggaagcggugaggacuagucccuguucccagagcccacuuuuuuuucuuuuuuugaaauaaaauagccugucuuucagaucucaaaggcucuuuucagagccaccaaaaaaaaaaaaaaaaaaaaaaaaaaaaaaaaaaaaaaaaaaaaaaaaaaaaaaaaaaaaaaaaagaauu

SEQ ID NO: 35412 - RNA, 1733 nt, Artificial Sequence
  mRNA product Design a-2 (hSL-A64-N5) comprising derived and/or modified sequence from LASV(LASV035-NIG-2009;Clade II)__AIT17588__GPCmut9 (opt1)
aggagaguccgcucagccagguugcagaagcggcuuagcguguguccuaaucuucucucugcguguagguaggccugugccgcaaacaagcuuaccaugggccagaucaucaccuucuuccaggaggugccccacgucaucgaggaggugaugaacaucgugcugaucgcccucagccugcuggccauccucaaggggaucuacaacgucgcgaccugcggccuguucgggcugguguccuuccuccugcugugcggccgcagcugcuccacgaccuacaaggggguguacgagcuccagacccuggagcuggacauggccagccucaacaugaccaugccgcuguccugcacgaagaacaacagccaccacuacaucauggucggcaacgagaccggccuggagcucacccugaccaacacguccaucaucaaccacaaguucugcaaccugagcgacgcccacaagaagaaccucuacgaccacgcccugauguccaucaucagcaccuuccaccuguccauccccaacuucaaccaguacgaggccaugagcugcgacuucaacgggggcaagaucuccgugcaguacaaccucagccacgcguacgccguggacgccgccaaccacugcgggaccaucgcgaacggcguccugcagaccuucaugcggauggccuggggcggguccuacaucgcccuggacagcggcugcggguccugggacugcaucaugacgagcuaccaguaccucaucauccagaacaccaccugggaggaccacugccaguucucccgccccagccccaucggcuaccuggggcugcucagccagcggacccgcgacaucuacaucucccggcgccugcugggcacguucaccuggacccucagcgacuccgagggcaacgagacccccgggggcuacugccugacgcgguggaugcugaucgaggccgagcucaagugcuucgggaacaccgccguggcgaagugcaacgagaagcacgacgaggaguucugcgacaugcugcgccuguucgacuucaacaagcaggccauccggcgccucaaggccgaggcccagaugagcauccagcugaucaacaaggccgugaacgcgcugaucaacgaccagcucaucaugaagaaccaccuccgggacaucaugugcauccccuacugcaacuacuccaaguacugguaccugaaccacaccgucaccggcaagacgagccugccccgcugcuggcugguguccaacgggagcuaccugaacgagacccacuucuccgacgacaucgagcagcaggccgacaacaugaucaccgagcuccugcagaaggaguacaucgaccggcagggcaagaccccgcugggccugguggaccucuucgucuucagcacguccuucuaccugaucagcaucuuccugcaccucgugaagaucccgacccaccgccacgugaucgggaagcccugccccaagccccaccggcugaaccacaugggcaucugcuccugcgggcuguacaagcacccgggcguccccgugaaguggaagcgcugaggacuagucccuguucccagagcccacuuuuuuuucuuuuuuugaaauaaaauagccugucuuucagaucucaaaggcucuuuucagagccaccaaaaaaaaaaaaaaaaaaaaaaaaaaaaaaaaaaaaaaaaaaaaaaaaaaaaaaaaaaaaaaaaagaauu

SEQ ID NO: 35413 - RNA, 1733 nt, Artificial Sequence
  mRNA product Design a-2 (hSL-A64-N5) comprising derived and/or modified sequence from LASV(LASV1000-NIG-2009;Clade II)__AIT17782__GPCmut9 (opt1)
aggagaguccgcucagccagguugcagaagcggcuuagcguguguccuaaucuucucucugcguguagguaggccugugccgcaaacaagcuuaccaugggccagaucaucaccuucuuccaggaggugccccacgucaucgaggaggugaugaacaucgugcugaucgcccucagccugcuggccauccucaaggggaucuacaacgucgcgaccugcggccuguucgggcugguguccuuccuccugcugugcggccgcagcugcuccacgaccuacaaggggguguacgagcuccagacccuggagcuggacauggccagccucaacaugaccaugccgcuguccugcacgaagaacaacagccaccacuacaucauggucggcaacgagaccggccuggagcucacccugaccaacacguccaucaucaaccacaaguucugcaaccugagcgacgcccacaagaagaaccucuacgaccacgcccugauguccaucaucagcaccuuccaccuguccauccccaacuucaaccaguacgaggccaugagcugcgacuucaacgggggcaagaucuccgugcaguacaaccucagccacaccuacgcgguggacgccgccaaccacugcgggaccaucgccaacggcguccugcagacguucaugcggauggcguggggcggguccuacaucgcccuggacagcggcugcggguccugggacugcaucaugaccagcuaccaguaccucaucauccagaacaccaccugggaggaccacugccaguucucccgccccagccccaucggcuaccuggggcugcucagccagcggacgcgcgacaucuacaucucccggcgccugcugggcaccuucaccuggacccucagcgacuccgagggcaacgagacgcccgggggcuacugccugacccgguggaugcugaucgaggccgagcucaagugcuucgggaacaccgccguggccaagugcaacgagaagcacgacgaggaguucugcgacaugcugcgccuguucgacuucaacaagcaggcgaucaagcggcucaagaccgaggcccagaugagcauccagcugaucaacaaggccgugaacgcccugaucaacgaccagcucaucaugaagaaccaccuccgcgacaucaugugcauccccuacugcaacuacuccaaguacugguaccugaaccacacggucaccggcaagaccagccugccccggugcuggcugguguccaacgggagcuaccugaacgagacccacuucuccgacgacaucgagcagcaggccgacaacaugaucacggagcuccugcagaaggaguacaucgaccgccagggcaagaccccgcugggccugguggaccucuucgucuucagcaccuccuucuaccugaucagcaucuuccugcaccucgugaagaucccgacccaccggcacguggucgggaagcccugccccaagccccaccgccugaaccacaugggcaucugcuccugcgggcuguacaagcacccgggcgugcccgugaaguggaagcggugaggacuagucccuguucccagagcccacuuuuuuuucuuuuuuugaaauaaaauagccugucuuucagaucucaaaggcucuuuucagagccaccaaaaaaaaaaaaaaaaaaaaaaaaaaaaaaaaaaaaaaaaaaaaaaaaaaaaaaaaaaaaaaaaagaauu

SEQ ID NO: 35414 - RNA, 1733 nt, Artificial Sequence
  mRNA product Design a-2 (hSL-A64-N5) comprising derived and/or modified sequence from LASV(LASV221-NIG-2010;Clade II)__AIT17624__GPCmut9 (opt1)
aggagaguccgcucagccagguugcagaagcggcuuagcguguguccuaaucuucucucugcguguagguaggccugugccgcaaacaagcuuaccaugggccagaucaucaccuucuuccaggaggugccccacgucaucgaggaggugaugaacaucgugcugaucgcccucagccugcuggccauccucaaggggaucuacaacgucgcgaccugcggccuguucgggcugguguccuuccuccugcugugcggccgcagcugcuccacgaccuacaaggggguguacgagcuccagacccuggagcuggacauggccagccucaacaugaccaugccgcuguccugcacgaagaacaacagccaccacuacaucauggucggcaacgagaccggccuggagcucacccugaccaacacguccaucaucaaccacaaguucugcaaccugagcgacgcccacaagaagaaccucuacgaccacgcccugauguccaucaucagcaccuuccaccuguccauccccaacuucaaccaguacgaggccaugagcugcgacuucaacgggggcaagaucuccgugcaguacaaccucagccacaccuacgcgaucgacgccgccaaccacugcgggaccaucgccaacggcgugcugcagacguucaugcggauggcguggggcggguccuacaucgcccuggacagcggcugcggguccugggacugcaucaugaccagcuaccaguaccucaucauccagaacaccaccugggaggaccacugccaguucucccgccccagccccaucggcuaccuggggcugcucagccagcggacgcgcgacaucuacaucucccggcgccugcugggcaccuucaccuggacccucagcgacuccgagggcaacgagacgcccgggggcuacugccugacccgguggaugcugaucgaggccgagcucaagugcuucgggaacaccgccgucgccaagugcaacgagaagcacgacgaggaguucugcgacaugcugcgccuguucgacuucaacaagcaggcgauccggcgccucaagaccgaggcccagaugagcauccagcugaucaacaaggccgugaacgcccugaucaacgaccagcucaucaugaagaaccaccuccgggacaucaugugcauccccuacugcaacuacuccaaguacugguaccugaaccacacggugaccggcaagaccagccugccccgcugcuggcuggucuccaacgggagcuaccugaacgagacccacuucuccgacgacaucgagcagcaggccgacaacaugaucacggagaugcuccagaaggaguacauggaccggcagggcaagaccccgcugggccugguggaccuguucguguucagcaccuccuucuaccucaucagcaucuuccugcaccuggucaagaucccgacccaccgccacgugaucgggaagcccugccccaagccccaccggcucaaccacaugggcaucugcuccugcgggcuguacaagcacccgggcgugcccgucaaguggaagcgcugaggacuagucccuguucccagagcccacuuuuuuuucuuuuuuugaaauaaaauagccugucuuucagaucucaaaggcucuuuucagagccaccaaaaaaaaaaaaaaaaaaaaaaaaaaaaaaaaaaaaaaaaaaaaaaaaaaaaaaaaaaaaaaaaagaauu

SEQ ID NO: 35415 - RNA, 1733 nt, Artificial Sequence
  mRNA product Design a-2 (hSL-A64-N5) comprising derived and/or modified sequence from LASV(LASV237-NIG-2010;Clade II)__AIT17638__GPCmut9 (opt1)
aggagaguccgcucagccagguugcagaagcggcuuagcguguguccuaaucuucucucugcguguagguaggccugugccgcaaacaagcuuaccaugggccagaucaucaccuucuuccaggaggugccccacgucaucgaggaggugaugaacaucgugcugaucgcccucagccugcuggccauccucaaggggaucuacaacgucgcgaccugcggccuguucgggcugguguccuuccuccugcugugcggccgcagcugcuccacgaccuacaaggggguguacgagcuccagacccuggagcuggacauggccagccucaacaugaccaugccgcuguccugcacgaagaacaacagccaccacuacaucauggucggcaacgagaccggccuggagcucacccugaccaacacguccaucaucaaccacaaguucugcaaccugagcgacgcccacaagaaggaccucuacgaccacgcccugauguccaucaucagcaccuuccaccuguccauccccaacuucaaccaguacgaggccaugagcugcgacuucaacgggggcaagaucuccgugcaguacaaccucagccacaccuacgcgguggacgccgccaaccacugcgggaccaucgccaacggcguccugcagacguucaugcggauggcguggggcggguccuacaucgcccuggacagcggcugcggguccugggacugcaucaugaccagcuaccaguaccucaucauccagaacaccaccugggaggaccacugccaguucucccgccccagccccaucggcuaccuggggcugcucagccagcggacgcgcgacaucuacaucucccggcgccugcugggcaccuucaccuggacccucagcgacuccgagggcaacgagacgcccgggggcuacugccugacccgguggaugcugaucgaggccgagcucaagugcuucgggaacaccgccguggccaagugcaacgagaagcacgacgaggaguucugcgacaugcugcgccuguucgacuucaacaagcaggcgauccggcgccucaagaccgaggcccagaugagcauccagcugaucaacaaggccgugaacgcccugaucaacgaccagcucaucaugaagaaccaccuccgggacaucaugugcauccccuacugcaacuacuccaaguacugguaccugaaccacacggucaccggcaagaccagccugccccgcugcuggcugguguccaacgggagcuaccugaacgagacccacuucuccgacgacaucgagcagcaggccgacaacaugaucacggagcuccugcagaaggaguacauggaccggcagggcaagaccccgcugggccugguggaccucuucgucuucagcaccuccuucuaccugaucagcaucuuccugcaccucaucaagaucccgacccaccgccacaucacggggaagcccugccccaagccccaccggcugaaccacaugggcaucugcuccugcgggcuguacaagcacccgggcgugcccgugaaguggaagcgcugaggacuagucccuguucccagagcccacuuuuuuuucuuuuuuugaaauaaaauagccugucuuucagaucucaaaggcucuuuucagagccaccaaaaaaaaaaaaaaaaaaaaaaaaaaaaaaaaaaaaaaaaaaaaaaaaaaaaaaaaaaaaaaaaagaauu

SEQ ID NO: 35416 - RNA, 1733 nt, Artificial Sequence
  mRNA product Design a-2 (hSL-A64-N5) comprising derived and/or modified sequence from LASV(LASV253-NIG-2011;Clade II)__AIT17670__GPCmut9 (opt1)
aggagaguccgcucagccagguugcagaagcggcuuagcguguguccuaaucuucucucugcguguagguaggccugugccgcaaacaagcuuaccaugggccagaucaucaccuucuuccaggaggugccccacgucaucgaggaggugaugaacaucgugcugaucgcccucagccugcuggccauccucaaggggaucuacaacgucgcgaccugcggccuguucgggcugguguccuuccuccugcugugcggccgcagcugcuccacgaccuacaaggggguguacgagcuccagacccuggagcuggacauggccagccucaacaugaccaugccgcuguccugcacgaagaacaacagccaccacuacaucauggucggcaacgagaccggccuggagcucacccugaccaacacguccaucaucaaccacaaguucugcaaccugagcgacgcccacaagaagaaccucuacgaccacgcccugauguccaucaucagcaccuuccaccuguccauccccaacuucaaccaguacgaggccaugagcugcgacuucaacgggggcaagaucuccgugcaguacaaccucagccacaccuacgcgguggacgccgccaaccacugcgggaccaucgccaacggcguccugcagacguucaugcggauggcguggggcggguccuacaucgcccuggacagcggcugcggguccugggacugcaucaugaccagcuaccaguaccucaucauccagaacaccaccugggaggaccacugccaguucucccgccccagccccaucggcuaccuggggcugcucagccagcggacgcgcgacaucuacaucucccggcgccugcugggcaccuucaccuggacccucagcgacuccgagggcaacgagacgcccgggggcuacugccugacccgguggaugcugaucgaggccgagcucaagugcuucgggaacaccgccguggccaagugcaacgagaagcacgacgaggaguucugcgacaugcugcgccuguucgacuucaacaagcaggcgauccggcgccucaaggccgaggcccagaugagcauccagcugaucaacaaggccgugaacgcccugaucaacgaccagcucaucaugaagaaccaccuccgggacaucaugugcaucccguacugcaacuacuccaaguacugguaccugaaccacaccgucacgggccgcaccagccugccccggugcuggcugguguccaacgggagcuaccugaacgagacccacuucuccgacgacaucgagcagcaggcggacaacaugaucaccgagcuccugcagaaggaguacaucgaccgccagggcaagacgccccugggccugguggaccucuucgucuucagcaccuccuucuaccugaucagcaucuuccugcaccucgugaagaucccgacccaccggcacaucaucgggaagcccugccccaagccccaccgccugaaccacaugggcaucugcuccugcgggcuguacaagcacccgggcgugcccgucaaguggaagcggugaggacuagucccuguucccagagcccacuuuuuuuucuuuuuuugaaauaaaauagccugucuuucagaucucaaaggcucuuuucagagccaccaaaaaaaaaaaaaaaaaaaaaaaaaaaaaaaaaaaaaaaaaaaaaaaaaaaaaaaaaaaaaaaaagaauu

SEQ ID NO: 35417 - RNA, 1733 nt, Artificial Sequence
  mRNA product Design a-2 (hSL-A64-N5) comprising derived and/or modified sequence from LASV(LASV254-NIG-2011;Clade II)__AIT17674__GPCmut9 (opt1)
aggagaguccgcucagccagguugcagaagcggcuuagcguguguccuaaucuucucucugcguguagguaggccugugccgcaaacaagcuuaccaugggccagaucaucaccuucuuccaggaggugccccacgucaucgaggaggugaugaacaucgugcugaucgcccucagccugcuggccauccucaaggggaucuacaacgucgcgaccugcggccuguucgggcugguguccuuccuccugcugugcggccgcagcugcuccacgaccuacaaggggguguacgagcuccagacccuggagcuggacaugaccaaccucaacaugacgaugccgcugagcugcaccaagaacaacucccaccacuacaucauggucggcaacgagaccggccuggagcucacccugacgaacaccagcaucaucaaccacaaguucugcaaccuguccgacgcccacaagaagaaccucuacaaccacgcccugaugagcaucaucuccaccuuccaccugagcauccccaacuucaaccaguacgaggccauguccugcgacuucaacgggggcaagaucagcgugcaguacaaccucucccacagcuacgccguggacgcggccaaccacugcgggaccaucgccaacggcguccugcagacguucaugcggauggccuggggcggguccuacaucgcgcuggacagcggcugcgggaacugggacugcaucaugaccuccuaccaguaccucaucauccagaacaccaccugggaggaccacugccaguucagccgccccucccccaucggcuaccuggggcugcucagccagcggacgcgcgacaucuacaucagccggcgccugcugggcaccuucaccuggacccucuccgacagcgagggcaacgagacgcccgggggcuacugccugacccgguggaugcugaucgaggccgagcucaagugcuucgggaacaccgccguggccaagugcaacgagaagcacgacgaggaguucugcgacaugcugcgccuguucgacuucaacaagcaggccauccggcgccucaagaccgaggcgcaggccaacauccagcugaucaacaaggccgugaacgcccugaucaacgaccagcucaucaugaagaaccaccuccgggacaucaugugcauccccuacugcaacuacuccaaguacugguaccugaaccacacggucaccggcaagaccagccugccccgcugcuggcugguguccaacgggagcuaccugaacgagacccacuucuccgacgacaucgagcagcaggccgacaacaugaucacggagcuccugcagaaggaguacauggaccggcagggcaagaccccgcugggccugguggaccucuucgucuucagcaccuccuucuaccugaucagcaucuuccugcaccucgugaagaucccgacccaccgccacgugaucgggaagcccugccccaagccccaccggcugaaccacaugggcaucugcuccugcgggcuguacaagcacccgggcguccccgugaaguggaagcgcugaggacuagucccuguucccagagcccacuuuuuuuucuuuuuuugaaauaaaauagccugucuuucagaucucaaaggcucuuuucagagccaccaaaaaaaaaaaaaaaaaaaaaaaaaaaaaaaaaaaaaaaaaaaaaaaaaaaaaaaaaaaaaaaaagaauu

SEQ ID NO: 35418 - RNA, 1733 nt, Artificial Sequence
  mRNA product Design a-2 (hSL-A64-N5) comprising derived and/or modified sequence from LASV(Nig08-A19;Clade III)__ADU56618__GPCmut9 (opt1)
aggagaguccgcucagccagguugcagaagcggcuuagcguguguccuaaucuucucucugcguguagguaggccugugccgcaaacaagcuuaccaugggccagaucgugaccuucuuccaggaggucccccacgugaucgaggaggugaugaacaucguccugaucgcccucagcauccuggccauccugaaggggcucuacaacaucgcgaccugcggccugaucgggcuggugacguuccuccugcuguccggccgcagcugcuccaugaccuacaaggggguguacgagcuccagacccuggagcugaacaugaacacccucaacaugacgaugccgcugagcugcaccaagaacaacucccaccacuacaucauggucggcaacgagaccggccuggagcucacccugacgaacaccagccugcuccaccacaaguucugcaaccuguccgacgcccacaagaagaaccuguacgaccacacccucaugagcaucaucuccaccuuccaccugagcauccccaacuucaaccaguacgaggccauguccugcgacuucaacgggggcaagaucacggugcaguacaaccugagccacuccuacgccaucgacgccgcgaaccacugcgggaccguggccaacggcguccuccagaccuucaugcggauggccuggggcgggagcuacaucgcccuggacuccggcugcgggaagugggacugcaucaugaccagcuaccaguaccugaucauccagaacacgaccugggaggaccacugccaguucucccgccccagccccaucggcuaccucgggcugcugucccagcggacccgcgacaucuacaucagccggcgccuccugggcaccuucacguggacccugagcgacuccgagggcaacgagacccccgggggcuacugccucacccgguggaugcugaucgaggcggagcugaagugcuucgggaacacggccguggccaagugcaacgagaagcacgacgaggaguucugcgacaugcuccgccuguucgacuucaacaagcaggccauccggcgccugaaggccgaggcgcagaugagcauccagcucaucaacaaggccgugaacgcccugaucaacgaccagcugaucaugaagaaccaccuccgggacaucaugugcauccccuacugcaacuacuccaaguacugguaccugaaccacaccagcaccggccgcaccucccugccccggugcuggcucgucagcaacggguccuaccugaacgagacgcacuucagcgacgacaucgagcagcaggccgacaacaugaucaccgagaugcugcagaaggaguaccuggaccgccagggcaagaccccgcucggccugguggaccuguucguguucuccaccagcuucuaccucaucuccaucuuccugcaccuggucaagaucccgacgcaccggcacaucguggggaagcccugccccaagccccaccgccucaaccacaugggcaucugcagcugcgggcuguacaagcagccgggcgugcccguccgguggaagcgcugaggacuagucccuguucccagagcccacuuuuuuuucuuuuuuugaaauaaaauagccugucuuucagaucucaaaggcucuuuucagagccaccaaaaaaaaaaaaaaaaaaaaaaaaaaaaaaaaaaaaaaaaaaaaaaaaaaaaaaaaaaaaaaaaagaauu

SEQ ID NO: 35419 - RNA, 1736 nt, Artificial Sequence
  mRNA product Design a-2 (hSL-A64-N5) comprising derived and/or modified sequence from LASV(G1180-SLE-2010;Clade IV)__AIT17168__GPCmut9 (opt1)
aggagaguccgcucagccagguugcagaagcggcuuagcguguguccuaaucuucucucugcguguagguaggccugugccgcaaacaagcuuaccaugggccagaucgugaccuucuuccaggaggucccccacgugaucgaggaggugaugaacaucguccugaucgcccucagcauccuggccgugcugaaggggcucuacaacuucgcgaccugcggccugguggggcugcucaccuuccugcugcucugcggccgcuccugcaccgccagccgguacaagggggucuacgagcugcagacccuggagcucaacauggagacccugaacaugacgaugccgcuguccugcaccaagaacaacagccaccacuacaucauggugggcaacgagaccggccucgagcugacccugacgaacaccuccaucaucaaccacaaguucugcaaccucagcgacgcccacaagaagaaccuguacgaccacgcccugauguccaucaucagcaccuuccaccucuccauccccaacuucaaccaguacgaggccaugagcugcgacuucaacgggggcaagaucuccgugcaguacaaccugagccacuccuacgcgggggacgccgccaaccacugcggcaccgucgccaacggggugcugcagacguucaugcgcauggcguggggcggcagcuacaucgcccucgacuccgggugcggcagcugggacugcaucaugaccuccuaccaguaccugaucauccagaacaccaccugggaggaccacugccaguucagccggcccucccccaucggguaccugggccuccugagccagcgcacgcgggacaucuacaucagccgccggcugcucggcaccuucaccuggacccuguccgacagcgaggggaaggacacgccgggcggguacugccugacccgcuggaugcucaucgaggccgagcugaagugcuucggcaacaccgccguggccaagugcaacgagaagcacgacgaggaguucugcgacaugcugcggcuguucgacuucaacaagcaggcgauccagcgccugaaggccgaggcccagauguccauccagcugaucaacaaggccgucaacgcccucaucaacgaccagcugaucaugaagaaccaccuccgggacaucaugugcauccccuacugcaacuacagcaaguacugguaccucaaccacaccacgaccgggaagaccucccugcccaagugcuggcuggugagcaacggcuccuaccucaacgagacccacuucagcgacgacaucgagcagcaggcggacaacaugaucacggagaugcugcagaaggaguacauggagcgccagggcaagacgccccuggggcugguggaccucuucgucuucuccaccagcuucuaccugaucuccaucuuccugcaccucgugaagaucccgacccaccggcacaucgugggcaagagcugccccaagccccaccgccugaaccacauggggaucugcuccugcggccuguacaagcagcccggggucccggugaaguggaagcggugaggacuagucccuguucccagagcccacuuuuuuuucuuuuuuugaaauaaaauagccugucuuucagaucucaaaggcucuuuucagagccaccaaaaaaaaaaaaaaaaaaaaaaaaaaaaaaaaaaaaaaaaaaaaaaaaaaaaaaaaaaaaaaaaagaauu

SEQ ID NO: 35420 - RNA, 1736 nt, Artificial Sequence
  mRNA product Design a-2 (hSL-A64-N5) comprising derived and/or modified sequence from LASV(G1442-SLE-2011;Clade IV)__AIT17180__GPCmut9 (opt1)
aggagaguccgcucagccagguugcagaagcggcuuagcguguguccuaaucuucucucugcguguagguaggccugugccgcaaacaagcuuaccaugggccagaucgugaccuucuuccaggaggucccccacgugaucgaggaggugaugaacaucguccugaucgcccucagcauccuggccgugcugaaggggcucuacaacguggcgaccugcggccugaucgggcuggucacguuccuccugcugugcggccgcuccugcaccaccacccucuacaaggggguguacgagcugcagacgcuggagcucaacauggagacccugaacaugaccaugccgcugagcugcaccaagaacaacucccaccacuacauccgggugggcaacgagacgggccucgagcugacccugaccaacaccagcaucaucaaccacaaguucugcaaccucuccgacgcccacaagaagaaccuguacgaccacgcccugaugagcaucaucuccacguuccaccucagcauccccaacuucaaccaguacgaggccauguccugcgacuucaacgggggcaagaucagcguccaguacaaccugucccacagcuacgccggggacgcggccaaccacugcggcaccguggccaacggggugcugcagaccuucaugcgcauggccuggggcggcuccuacaucgcgcucgacagcgggugcggcaacugggacugcaucaugaccuccuaccaguaccugaucauccagaacacgaccugggacgaccacugccaguucagccggcccucccccaucggguaccugggccuccugagccagcgcacccgggacgucuacaucucccgccggcugcucggcaccuucacguggacccugagcgacagcgaggggaaggacaccccgggcggguacugccugacccgcuggaugcucaucgaggccgagcugaagugcuucggcaacacggccguggccaagugcaacgagaagcacgacgaggaguucugcgacaugcugcggcuguucgacuucaacaagcaggccauccagcgccugaaggcggaggcccagauguccauccagcugaucaacaaggccgugaacgcccucaucaacgaccagcugaucaugaagaaccaccuccgggacaucaugugcauccccuacugcaacuacagcaaguacugguaccucaacaacaccgccaccgggaagaccucccugcccaagugcuggcugaucagcaacggcuccuaccucaacgagacgcacuucagcgacgacaucgagcaggaggcggacaacaugaucaccgagaugcugcagaaggaguacauggagcgccagggcaagacgccccuggggcuggucgaccucuucguguucuccaccagcuucuaccugaucuccaucuuccugcaccucgugaagaucccgacccaccggcacaucgucggcaagagcugccccaagccccaccgccugaaccacauggggaucugcuccugcggccuguacaagcagcccggggugccggugcgguggaagcgcugaggacuagucccuguucccagagcccacuuuuuuuucuuuuuuugaaauaaaauagccugucuuucagaucucaaaggcucuuuucagagccaccaaaaaaaaaaaaaaaaaaaaaaaaaaaaaaaaaaaaaaaaaaaaaaaaaaaaaaaaaaaaaaaaagaauu

SEQ ID NO: 35421 - RNA, 1736 nt, Artificial Sequence
  mRNA product Design a-2 (hSL-A64-N5) comprising derived and/or modified sequence from LASV(G3010-SLE-2013;Clade IV)__AIT17344__GPCmut9 (opt1)
aggagaguccgcucagccagguugcagaagcggcuuagcguguguccuaaucuucucucugcguguagguaggccugugccgcaaacaagcuuaccaugggccagaucgugaccuucuuccaggaggucccccacgugaucgaggaggugaugaacaucguccugaucgcccucagcauccuggccgugcugaaggggcucuacaacuucgcgaccugcggccugguggggcuggucacguuccuccugcugugcggccgcuccugcaccaccagccucuacaaggggguguacgagcugcagacccuggagcucaacauggagacgcugaacaugaccaugccgcuguccugcaccaagaacaacagccaccacuacaucauggugggcaacgagaccggccucgagcugacgcugaccaacaccuccaucaucaaccacaaguucugcaaccucagcgacgcccacaagaagaaccuguacaaccacgcccugauguccaucaucagcaccuuccaccucuccauccccaacuucaaccaguacgaggccaugagcugcgacuucaacgggggcaagaucuccguccaguacaaccugagccacuccuacgccggggacgcggccagccacugcggcacgguggccaacggggugcugcagaccuucaugcggauggccuggggcggcuccuacaucgcgcucgacagcgggugcggcaagugggacugcaucaugaccuccuaccaguaccugaucauccagaacaccacgugggaggaccacugccaguucagccgccccucccccaucggguaccugggccuccugagccagcggacccgcgacaucuacaucagccggcgccugcucggcaccuucaccuggacgcuguccgacagcgaggggaaggacaccccgggcggguacugccugacccgguggaugcucaucgaggccgagcugaagugcuucggcaacaccgccgucgccaagugcaacgagaagcacgacgaggaguucugcgacaugcugcgccucuucgacuucaacaagcaggccauccagcggcugaagacggaggcgcagauguccauccagcugaucaacaaggccgugaacgcccucaucaacgaccagcugaucaugaagaaccaccuccgcgacaucaugugcauccccuacugcaacuacagcaaguacugguaccugaaccacaccaccaccgggaagacgucccugcccaagugcuggcuggugagcaacggcuccuaccucaacgagacccacuucagcgacgacaucgagcagcaggccgacaacaugaucaccgagaugcugcagaaggaguacauggagcggcagggcaagacgccccuggggcuggucgaccucuucguguucuccaccagcuucuaccugaucuccaucuuccugcaccucgugaagaucccgacccaccgccacaucgucggcaagagcugccccaagccccaccggcugaaccacauggggaucugcuccugcggccuguacaagcagcccggggugccggugcgcuggaagcggugaggacuagucccuguucccagagcccacuuuuuuuucuuuuuuugaaauaaaauagccugucuuucagaucucaaaggcucuuuucagagccaccaaaaaaaaaaaaaaaaaaaaaaaaaaaaaaaaaaaaaaaaaaaaaaaaaaaaaaaaaaaaaaaaagaauu

SEQ ID NO: 35422 - RNA, 1736 nt, Artificial Sequence
  mRNA product Design a-2 (hSL-A64-N5) comprising derived and/or modified sequence from LASV(G502-SLE-2009;Clade IV)__AIT17126__GPCmut9 (opt1)
aggagaguccgcucagccagguugcagaagcggcuuagcguguguccuaaucuucucucugcguguagguaggccugugccgcaaacaagcuuaccaugggccagaucgugaccuucuuccaggaggucccccacgugaucgaggaggugaugaacaucguccugaucgcccucagcauccuggccgugcugaaggggcucuacaacuucgcgaccugcggccugguggggcugcucacguuccugcugcucugcggccgcuccugcaccaccgggcuguacaagggcgucuacgagcugcagacccucgagcugaacauggagacgcugaacaugaccaugccgcucagcugcaccaagaacaacucccaccacuacaucauggugggcaacgagaccgggcuggagcugacgcucaccaacaccagcaucaucaaccacaaguucugcaaccuguccgacgcccacaagaagaaccuguacgaccacgcccucaugagcaucaucuccaccuuccaccugagcauccccaacuucaaccaguacgaggccauguccugcgacuucaacggcgggaagaucagcgugcaguacaaccugucccacagcuacgccggcgacgcggccgaccacugcgggacggucgccaacggcgugcuccagaccuucaugcggauggccuggggcggguccuacaucgcgcuggacagcggcugcgggcgcugggacugcaucaugaccuccuaccaguaccugaucauccagaacaccacgugggaggaccacugccaguucagccggcccucccccaucggcuaccucggccugcugagccagcgcacccgggacaucuacaucucccgccggcuccuggggaccuucaccuggacgcugagcgacagcgagggcaaggacacccccgggggcuacugccucacccgcuggaugcugaucgaggccgagcugaagugcuucgggaacaccgccguggccaagugcaacgagaagcacgacgaggaguucugcgacaugcuccggcuguucgacuucaacaagcaggccauccagcgccugaaggcggaggcccagauguccauccagcucaucaacaaggccgucaacgcccugaucaacgaccagcuggugaugaagaaccaccuccgggacaucaugugcauccccuacugcaacuacagccgcuacugguaccugaaccacacgaccaccggccggaccucccugcccaagugcuggcucgugagcaacggcuccuaccugaacgagacgcacuucagcgacgacaucgagcagcaggccgacaacaugaucaccgagaugcugcagaaggaguacauggagcgccaggggaagaccccgcugggccucgucgaccuguucguguucuccaccagcuucuaccugaucuccaucuuccuccaccuggugaagaucccgacgcaccggcacaucgucggcaagagcugccccaagccccaccgccugaaccacauggggaucugcuccugcgggcucuacaagcagcccggcgugccggugaaguggaagcggugaggacuagucccuguucccagagcccacuuuuuuuucuuuuuuugaaauaaaauagccugucuuucagaucucaaaggcucuuuucagagccaccaaaaaaaaaaaaaaaaaaaaaaaaaaaaaaaaaaaaaaaaaaaaaaaaaaaaaaaaaaaaaaaaagaauu

SEQ ID NO: 35423 - RNA, 1736 nt, Artificial Sequence
  mRNA product Design a-2 (hSL-A64-N5) comprising derived and/or modified sequence from LASV(G733-SLE-2010;Clade IV)__AIT17154__GPCmut9 (opt1)
aggagaguccgcucagccagguugcagaagcggcuuagcguguguccuaaucuucucucugcguguagguaggccugugccgcaaacaagcuuaccaugggccagaucgugaccuucuuccaggaggucccccacgugaucgaggaggugaugaacaucguccugaucgcccucagcauccuggccgugcugaaggggcucuacaacuucgcgaccugcggcaucguggggcuggucuccuuccugcuccugugcggccgcagcugcacgaccucccuguacaaggggguguacgagcuccagacccuggagcugaacauggagacccucaacaugacgaugccgcugagcugcaccaagaacaacucccaccacuacaucauggugggcaacgagaccggccuggagcucacccugacgaacaccagcaucaucaaccacaaguucugcaaccuguccgacgcccacaagaagaaccucuacgaccacgcccugaugagcaucaucuccaccuuccaccugagcauccccaacuucaaccaguacgaggccauguccugcgacuucaacgggggcaagaucagcguccaguacaaccucucccacagcuacgccggggacgcggccaaccacugcggcaccaucgccaacggggugcugcagacguucaugcggauggccuggggcggcuccuacaucgcgcuggacagcgggugcgaccgcugggacugcaucaugaccuccuaccaguaccucaucauccagaacaccaccugggaggaccacugccaguucagccggcccucccccaucggcuaccuggggcugcucagccagcgcacgcgggacaucuacaucagccgccggcugcugggcaccuucaccuggacccucuccgacagcgagggcaaggacacgcccgggggcuacugccugacccgcuggaugcugaucgaggccgagcucaagugcuucgggaacaccgccguggccaagugcaacgagaagcacgacgaggaguucugcgacaugcugcggcuguucgacuucaacaagcaggccauccagcgccucaaggcggaggcccagauguccauccagcugaucaacaaggccgucaacgcccugaucaacgaccagcucaucaugaagaaccaccuccgggacaucaugugcauccccuacugcaacuacagcaaguacugguaccugaaccacaccacgaccggcaagaccucccugcccaagugcuggcuggugagcaacggguccuaccugaacgagacccacuucagcgacgacaucgagcagcaggccgacaacaugaucacggagaugcuccagaaggaguacauggagcgccagggcaagaccccgcugggccugguggaccuguucgucuucuccaccagcuucuaccucaucuccaucuuccugcaccuggugaagaucccgacccaccggcacguggucggcaagagcugccccaagccccaccgccucaaccacauggggaucugcuccugcgggcuguacggccagcccggggugccggugaaguggaagcggugaggacuagucccuguucccagagcccacuuuuuuuucuuuuuuugaaauaaaauagccugucuuucagaucucaaaggcucuuuucagagccaccaaaaaaaaaaaaaaaaaaaaaaaaaaaaaaaaaaaaaaaaaaaaaaaaaaaaaaaaaaaaaaaaagaauu

SEQ ID NO: 35424 - RNA, 1736 nt, Artificial Sequence
  mRNA product Design a-2 (hSL-A64-N5) comprising derived and/or modified sequence from MOPV/LASV reassortant(IGS-1;Clade IV)__AFY05576__GPCmut9 (opt1)
aggagaguccgcucagccagguugcagaagcggcuuagcguguguccuaaucuucucucugcguguagguaggccugugccgcaaacaagcuuaccaugggccagaucgugaccuucuuccaggaggucccccacgugaucgaggaggugaugaacaucguccugaucgcccucagcgugcuggccgugcugaaggggcucuacaacuucgcgaccugcggccuggucgggcuggugacguuccuccugcugugcggccgcuccugcaccaccagccucuacaaggggguguacgagcugcagacccuggagcucaacauggagacgcugaacaugaccaugccgcuguccugcaccaagaacaacagccaccacuacaucauggucggcaacgagaccggccucgagcugacgcugaccaacaccuccaucaucaaccacaaguucugcaaccucagcgacgcccacaagaagaaccuguacgaccacgcccugauguccaucaucagcaccuuccaccucuccauccccaacuucaaccaguacgaggccaugagcugcgacuucaacgggggcaagaucuccgugcaguacaaccugagccacuccuacgccggggacgcggccaaccacugcggcacgguggccaacgggguccugcagaccuucaugcggauggccuggggcggcagcuacaucgcgcucgacuccgggugcggcaacugggacugcaucaugaccagcuaccaguaccugaucauccagaacaccacgugggaggaccacugccaguucucccgccccagccccaucggguaccugggccuccugucccagcggacccgcgacaucuacaucagccggcgccugcucggcaccuucaccuggacgcugagcgacuccgagggggaggacaccccgggcggguacugccugacccgguggaugcucaucgaggccgagcugaagugcuucggcaacaccgccguggccaagugcaacgagaagcacgacgaggaguucugcgacaugcugcgccucuucgacuucaacaagcaggccauccagcggcugaaggcggaggcccagaugagcauccagcugaucaacaaggccgugaacgcccucaucaacgaccagcugaucaugaagaaccaccuccgcgacaucaugugcauccccuacugcaacuacuccaaguacugguaccugaaccacacgaccaccgggcggaccagccugcccaagugcuggcuggucuccaacggcagcuaccucaacgagacgcacuucuccgacgacaucgagcagcaggccgacaacaugaucaccgagaugcugcagaaggaguacauggagcgccagggcaagacgccccuggggcugguggaccucuucguguucagcaccuccuucuaccugaucagcaucuuccugcaccucgucaagaucccgacccaccggcacaucgugggcaaguccugccccaagccccaccgccugaaccacauggggaucugcagcugcggccuguacaagcagcccggggugccggucaaguggaagcggugaggacuagucccuguucccagagcccacuuuuuuuucuuuuuuugaaauaaaauagccugucuuucagaucucaaaggcucuuuucagagccaccaaaaaaaaaaaaaaaaaaaaaaaaaaaaaaaaaaaaaaaaaaaaaaaaaaaaaaaaaaaaaaaaagaauu

SEQ ID NO: 35425 - RNA, 1736 nt, Artificial Sequence
  mRNA product Design a-2 (hSL-A64-N5) comprising derived and/or modified sequence from LASV(LM765-SLE-2012;Clade IV)__AIT17814__GPCmut9 (opt1)
aggagaguccgcucagccagguugcagaagcggcuuagcguguguccuaaucuucucucugcguguagguaggccugugccgcaaacaagcuuaccaugggccagaucgugaccuucuuccaggaggucccccacgugaucgaggaggugaugaacaucguccugaucgcccucagcauccuggccgugcugaaggggcucuacaacuucgcgaccugcggccugguggggcuggucacguuccuccugcugugcggccgcuccugcaccaccagccucuacaaggggguguacgagcugcagacccuggagcucaacauggagacgcugaacaugaccaugccgcuguccugcaccaagaacaacagccaccacuacaucauggugggcaacgagaccggccucgagcugacgcugaccaacaccuccaucaucgaccacaaguucugcaaccucagcgacgcccaccggaagaaccuguacgaccacgcccugauguccaucaucagcaccuuccaccucuccauccccaacuucaaccaguacgaggccaugagcugcgacuucaacgggggcaagaucuccguccaguacaaccugagccacuccuacgccaaggacgcggccgaccacugcgggacgguggccaacggcgugcugcagaccuucaugcgcauggccuggggcgggagcuacaucgcgcucgacuccggcugcgggcggugggacugcaucaugaccagcuaccaguaccugaucauccagaacaccacgugggaggaccacugccaguucucccgccccagccccaucggcuaccuggggcuccugucccagcggacccgcgacaucuacaucagccggcgccugcucggcaccuucaccuggacgcugagcgacuccgagggcaaggacacccccgggggcuacugccugacccgguggaugcucaucgaggccgagcugaagugcuucgggaacaccgccgucgccaagugcaacgagaagcacgacgaggaguucugcgacaugcugcgccucuucgacuucaacaagcaggccauccagcggcugaaggcggaggcccagaugagcauccagcugaucaacaaggccgugaacgcccucaucaacgaccagcugaucaugaagaaccaccuccgcgacaucaugugcauccccuacugcaacuacuccaaguacugguaccugaaccacacgaccaccggcaagaccagccugcccaagugcuggcugguguccaacgggagcuaccucaacgagacgcacuucuccgacgacaucgagcagcaggccgacaacaugaucaccgagaugcugcagaaggaguacauggagcggcagggcaagaccccgcugggccuggucgaccucuucguguucagcaccuccuucuaccugaucagcaucuuccugcaccucgugaagaucccgacgcaccgccacaucgucgggaagcccugccccaagccccaccggcugaaccacaugggcaucugcuccugcgggcuguacaagcagccgggcgugcccgugaaguggaagcgcugaggacuagucccuguucccagagcccacuuuuuuuucuuuuuuugaaauaaaauagccugucuuucagaucucaaaggcucuuuucagagccaccaaaaaaaaaaaaaaaaaaaaaaaaaaaaaaaaaaaaaaaaaaaaaaaaaaaaaaaaaaaaaaaaagaauu

SEQ ID NO: 35426 - RNA, 1736 nt, Artificial Sequence
  mRNA product Design a-2 (hSL-A64-N5) comprising derived and/or modified sequence from LASV(LM776-SLE-2012;Clade IV)__AIT17824__GPCmut9 (opt1)
aggagaguccgcucagccagguugcagaagcggcuuagcguguguccuaaucuucucucugcguguagguaggccugugccgcaaacaagcuuaccaugggccagaucgugaccuucuuccaggaggucccccacgugaucgaggaggugaugaacaucguccugaucgcccucagcauccuggccgugcugaaggggcucuacaacuucgcgaccugcggccugguggggcuggucacguuccuccugcugugcggccgcuccugcaccaccagcguguacaaggggguguacgagcuccagacccuggagcugaacauggagacgcucaacaugaccaugccgcuguccugcaccaagaacaacagccaccacuacaucauggucggcaacgagaccggccuggagcucacgcugaccaacaccuccaucaucaaccacaaguucugcaaccugagcgacgcccacaagaagaaccucuacgaccacgcccugauguccaucaucagcaccuuccaccuguccauccccaacuucaaccaguacgaggccaugagcugcgacuucaacgggggcaagaucuccgugcaguacaaccucagccacuccuacgccggggacgcggccaaccacugcggcacgguggccaacgggguccugcagaccuucaugcggauggccuggggcggcagcuacaucgcgcuggacuccgggugcggcaagugggacugcaucaugaccagcuaccaguaccucaucauccagaacaccacgugggaggaccacugccaguucucccgccccagccccaucggguaccugggccugcucucccagcggacccgcgacaucuacaucagccggcgccugcugggcaccuucaccuggacgcucagcgacuccgaggggaaggacaccccgggcggguacugccugacccgguggaugcugaucgaggccgagcucaagugcuucggcaacaccgccguggccaagugcaacgagaagcacgacgaggaguucugcgacaugcugcgccuguucgacuucaacaagcaggccauccagcggcucaaggcggaggcccagaugagcauccagcugaucaacaaggccgugaacgcccugaucaacgaccagcucaucaugaagaaccaccuccgcgacaucaugugcauccccuacugcaacuacuccaaguacugguaccugaaccacacgaccaccgggaagaccagccugcccaagugcuggcuggucuccaacggcagcuaccugaacgagacgcacuucuccgacgacaucgagcagcaggccgacaacaugaucaccgagaugcuccagaaggaguacauggagcggcagggcaagacgccccuggggcugguggaccuguucguguucagcaccuccuucuaccucaucagcaucuuccugcaccuggucaagaucccgacccaccgccacaucgugggcaaguccugccccaagccccaccggcucaaccacauggggaucugcagcugcggccuguacaagcagcccggggugccgguccgcuggaagcggugaggacuagucccuguucccagagcccacuuuuuuuucuuuuuuugaaauaaaauagccugucuuucagaucucaaaggcucuuuucagagccaccaaaaaaaaaaaaaaaaaaaaaaaaaaaaaaaaaaaaaaaaaaaaaaaaaaaaaaaaaaaaaaaaagaauu

SEQ ID NO: 35427 - RNA, 1736 nt, Artificial Sequence
  mRNA product Design a-2 (hSL-A64-N5) comprising derived and/or modified sequence from LASV(Mad39;Clade IV)__ANH09722__GPCmut9 (opt1)
aggagaguccgcucagccagguugcagaagcggcuuagcguguguccuaaucuucucucugcguguagguaggccugugccgcaaacaagcuuaccaugggccagaucgugaccuucuuccaggaggucccccacgugaucgaggaggugaugaacaucguccugaucgcccucagcauccuggccgugcugaaggggcucuacaacguggcgaccugcggccugaucgggcuggucacguuccuccugcugugcggccgcuccugcaccaccacccucuacaaggggguguacgagcugcaggcccuggagcucaacauggagacgcugaacaugaccaugccgcugagcugcaccaagaacaacucccaccacuacauccgggugggcaacgagaccggccucgagcugacgcugaccaacaccagccucaucaaccacaaguucugcaaccuguccgacgcccacaagaagaaccuguacgaccacgcccucaugagcaucaucuccaccuuccaccugagcauccccaacuucaaccaguacgaggccauguccugcgacuucaacgacgggaagaucagcguccaguacaaccugucccacacguacgcgggcgacaccgccaaccacugcgggaccguggccaacggcgugcuccagaccuucaugcgcauggccuggggcgggagcuacaucgcgcuggacuccggcugcgggggcugggacugcaucaugacgagcuaccaguaccugaucauccagaacaccaccugggaggaccacugccaguucucccggcccagccccaucggguaccucggccugcugucccagcgcacccgggacaucuacaucagccgccggcuccugggcacguucaccuggacccuguccgacagcgaggggaaggacaccccgggcggguacugccucacgcgcuggaugcugaucgaggccgagcugaagugcuucggcaacaccgccgucgccaagugcaacgagaagcacgacgaggaguucugcgacaugcuccggcuguucgacuucaacaagcaggccauccagcgccugaaggcggaggcccagaugagcauccagcucaucaacaaggccgugaacgcccugaucaacgaccagcugaucaugaagaaccaccuccgggacaucaugugcauccccuacugcaacuacuccaaguacugguaccugaaccacaccgugaccgggaagacgagccugcccaagugcuggcucgucuccaacggcagcuaccugaacgagacccacuucuccgacgacaucgagcagcaggccgacaacaugaucaccgagaugcugcagaaggaguacauggagcgccagggcaagacgccccuggggcucguggaccuguucguguucagcaccuccuucuaccugaucagcaucuuccuccaccuggucaagaucccgacccaccggcacguggugggcaagcccugccccaagccccaccgccugaaccacauggggaucugcuccugcggcuucuacaagcagccggggguccccgugcgguggaagcgcugaggacuagucccuguucccagagcccacuuuuuuuucuuuuuuugaaauaaaauagccugucuuucagaucucaaaggcucuuuucagagccaccaaaaaaaaaaaaaaaaaaaaaaaaaaaaaaaaaaaaaaaaaaaaaaaaaaaaaaaaaaaaaaaaagaauu

SEQ ID NO: 35428 - RNA, 1736 nt, Artificial Sequence
  mRNA product Design a-2 (hSL-A64-N5) comprising derived and/or modified sequence from LASV(Z0947-SLE-2011;Clade IV)__AIT17840__GPCmut9 (opt1)
aggagaguccgcucagccagguugcagaagcggcuuagcguguguccuaaucuucucucugcguguagguaggccugugccgcaaacaagcuuaccaugggccagaucgugaccuucuuccaggaggucccccacgugaucgaggaggugaugaacaucguccugaucgcccucagcauccuggccgugcugaaggggcucuacaacuucgcgaccugcggccugguggggcuggucacguuccuccugcugugcggccgcuccugcaccaucagccucuacaaggggguguacgagcugcagacccuggagcucaacauggagacccugaacaugacgaugccgcuguccugcaccaagaacaacagccaccacuacaucauggugggcaacgagaccggccucgagcugacccugacgaacaccuccaucaucaaccacaaguucugcaaccucagcgacgcccacaagaagaaccuguacgaccacgcccugauguccaucaucagcaccuuccaccucuccauccccaacuucaaccaguacgaggccaugagcugcgacuucaacgggggcaagaucuccguccaguacaaccugagccacuccuacgccggggacgcggccaaccacugcggcaccguggccaacggggugcugcagacguucaugcggauggccuggggcggcagcuacaucgcgcucgacuccgggugcgaccgcugggacugcaucaugaccagcuaccaguaccugaucauccagaacaccaccugggaggaccacugccaguucucccggcccagccccaucggcuaccuggggcuccugucccagcgcacgcgggacaucuacaucagccgccggcugcucggcaccuucaccuggacccugagcgacuccgagggcaaggacacgcccgggggcuacugccugacccgcuggaugcucaucgaggccgagcugaagugcuucgggaacaccgccgucgccaagugcaacgagaagcacgacgaggaguucugcgacaugcugcggcuguucgacuucaacaagcaggccauccagcgccugaaggcggaggcccagaugagcauccagcugaucaacaaggccgugaacgcccucaucaacgaccagcugaucaugaagaaccaccuccgggacaucaugugcauccccuacugcaacuacuccaaguacugguaccucaaccacaccacgaccggcaagaccagccugcccaagugcuggcugguguccaacgggagcuaccucaacgagacccacuucuccgacgacaucgagcagcaggccgacaacaugaucacggagaugcugcagaaggaguacauggagcgccagggcaagaccccgcugggccuggucgaccucuucguguucagcaccuccuucuaccugaucagcaucuuccugcaccucgugaagaucccgacccaccggcacaucgucgggaagcccugccccaagccccaccgccugaaccacaugggcaucugcuccugcgggcuguacaagcagccgggcgugcccgugaaguggaagcggugaggacuagucccuguucccagagcccacuuuuuuuucuuuuuuugaaauaaaauagccugucuuucagaucucaaaggcucuuuucagagccaccaaaaaaaaaaaaaaaaaaaaaaaaaaaaaaaaaaaaaaaaaaaaaaaaaaaaaaaaaaaaaaaaagaauu

SEQ ID NO: 35429 - RNA, 1736 nt, Artificial Sequence
  mRNA product Design a-2 (hSL-A64-N5) comprising derived and/or modified sequence from LASV(Josiah;Clade IV)__NP_694870__GPCmut9 (opt4)
aggagaguccgcucagccagguugcagaagcggcuuagcguguguccuaaucuucucucugcguguagguaggccugugccgcaaacaagcuuaccaugggccagaucgugaccuucuuccaggaggugccccacgugaucgaggaggugaugaacaucgugcugaucgcccugagcgugcuggccgugcugaagggccuguacaacuucgccaccugcggccuggugggccuggugaccuuccugcugcugugcggcagaagcugcaccaccagccuguacaagggcguguacgagcugcagacccuggagcugaacauggagacccugaacaugaccaugccccugagcugcaccaagaacaacagccaccacuacaucauggugggcaacgagaccggccuggagcugacccugaccaacaccagcaucaucaaccacaaguucugcaaccugagcgacgcccacaagaagaaccuguacgaccacgcccugaugagcaucaucagcaccuuccaccugagcauccccaacuucaaccaguacgaggccaugagcugcgacuucaacggcggcaagaucagcgugcaguacaaccugagccacagcuacgccggcgacgccgccaaccacugcggcaccguggccaacggcgugcugcagaccuucaugagaauggccuggggcggcagcuacaucgcccuggacagcggcugcggcaacugggacugcaucaugaccagcuaccaguaccugaucauccagaacaccaccugggaggaccacugccaguucagcagacccagccccaucggcuaccugggccugcugagccagagaaccagagacaucuacaucagcagaagacugcugggcaccuucaccuggacccugagcgacagcgagggcaaggacacccccggcggcuacugccugaccagauggaugcugaucgaggccgagcugaagugcuucggcaacaccgccguggccaagugcaacgagaagcacgacgaggaguucugcgacaugcugagacuguucgacuucaacaagcaggccauccagagacugaaggccgaggcccagaugagcauccagcugaucaacaaggccgugaacgcccugaucaacgaccagcugaucaugaagaaccaccugagagacaucaugugcauccccuacugcaacuacagcaaguacugguaccugaaccacaccaccaccggcagaaccagccugcccaagugcuggcuggugagcaacggcagcuaccugaacgagacccacuucagcgacgacaucgagcagcaggccgacaacaugaucaccgagaugcugcagaaggaguacauggagagacagggcaagaccccccugggccugguggaccuguucguguucagcaccagcuucuaccugaucagcaucuuccugcaccuggugaagauccccacccacagacacaucgugggcaagagcugccccaagccccacagacugaaccacaugggcaucugcagcugcggccuguacaagcagcccggcgugcccgugaaguggaagagaugaggacuagucccuguucccagagcccacuuuuuuuucuuuuuuugaaauaaaauagccugucuuucagaucucaaaggcucuuuucagagccaccaaaaaaaaaaaaaaaaaaaaaaaaaaaaaaaaaaaaaaaaaaaaaaaaaaaaaaaaaaaaaaaaagaauu

SEQ ID NO: 35430 - RNA, 1733 nt, Artificial Sequence
  mRNA product Design a-2 (hSL-A64-N5) comprising derived and/or modified sequence from LASV(LP;Clade I)__AAF86701__GPCmut9 (opt4)
aggagaguccgcucagccagguugcagaagcggcuuagcguguguccuaaucuucucucugcguguagguaggccugugccgcaaacaagcuuaccaugggccagaucaucaccuucuuccaggaggugccccacgugaucgaggaggugaugaacaucgugcugaucgcccugagccugcuggccauccugaagggccuguacaacaucgccaccugcggcaucaucggccugguggccuuccuguuccugugcggcaagagcugcagccugacccugaagggcggcuacgagcugcagacccuggagcugaacauggagacccugaacaugaccaugccccugagcugcaccaagaacagcagccaccacuacaucagagugggcaacgagaccggccuggagcugacccugaccaacaccagcaucaucaaccacaaguucugcaaccugagcgacgcccacaagaagaaccuguacgaccacgcccugaugagcaucaucagcaccuuccaccugagcauccccaacuucaaccaguacgaggccaugagcugcgacuucaacggcggcaagaucagcgugcaguacaaccugagccacagcuacgccggcgacgccgccgagcacugcggcaccguggccaacggcgugcugcagaccuucaugagaauggccuggggcggcagauacaucgcccuggacagcggcugcggcaacugggacugcaucaugaccagcuaccaguaccugaucauccagaacaccaccugggaggaccacugccaguucagcagacccagccccaucggcuaccugggccugcugagccagagaaccagagacaucuacaucagcagaagacugcugggcaccuucaccuggacccugagcgacagcgagggcaacgagacccccggcggcuacugccugaccagauggaugcugaucgaggccgagcugaagugcuucggcaacaccgccguggccaagugcaacgagaagcacgacgaggaguucugcgacaugcugagacuguucgacuucaacaagcaggccaucagaagacugaaggccgaggcccagaugagcauccagcugaucaacaaggccgugaacgcccugaucaacgaccagcugaucaugaagaaccaccugagagacaucaugugcauccccuacugcaacuacagcaaguacugguaccugaaccacaccagcagcggcagaaccagccugcccaagugcuggcugaucagcaacggcagcuaccugaacgagacccaguucagcgacgacaucgagcagcaggccgacaacaugaucaccgagaugcugcagaaggaguacaucgagagacagggcaagaccccccugggccugguggacaucuucaucuucagcaccagcuucuaccugaucagcaucuuccugcaccugaucaagauccccacccacagacacaucgugggcaagcccugccccaagccccacagacugaaccacaugggcgugugcagcugcggccuguacaagcaccccggcgugcccaccaaguggaagagaugaggacuagucccuguucccagagcccacuuuuuuuucuuuuuuugaaauaaaauagccugucuuucagaucucaaaggcucuuuucagagccaccaaaaaaaaaaaaaaaaaaaaaaaaaaaaaaaaaaaaaaaaaaaaaaaaaaaaaaaaaaaaaaaaagaauu

SEQ ID NO: 35431 - RNA, 1733 nt, Artificial Sequence
  mRNA product Design a-2 (hSL-A64-N5) comprising derived and/or modified sequence from LASV(803213;Clade II)__AAF86703__GPCmut9 (opt4)
aggagaguccgcucagccagguugcagaagcggcuuagcguguguccuaaucuucucucugcguguagguaggccugugccgcaaacaagcuuaccaugggccagaucaucaccuucuuccaggaggugccccacgugaucgaggaggugaugaacaucgugcugaucgcccugagccugcuggccauccugaagggcaucuacaacguggccaccugcggccuguucggccugaucagcuuccugcugcugugcggcagaagcugcagcgugaccuacaagggcguguacgagcugcagacccuggagcugaacauggccaaccugaacaugaccaugccccugagcugcaccaagaacaacagccaccacuacaucauggugggcaacgagaccggccuggagcugacccugaccaacaccagcaucaucaaccacaaguucugcaaccugagcgacgcccacaagaagaaccuguacgaccacgcccugaugagcaucaucagcaccuuccaccugagcauccccaacuucaaccaguacgaggccaugagcugcgacuucaacggcggcaagaucagcgugcaguacaaccugagccacagcuucgccguggacgccgccaaccacugcggcaccaucgccaacggcgugcugcagaccuucaugagaauggccuggggcggcagcuacaucgcccuggacagcggcugcggcaacugggacugcaucaugaccagcuaccaguaccugaucauccagaacaccaccugggaggaccacugccaguucagcagacccagccccaucggcuaccugggccugcugagccagagaaccagagacaucuacaucagcagaagacugcugggcaccuucaccuggacccugagcgacagcgagggcaacgaggcccccggcggcuacugccugaccagauggaugcugaucgaggccgagcugaagugcuucggcaacaccgccguggccaagugcaacgagaagcacgacgaggaguucugcgacaugcugagacuguucgacuucaacaagcaggccaucaagagacugaagaccgaggcccagaugagcauccagcugaucaacaaggccgugaacgcccugaucaacgaccagcugaucaugaagaaccaccugagagacaucaugugcauccccuacugcaacuacagcagauacugguaccugaaccacaccgugaccggcaagaccagccugcccagaugcuggcuggugagcaacggcagcuaccugaacgagacccacuucagcgacgacaucgagcagcaggccgacaacaugaucaccgagaugcugcagaaggaguacauggacagacagggcaagaccccccugggccugguggaccuguucguguucagcaccagcuucuaccugaucagcaucuuccugcaccuggugaagauccccacccacagacacaucgugggcaagcccugccccaagccccacagacugaaccacaugggcaucugcagcugcggccuguacaagcaccccggcgugcccgugaaguggaagagaugaggacuagucccuguucccagagcccacuuuuuuuucuuuuuuugaaauaaaauagccugucuuucagaucucaaaggcucuuuucagagccaccaaaaaaaaaaaaaaaaaaaaaaaaaaaaaaaaaaaaaaaaaaaaaaaaaaaaaaaaaaaaaaaaagaauu

SEQ ID NO: 35432 - RNA, 1733 nt, Artificial Sequence
  mRNA product Design a-2 (hSL-A64-N5) comprising derived and/or modified sequence from LASV(GA391;Clade III)__CAA36645__GPCmut9 (opt4)
aggagaguccgcucagccagguugcagaagcggcuuagcguguguccuaaucuucucucugcguguagguaggccugugccgcaaacaagcuuaccaugggccagaucgugaccuucuuccaggaggugccccacgugaucgaggaggugaugaacaucgugcugaucgcccugagcauccuggccauccugaagggccuguacaacguggccaccugcggccugaucggccuggugaccuuccugcugcugagcggcagaagcugcagccugaucuacaagggcaccuacgagcugcagacccuggagcugaacauggagacccugaacaugaccaugccccugagcugcaccaagaacaacagccaccacuacaucagagugggcaacgagaccggccuggagcugacccugaccaacaccagcauccugaaccacaaguucugcaaccugagcgacgcccacaagagaaaccuguacgaccacagccugaugagcaucaucagcaccuuccaccugagcauccccaacuucaaccaguacgaggccaugagcugcgacuucaacggcggcaagaucaccgugcaguacaaccugagccacagcuucgccguggacgccgccggccacugcggcacccuggccaacggcgugcugcagaccuucaugagaauggccuggggcggcagcuacaucgcccuggacagcggcugcggcaacugggacugcaucaugaccagcuaccaguaccugaucauccagaacaccaccugggacgaccacugccaguucagcagacccagccccaucggcuaccugggccugcugagccagagaaccagagacaucuacaucagcagaagacugcugggcaccuucaccuggacccugagcgacagcgagggcaacgagacccccggcggcuacugccugaccagauggaugcugaucgaggccgagcugaagugcuucggcaacaccgccguggccaagugcaacgagaagcacgacgaggaguucugcgacaugcugagacuguucgacuucaacaagcaggccaucagaagacugaagaccgaggcccagaugagcauccagcugaucaacaaggccgugaacgcccugaucaacgaccagcugaucaugaagaaccaccugagagacaucaugugcauccccuacugcaacuacagcagauacugguaccugaaccacaccagcaccggcaagaccagccugcccagaugcuggcugaucagcaacggcagcuaccugaacgagaccaaguucagcgacgacaucgagcagcaggccgacaacaugaucaccgagaugcugcagaaggaguacaucgacagacagggcaagaccccccugggccugguggaccuguucguguucagcaccagcuucuaccugaucagcaucuuccugcaccuggugaagauccccacccacagacacaucgugggcaagcccugccccaagccccacagacugaaccacaugggcaucugcagcugcggccuguacaagcagcccggcgugcccgugagauggaagagaugaggacuagucccuguucccagagcccacuuuuuuuucuuuuuuugaaauaaaauagccugucuuucagaucucaaaggcucuuuucagagccaccaaaaaaaaaaaaaaaaaaaaaaaaaaaaaaaaaaaaaaaaaaaaaaaaaaaaaaaaaaaaaaaaagaauu

SEQ ID NO: 35433 - RNA, 1736 nt, Artificial Sequence
  mRNA product Design a-2 (hSL-A64-N5) comprising derived and/or modified sequence from LASV(AV;Clade V)__CCA30314__GPCmut9 (opt4)
aggagaguccgcucagccagguugcagaagcggcuuagcguguguccuaaucuucucucugcguguagguaggccugugccgcaaacaagcuuaccaugggccagaucgugaccuucuuccaggaggugccccacgugaucgaggaggugaugaacaucgugcugaucgcccugagcauccuggccgugcugaagggccuguacaacaucgccaccugcggccugaucggccugaucaccuuccugcugcugugcggcagaagcugcagcagcaaccuguacaagggcguguacgagcugcagagccuggaccugaacauggagacccugaacaugaccaugccccugagcugcaccaagaacaacagccaccacuacaucagagugggcaacgacaccggccuggagcugacccugaccaacaccagcauccugaaccacaaguucugcaaccugagcgacgcccacaagaaggaccuguacgaccacgcccugaugagcaucaucagcaccuuccaccugagcauccccaacuucaaccaguacgaggccaugagcugcgacuucaacggcggcaagaucagcgugcaguacaaccugagccacagcuacgccaucgacgccgccaaccacugcggcaccguggccaacggcauccugcagaccuucaugagaauggccuggggcggcagcuacaucgcccuggacagcggcugcggcaacugggacugcaucaugaccagcuaccaguaccugaucauccagaacaccaccugggagaaccacugccaguucagcagacccagccccaucggcuaccugggccugcugagccagagaaccagagacaucuacaucagcagaagacugcugggcaccuucaccuggacccugagcgacagcgagggcaacgccacccccggcggcuacugccugaccagauggaugcugaucgaggccgagcugaagugcuucggcaacaccgccguggccaagugcaacgagaagcacgacgaggaguucugcgacaugcugagacuguucgacuucaacaagcaggccaucagcagacugaagagcgaggcccagaugagcauccagcugaucaacaaggccgugaacgcccugaucaacgaccagcugaucaugaagaaccaccugagagacaucaugugcauccccuacugcaacuacagcaaguacugguaccugaaccacaccaucaccggcaagaccagccugcccaagugcuggcuggugagcaacggcagcuaccugaacgagacccacuucagcgacgacaucgagcagcaggccgacaacaugaucaccgagaugcugcagaaggaguacauggagagacagggcaagaccccccugggccugguggaccuguucguguucagcaccagcuucuaccugaucagcaucuuccugagacuggugaagauccccacccacagacacaucgugggcaagcccugccccaagccccacagacugaaccacaugggcaucugcagcugcggccuguacaagcagcccggcgugcccgugagauggaagagaugaggacuagucccuguucccagagcccacuuuuuuuucuuuuuuugaaauaaaauagccugucuuucagaucucaaaggcucuuuucagagccaccaaaaaaaaaaaaaaaaaaaaaaaaaaaaaaaaaaaaaaaaaaaaaaaaaaaaaaaaaaaaaaaaagaauu

SEQ ID NO: 35434 - RNA, 1733 nt, Artificial Sequence
  mRNA product Design a-2 (hSL-A64-N5) comprising derived and/or modified sequence from LASV(Togo/2016/7082;Clade VI)__AMR44577__GPCmut9 (opt4)
aggagaguccgcucagccagguugcagaagcggcuuagcguguguccuaaucuucucucugcguguagguaggccugugccgcaaacaagcuuaccaugggccagaucaucaccuucuuccaggaggugccccacgugaucgaggaggugaugaacaucgugcugaucgcccugagccugcuggccauccugaagggcguguacaacguggccaccugcggcaucaucggccuggugaccuuccuguuccugugcggcagaagcugcagccugaucuacaagggcagcuacgagcugcagacccuggagcugaacauggagacccugaacaugaccaugccccugagcugcaccaagaacagcagccaccacuacaucagagugggcaacgagaccggccuggagcugacccugaccaacaccagcaucaucaaccacaaguucugcaaccugagcgacgcccacaagagaaaccuguacgaccacgcccugaugagcauccugagcaccuuccaccugagcauccccaacuucaaccaguacgaggccaugagcugcgacuucaacggcggcaagaucagcgugcaguacaaccugagccacgccuacgccguggacgccgccgagcacugcggcaccguggccaacggcgugcugcagaccuucaugagaauggccuggggcggcagcuacaucgcccuggacagcggcugcggcaacugggacugcaucaugaccagcuaccaguaccugaucauccagaacaccaccugggaggaccacugccaguucagcagacccagccccaucggcuaccugggccugcugagccagagaaccagagacaucuacaucagcagaagacugcugggcaccuucaccuggacccugagcgacagcgagggcaacgagacccccggcggcuacugccugaccagauggaugcugaucgaggccgagcugaagugcuucggcaacaccgccguggccaagugcaacgagaagcacgacgaggaguucugcgacaugcugagacuguucgacuucaacaagcaggccauccagagacugaagagcgaggcccagaugagcauccagcugaucaacaaggccgugaacgcccugaucaacgaccagcugaucaugaagaaccaccugagagacaugaugugcauccccuacugcaacuacagcaaguacugguaccugaaccacaccagcagcggcagaaccagccugcccaagugcuggcuggugagcaacggcagcuaccugaacgagacccacuucagcgacgacaucgagcagcaggccgacaacaugaucaccgagaugcugcagaaggaguacaucgacagacagggcaagaccccccugggccugguggaccuguucguguucagcaccagcuucuaccugaucagcaucuuccugcaccugaucaagauccccacccacagacacaucgugggcaagcccugccccaagccccacagacugaaccacaugggcaucugcagcugcggccuguacaagcagcccggcgugcccaccagauggaagagaugaggacuagucccuguucccagagcccacuuuuuuuucuuuuuuugaaauaaaauagccugucuuucagaucucaaaggcucuuuucagagccaccaaaaaaaaaaaaaaaaaaaaaaaaaaaaaaaaaaaaaaaaaaaaaaaaaaaaaaaaaaaaaaaaagaauu

SEQ ID NO: 35435 - RNA, 1733 nt, Artificial Sequence
  mRNA product Design a-2 (hSL-A64-N5) comprising derived and/or modified sequence from LASV(KAK-428;Clade n.d. (VII))__ANH09740__GPCmut9 (opt4)
aggagaguccgcucagccagguugcagaagcggcuuagcguguguccuaaucuucucucugcguguagguaggccugugccgcaaacaagcuuaccaugggccagaucgugaccuucuuccaggaggugccccacgugaucgaggaggugaugaacaucgugcugaucgcccugagccugcuggccauccugaagggccuguacaacuucgccaccugcggcgugaucggccugaucaccuuccugcugcugugcggcagaagcugcagcgccaccuacaagggccaguacgagcugcagacccuggagcugaacauggagagccugaacaugaccaugccccugagcugcaccaagaacaacagccaccacuacaucagagccggcaacaacaccggccuggagcugacccugaccaacaccagcaucaucagccacaaguucugcaaccugagcgacgcccacaagaagaaccuguacgaccacacccugaugagcaucaucaccaccuuccaccugagcauccccaacuucaaccaguacgaggccaugagcugcgacuucaacggcggcaagaucagcauccaguacaaccugagccacagcuacgccggcgacgccgcccagcacugcggcaccguggccaacggcgugcugcagaccuucaugagaauggccuggggcggcagcuaccuggcccuggacagcggcugcagaggcugggacugcaucaucagcagcuaccaguaccugaucauccagaacaccaccugggacgaccacugccaguucagcagacccagccccaucggcuaccugggcuucgugagccagaagaccagagacaucuacaucagcagaagacugcugggcaccuucaccuggacccugagcgacagcgagggccacgacaugcccggcggcuacugccugaccagauggaugcugaucgaggccgaccugaagugcuucggcaacaccgccguggccaagugcaacgagaagcacgacgaggaguucugcgacauguggagacuguucgacuucaacaagcaggccauccagagacugaaggccgaggcccagaugaacauccagcugaucaacaaggccgugaacgcccugaucaacgaccagcugaugaugaagaaccaccugagagacaucaugugcauccccuacugcaacuacagcaaguucugguaccugaacaacaccaccaccggcagaaccagccugcccagaugcuggcugaucagcaacggcagcuaccugaacgagacccacuucagcgacgacaucgagcagcaggccgacaacaugaucaccgagaugcugcagaaggaguacauggacagacagggcaagaccccccugggccugguggaccuguucguguucagcaccagcuucuaccugaucaccaucuuccugcaccuggugaagauccccacccacagacacaucgugggcaagcccugccccaagccccacagacugaaccacaugggcaucugcagcugcggccuguacaagcagcccggcgugcccgugagauggaagagaugaggacuagucccuguucccagagcccacuuuuuuuucuuuuuuugaaauaaaauagccugucuuucagaucucaaaggcucuuuucagagccaccaaaaaaaaaaaaaaaaaaaaaaaaaaaaaaaaaaaaaaaaaaaaaaaaaaaaaaaaaaaaaaaaagaauu

SEQ ID NO: 35436 - RNA, 1733 nt, Artificial Sequence; identical to SEQ ID NO: 35430
  mRNA product Design a-2 (hSL-A64-N5) comprising derived and/or modified sequence from LASV(Pinneo-NIG-1969;Clade I)__AIT17836__GPCmut9 (opt4)

SEQ ID NO: 35437 - RNA, 1733 nt, Artificial Sequence
  mRNA product Design a-2 (hSL-A64-N5) comprising derived and/or modified sequence from LASV(ISTH0009-NIG-2011;Clade II)__AIT17404__GPCmut9 (opt4)
aggagaguccgcucagccagguugcagaagcggcuuagcguguguccuaaucuucucucugcguguagguaggccugugccgcaaacaagcuuaccaugggccagaucaucaccuucuuccaggaggugccccacgugaucgaggaggugaugaacaucgugcugaucgcccugagccugcuggccauccugaagggcaucuacaacguggccaccugcggccuguucggccuggugagcuuccugcugcugugcggcagaagcugcagcaccaccuacaagggcguguacgagcugcagacccuggagcuggacauggccagccugaacaugaccaugccccugagcugcaccaagaacaacagccaccacuacaucauggugggcaacgagaccggccuggagcugacccugaccaacaccagcaucaucaaccacaaguucugcaaccugagcgacgcccacaagaagaaccuguacgaccacgcccugaugagcaucaucagcaccuuccaccugagcauccccaacuucaaccaguacgaggccaugagcugcgacuucaacggcggcaagaucagcgugcaguacaaccugagccacgccuacgccguggacgccgccaaccacugcggcaccaucgccaacggcgugcugcagaccuucaugagaauggccuggggcggcagcuacaucgcccuggacagcggcugcggcagcugggacugcaucaugaccagcuaccaguaccugaucauccagaacaccaccugggaggaccacugccaguucagcagacccagccccaucggcuaccugggccugcugagccagagaaccagagacaucuacaucagcagaagacugcugggcaccuucaccuggacccugagcgacagcgagggcaacgagacccccggcggcuacugccugaccagauggaugcugaucgaggccgagcugaagugcuucggcaacaccgccguggccaagugcaacgagaagcacgacgaggaguucugcgacaugcugagacuguucgacuucaacaagcaggccaucagaagacugaagaccgaggcccagaugagcauccagcugaucaacaaggccgugaacgcccugaucaacgaccagcugaucaugaagaaccaccugagagacaucaugugcauccccuacugcaacuacagcaaguacugguaccugaaccacaccgugaccggcaagaccagccugcccagaugcuggcuggugagcaacggcagcuaccugaacgagacccacuucagcgacgacaucgagcagcaggccgacaacaugaucaccgagcugcugcagaaggaguacauggacagacagggcaagaccccccugggccugguggaccuguucguguucagcaccagcuucuaccugaucagcaucuuccugcaccugaucaagauccccacccacagacacaucaccggcaagcccugccccaagccccacagacugaaccacaugggcaucugcagcugcggccuguacaagcaccccggcgugcccgugaaguggaagagaugaggacuagucccuguucccagagcccacuuuuuuuucuuuuuuugaaauaaaauagccugucuuucagaucucaaaggcucuuuucagagccaccaaaaaaaaaaaaaaaaaaaaaaaaaaaaaaaaaaaaaaaaaaaaaaaaaaaaaaaaaaaaaaaaagaauu

SEQ ID NO: 35438 - RNA, 1733 nt, Artificial Sequence
  mRNA product Design a-2 (hSL-A64-N5) comprising derived and/or modified sequence from LASV(ISTH2010-NIG-2012;Clade II)__AIT17482__GPCmut9 (opt4)
aggagaguccgcucagccagguugcagaagcggcuuagcguguguccuaaucuucucucugcguguagguaggccugugccgcaaacaagcuuaccaugggccagaucaucaccuucuuccaggaggugccccacgugaucgaggaggugaugaacaucgugcugaucgcccugagccugcuggccauccugaagggcaucuacaacguggccaccugcggccuguucggccuggugagcuuccugcugcugugcggcagaagcugcagcaccaccuacaagggcguguacgagcugcagacccuggagcuggacauggccagccugaacaugaccaugccccugagcugcaccaagaacaacagccaccacuacaucauggugggcaacgagaccggccuggagcugacccugaccaacaccagcaucaucaaccacaaguucugcaaccugagcgacgcccacaagaagaaccuguacgaccacgcccugaugagcaucaucagcaccuuccaccugagcauccccaacuucaaccaguacgaggccaugagcugcgacuucaacggcggcaagaucagcgugcaguacaaccugagccacgccuacgccguggacgccgccaaccacugcggcaccaucgccaacggcgugcugcagaccuucaugagaauggccuggggcggcagcuacaucgcccuggacagcggcugcggcagcugggacugcaucaugaccagcuaccaguaccugaucauccagaacaucaccugggaggaccacugccaguucagcagacccagccccaucggcuaccugggccugcugagccagagaaccagagacaucuacaucagcagaagacugcugggcaccuucaccuggacccugagcgacagcgagggcaacgagacccccggcggcuacugccugaccagauggaugcugaucgaggccgagcugaagugcuucggcaacaccgccguggccaagugcaacgagaagcacgacgaggaguucugcgacaugcugagacuguucgacuucaacaagcaggccaucagaagacugaagaccgaggcccagaugagcauccagcugaucaacaaggccgugaacgcccugaucaacgaccagcugaucaugaagaaccaccugagagacaucaugugcauccccuacugcaacuacagcaaguacugguaccugaaccacaccgugaccggcaagaccagccugcccagaugcuggcuggugagcaacggcagcuaccugaacgagacccacuucagcgacgacaucgagcagcaggccgacaacaugaucaccgagcugcugcagaaggaguacaucgacagacagggcaagaccccccugggccugguggaccuguucguguucagcaccagcuucuaccugaucagcaucuuccugcaccuggugaagauccccacccacagacacguggugggcaagcccugccccaagccccacagacugaaccacaugggcaucugcagcugcggccuguacaagcaccccggcgugcccgugaaguggaagagaugaggacuagucccuguucccagagcccacuuuuuuuucuuuuuuugaaauaaaauagccugucuuucagaucucaaaggcucuuuucagagccaccaaaaaaaaaaaaaaaaaaaaaaaaaaaaaaaaaaaaaaaaaaaaaaaaaaaaaaaaaaaaaaaaagaauu

SEQ ID NO: 35439 - RNA, 1733 nt, Artificial Sequence
  mRNA product Design a-2 (hSL-A64-N5) comprising derived and/or modified sequence from LASV(Lassa virus/H.sapiens-wt/NGA/2015/ISTH_0543;Clade II)__AVO03639__GPCmut9 (opt4)
aggagaguccgcucagccagguugcagaagcggcuuagcguguguccuaaucuucucucugcguguagguaggccugugccgcaaacaagcuuaccaugggccagaucaucaccuucuuccaggaggugccccacgugaucgaggaggugaugaacaucgugcugaucgcccugagccugcuggccauccugaagggcaucuacaacguggccaccugcggccuguucggccuggugagcuuccugcugcugugcggcagaagcugcagcaccaccuacaagggcguguacgagcugcagacccuggagcuggacauggccaaccugaacaugaccaugccccugagcugcaccaagaacaacagccaccacuacaucauggugggcaacgagaccggccuggagcugacccugaccaacaccagcaucaucaaccacaaguucugcaaccugagcgacgcccacaagaagaaccuguacgaccacgcccugaugagcaucaucagcaccuuccaccugagcauccccaacuucaaccaguacgaggccaugagcugcgacuucaacggcggcaagaucagcgugcaguacaaccugagccacaccuacgccguggacgccgccaaccacugcggcaccaucgccaacggcgugcugcagaccuucaugagaauggccuggggcggcagcuacaucgcccuggacagcggcugcggcagcugggacugcaucaugaccagcuaccaguaccuggugauccagaacaccaccugggaggaccacugccaguucagcagacccagccccaucggcuaccugggccugcugagccagagaaccagagacaucuacaucagcagaagacugcugggcaccuucaccuggacccugagcgacagcgagggcaacgagacccccggcggcuacugccugaccagauggaugcugaucgaggccgagcugaagugcuucggcaacaccgccguggccaagugcaacgagaagcacgacgaggaguucugcgacaugcugagacuguucgacuucaacaagcaggccaucagaagacugaagaccgaggcccagaugagcauccagcugaucaacaaggccgugaacgcccugaucaacgaccagcugaucaugaagaaccaccugagagacaucaugugcauccccuacugcaacuacagcaaguacugguaccugaaccacaccgugaccggcaagaccagccugcccagaugcuggcuggugagcaacggcagcuaccugaacgagacccacuucagcgacgacaucgagcagcaggccgacaacaugaucaccgagcugcugcagaaggaguacaucgacagacagggcaagaccccccugggccugguggaccuguucguguucagcaccagcuucuaccugaucagcaucuuccugcaccuggugaagauccccacccacagacacaucaccggcaagcccugccccaagccccacagacugaaccacaugggcaucugcagcugcggccuguacaagcaccccggcgugcccgugaaguggaagagaugaggacuagucccuguucccagagcccacuuuuuuuucuuuuuuugaaauaaaauagccugucuuucagaucucaaaggcucuuuucagagccaccaaaaaaaaaaaaaaaaaaaaaaaaaaaaaaaaaaaaaaaaaaaaaaaaaaaaaaaaaaaaaaaaagaauu

SEQ ID NO: 35440 - RNA, 1733 nt, Artificial Sequence
  mRNA product Design a-2 (hSL-A64-N5) comprising derived and/or modified sequence from LASV(Lassa virus/H.sapiens-wt/NGA/2016/ISTH_0009;Clade II)__AVO03571__GPCmut9 (opt4)
aggagaguccgcucagccagguugcagaagcggcuuagcguguguccuaaucuucucucugcguguagguaggccugugccgcaaacaagcuuaccaugggccagaucaucaccuucuuccaggaggugccccacgugaucgaggaggugaugaacaucgugcugaucgcccugagccugcuggccauccugaagggcaucuacaacguggccaccugcggccugcugggccuggugagcuuccugcugcugugcggcagaagcugcagcaccaccuacaagggcguguacgagcugcagacccuggagcuggacauggccagccugaacaugaccaugccccugagcugcaccaagaacaacagccaccacuacaucauggugggcaacgagaccggccuggagcugacccugaccaacaccagcaucaucaaccacaaguucugcaaccugagcgacgcccacaagaagaaccuguacgaccacgcccugaugagcaucaucagcaccuuccaccugagcauccccaacuucaaccaguacgaggccaugagcugcgacuucaacggcggcagaaucagcgugcaguacaaccugagccacagcuacgccguggacgccgccaaccacugcggcaccaucgccaacggcgugcugcagaccuucaugagaauggccuggggcggcagcuacaucgcccuggacagcggcugcggcagcugggacugcaucaugaccagcuaccaguaccugaucauccagaacaccaccugggaggaccacugccaguucagcagacccagccccaucggcuaccugggccugcugagccagagaaccagagacaucuacaucagcagaagacugcugggcaccuucaccuggacccugagcgacagcgagggcaacgagacccccggcggcuacugccugaccagauggaugcugaucgaggccgagcugaagugcuucggcaacaccgccguggccaagugcaacgagaagcacgacgaggaguucugcgacaugcugagacuguucgacuucaacaagcaggccaucagaagacugaagaccgaggcccagaugagcauccagcugaucaacaaggccgugaacgcccugaucaacgaccagcugaucaugaagaaccaccugagagacaucaugugcauccccuacugcaacuacagcaaguacugguaccugaaccacaccgugaccggcaagaccagccugcccagaugcuggcuggugagcaacggcagcuaccugaacgagacccacuucagcgacgacaucgagcagcaggccgacaacaugaucaccgagcugcugcagaaggaguacaucgacagacagggcaagaccccccugggccugguggaccuguucguguucagcaccagcuucuaccugaucagcaucuuccugcaccuggugaagauccccacccacagacacaucaccggcaagcccugccccaagccccacagacugaaccacaugggcaucugcagcugcggccuguacaaccaccccggcgugcccgugaaguggaagagaugaggacuagucccuguucccagagcccacuuuuuuuucuuuuuuugaaauaaaauagccugucuuucagaucucaaaggcucuuuucagagccaccaaaaaaaaaaaaaaaaaaaaaaaaaaaaaaaaaaaaaaaaaaaaaaaaaaaaaaaaaaaaaaaaagaauu

SEQ ID NO: 35441 - RNA, 1733 nt, Artificial Sequence
  mRNA product Design a-2 (hSL-A64-N5) comprising derived and/or modified sequence from LASV(Lassa virus/H.sapiens-wt/NGA/2016/ISTH_0017;Clade II)__AVO03567__GPCmut9 (opt4)
aggagaguccgcucagccagguugcagaagcggcuuagcguguguccuaaucuucucucugcguguagguaggccugugccgcaaacaagcuuaccaugggccagaucaucaccuucuuccaggaggugccccacgugaucgaggaggugaugaacaucgugcugaucgcccugagccugcuggccauccugaagggcaucuacaacguggccaccugcggccuguucggccuggugagcuuccugcugcugugcggcagaagcugcagcaccaccuacaagggcguguacgagcugcagacccuggagcuggacauggccagccugaacaugaccaugccccugagcugcaccaagaacaacagccaccacuacaucauggugggcaacgagaccggccuggagcugacccugaccaacaccagcaucaucaaccacaaguucugcaaccugagcgacgcccacaagaagaaccuguacgaccacgcccugaugagcaucaucagcaccuuccaccugagcauccccaacuucaaccaguacgaggccaugagcugcgacuucaacggcggcaagaucagcgugcaguacaaccugagccacaccuacgccaucgacgccgccaaccacugcggcaccaucgccaacggcgugcugcagaccuucaugagaauggccuggggcggcagcuacaucgcccuggacagcggcugcggcagcugggacugcaucaugaccagcuaccaguaccugaucauccagaacaccaccugggaggaccacugccaguucagcagacccagccccaucggcuaccugggccugcugagccagagaaccagagacaucuacaucagcagaagacugcugggcaccuucaccuggacccugagcgacagcgagggcaacgagacccccggcggcuacugccugaccagauggaugcugaucgaggccgagcugaagugcuucggcaacaccgccguggccaagugcaacgagaagcacgacgaggaguucugcgacaugcugagacuguucgacuucaacaagcaggccaucagaagacugaagaccgaggcccagaugagcauccagcugaucaacaaggccgugaacgcccugaucaacgaccagcugaucaugaagaaccaccugagagacaucaugugcauccccuacugcaacuacagcaaguacugguaccugaaccacaccgugaccggcaagaccagccugcccagaugcuggcuggugagcaacggcagcuaccugaacgagacccacuucagcgacgacaucgagcagcaggccgacaacaugaucaccgagcugcugcagaaggaguacauggacagacagggcaagaccccccugggccugguggaccuguucguguucagcaccagcuucuaccugaucagcaucuuccugcaccuggugagaauccccacccacagacacgugaucggcaagcccugccccaagccccacagacugaaccacaugggcaucugcagcugcggccuguacaagcaccccggcgugcccgugaaguggaagagaugaggacuagucccuguucccagagcccacuuuuuuuucuuuuuuugaaauaaaauagccugucuuucagaucucaaaggcucuuuucagagccaccaaaaaaaaaaaaaaaaaaaaaaaaaaaaaaaaaaaaaaaaaaaaaaaaaaaaaaaaaaaaaaaaagaauu

SEQ ID NO: 35442 - RNA, 1733 nt, Artificial Sequence
  mRNA product Design a-2 (hSL-A64-N5) comprising derived and/or modified sequence from LASV(Lassa virus/H.sapiens-wt/NGA/2018/ISTH_0959;Clade II)__AVV65099__GPCmut9 (opt4)
aggagaguccgcucagccagguugcagaagcggcuuagcguguguccuaaucuucucucugcguguagguaggccugugccgcaaacaagcuuaccaugggccagaucaucaccuucuuccaggaggugccccacgugaucgaggaggugaugaacaucgugcugaucgcccugagccugcuggccauccugaagggcaucuacaacguggugaccugcggccuguucggccuggugagcuuccugcugcugugcggcagaagcugcagcaccaccuacaagggcguguacgagcugcagacccuggagcuggacauggccagccugaacaugaccaugccccugagcugcaccaagaacaacagccaccacuacaucauggugggcaacgagaccggccuggagcugacccugaccaacaccagcaucaucaaccacaaguucugcaaccugagcgacgcccacaagaagaaccuguacgaccacgcccugaugagcaucaucagcaccuuccaccugagcauccccaacuucaaccaguacgaggccaugagcugcgacuucaacggcggcaagaucagcgugcaguacaaccugagccacgccuacgccaucgacgccgccaaccacugcggcaccaucgccaacggcgugcugcagaccuucaugagaauggccuggggcggcagcuacaucgcccuggacagcggcugcggcagcugggacugcaucaugaccagcuaccaguaccugaucauccagaacaccaccugggaggaccacugccaguucagcagacccagccccaucggcuaccugggccugcugagccagagaaccagagacaucuacaucagcagaagacugcugggcaccuucaccuggacccugagcgacagcgagggcaacgagacccccggcggcuacugccugaccagauggaugcugaucgaggccgagcugaagugcuucggcaacaccgccguggccaagugcaacgagaagcacgacgaggaguucugcgacaugcugagacuguucgacuucaacaagcaggccaucagaagacugaagaccgaggcccagaugagcauccagcugaucaacaaggccgugaacgcccugaucaacgaccagcugaucaugaagaaccaccugagagacaucaugugcauccccuacugcaacuacagcaaguacugguaccugaaccacaccgugaccggcaagaccagccugcccagaugcuggcuggugagcaacggcagcuaccugaacgagacccacuucagcgacgacaucgagcagcaggccgacaacaugaucaccgagcugcugcagaaggaguacaucgacagacagggcaagaccccccugggccugguggaccuguucguguucagcaccagcuucuaccugaucagcaucuuccugcaccuggugaagauccccacccacagacacgugaucggcaagcccugccccaagccccacagacugaaccacaugggcaucugcagcugcggccuguacaagcaccccggcgugcccgugaaguggaagagaugaggacuagucccuguucccagagcccacuuuuuuuucuuuuuuugaaauaaaauagccugucuuucagaucucaaaggcucuuuucagagccaccaaaaaaaaaaaaaaaaaaaaaaaaaaaaaaaaaaaaaaaaaaaaaaaaaaaaaaaaaaaaaaaaagaauu

SEQ ID NO: 35443 - RNA, 1733 nt, Artificial Sequence
  mRNA product Design a-2 (hSL-A64-N5) comprising derived and/or modified sequence from LASV(LASV003-NIG-2008;Clade II)__AIT17580__GPCmut9 (opt4)
aggagaguccgcucagccagguugcagaagcggcuuagcguguguccuaaucuucucucugcguguagguaggccugugccgcaaacaagcuuaccaugggccagaucaucaccuucuuccaggaggugccccacgugaucgaggaggugaugaacaucgugcugaucgcccugagccugcuggccauccugaagggcaucuacaacguggccaccugcggccuguucggccuggugagcuuccugcugcugugcggcagaagcugcagcaccaccuacaagggcguguacgagcugcagacccuggagcuggacauggccagccugaacaugaccaugccccugagcugcaccaagaacaacagccaccacuacaucauggugggcaacgagaccggccuggagcugacccugaccaacaccagcaucaucaaccacaaguucugcaaccugagcgacgcccacaagaagaaccuguacgaccacgcccugaugagcaucaucagcaccuuccaccugagcauccccaacuucaaccaguacgaggccaugagcugcgacuucaacggcggcaagaucagcgugcaguacaaccugagccacaccuacgccguggacgccgccaaccacugcggcaccaucgccaacggcgugcugcagaccuucaugagaauggccuggggcggcagcuacaucgcccuggacagcggcugcggcagcugggacugcaucaugaccagcuaccaguaccugaucauccagaacaccaccugggaggaccacugccaguucagcagacccagccccaucggcuaccugggccugcugagccagagaaccagagacaucuacaucagcagaagacugcugggcaccuucaccuggacccugagcgacagcgagagcaacgagacccccggcggcuacugccugaccagauggaugcugaucgaggccgagcugaagugcuucggcaacaccgccguggccaagugcaacgagaagcacgacgaggaguucugcgacaugcugagacuguucgacuucaacaagcaggccaucagaagacugaaggccgaggcccagaugagcauccagcugaucaacaaggccgugaacgcccugaucaacgaccagcugaucaugaagaaccaccugagagacaucaugugcauccccuacugcaacuacagcaaguacugguaccugaaccacaccgugaccggcagaaccagccugcccagaugcuggcuggugagcaacggcagcuaccugaacgagacccacuucagcgacgacaucgagcagcaggccgacaacaugaucaccgagcugcugcagaaggaguacauggacagacagggcaagaccccccugggccugguggaccuguucguguucagcaccagcuucuaccugaucagcaucuuccugcaccuggugaagauccccacccacagacacgugaucggcaagcccugccccaagccccacagacugaaccacaugggcaucugcagcugcggccuguacaagcaccccggcgugcccgugaaguggaagagaugaggacuagucccuguucccagagcccacuuuuuuuucuuuuuuugaaauaaaauagccugucuuucagaucucaaaggcucuuuucagagccaccaaaaaaaaaaaaaaaaaaaaaaaaaaaaaaaaaaaaaaaaaaaaaaaaaaaaaaaaaaaaaaaaagaauu

SEQ ID NO: 35444 - RNA, 1733 nt, Artificial Sequence
  mRNA product Design a-2 (hSL-A64-N5) comprising derived and/or modified sequence from LASV(LASV035-NIG-2009;Clade II)__AIT17588__GPCmut9 (opt4)
aggagaguccgcucagccagguugcagaagcggcuuagcguguguccuaaucuucucucugcguguagguaggccugugccgcaaacaagcuuaccaugggccagaucaucaccuucuuccaggaggugccccacgugaucgaggaggugaugaacaucgugcugaucgcccugagccugcuggccauccugaagggcaucuacaacguggccaccugcggccuguucggccuggugagcuuccugcugcugugcggcagaagcugcagcaccaccuacaagggcguguacgagcugcagacccuggagcuggacauggccagccugaacaugaccaugccccugagcugcaccaagaacaacagccaccacuacaucauggugggcaacgagaccggccuggagcugacccugaccaacaccagcaucaucaaccacaaguucugcaaccugagcgacgcccacaagaagaaccuguacgaccacgcccugaugagcaucaucagcaccuuccaccugagcauccccaacuucaaccaguacgaggccaugagcugcgacuucaacggcggcaagaucagcgugcaguacaaccugagccacgccuacgccguggacgccgccaaccacugcggcaccaucgccaacggcgugcugcagaccuucaugagaauggccuggggcggcagcuacaucgcccuggacagcggcugcggcagcugggacugcaucaugaccagcuaccaguaccugaucauccagaacaccaccugggaggaccacugccaguucagcagacccagccccaucggcuaccugggccugcugagccagagaaccagagacaucuacaucagcagaagacugcugggcaccuucaccuggacccugagcgacagcgagggcaacgagacccccggcggcuacugccugaccagauggaugcugaucgaggccgagcugaagugcuucggcaacaccgccguggccaagugcaacgagaagcacgacgaggaguucugcgacaugcugagacuguucgacuucaacaagcaggccaucagaagacugaaggccgaggcccagaugagcauccagcugaucaacaaggccgugaacgcccugaucaacgaccagcugaucaugaagaaccaccugagagacaucaugugcauccccuacugcaacuacagcaaguacugguaccugaaccacaccgugaccggcaagaccagccugcccagaugcuggcuggugagcaacggcagcuaccugaacgagacccacuucagcgacgacaucgagcagcaggccgacaacaugaucaccgagcugcugcagaaggaguacaucgacagacagggcaagaccccccugggccugguggaccuguucguguucagcaccagcuucuaccugaucagcaucuuccugcaccuggugaagauccccacccacagacacgugaucggcaagcccugccccaagccccacagacugaaccacaugggcaucugcagcugcggccuguacaagcaccccggcgugcccgugaaguggaagagaugaggacuagucccuguucccagagcccacuuuuuuuucuuuuuuugaaauaaaauagccugucuuucagaucucaaaggcucuuuucagagccaccaaaaaaaaaaaaaaaaaaaaaaaaaaaaaaaaaaaaaaaaaaaaaaaaaaaaaaaaaaaaaaaaagaauu

SEQ ID NO: 35445 - RNA, 1733 nt, Artificial Sequence
  mRNA product Design a-2 (hSL-A64-N5) comprising derived and/or modified sequence from LASV(LASV1000-NIG-2009;Clade II)__AIT17782__GPCmut9 (opt4)
aggagaguccgcucagccagguugcagaagcggcuuagcguguguccuaaucuucucucugcguguagguaggccugugccgcaaacaagcuuaccaugggccagaucaucaccuucuuccaggaggugccccacgugaucgaggaggugaugaacaucgugcugaucgcccugagccugcuggccauccugaagggcaucuacaacguggccaccugcggccuguucggccuggugagcuuccugcugcugugcggcagaagcugcagcaccaccuacaagggcguguacgagcugcagacccuggagcuggacauggccagccugaacaugaccaugccccugagcugcaccaagaacaacagccaccacuacaucauggugggcaacgagaccggccuggagcugacccugaccaacaccagcaucaucaaccacaaguucugcaaccugagcgacgcccacaagaagaaccuguacgaccacgcccugaugagcaucaucagcaccuuccaccugagcauccccaacuucaaccaguacgaggccaugagcugcgacuucaacggcggcaagaucagcgugcaguacaaccugagccacaccuacgccguggacgccgccaaccacugcggcaccaucgccaacggcgugcugcagaccuucaugagaauggccuggggcggcagcuacaucgcccuggacagcggcugcggcagcugggacugcaucaugaccagcuaccaguaccugaucauccagaacaccaccugggaggaccacugccaguucagcagacccagccccaucggcuaccugggccugcugagccagagaaccagagacaucuacaucagcagaagacugcugggcaccuucaccuggacccugagcgacagcgagggcaacgagacccccggcggcuacugccugaccagauggaugcugaucgaggccgagcugaagugcuucggcaacaccgccguggccaagugcaacgagaagcacgacgaggaguucugcgacaugcugagacuguucgacuucaacaagcaggccaucaagagacugaagaccgaggcccagaugagcauccagcugaucaacaaggccgugaacgcccugaucaacgaccagcugaucaugaagaaccaccugagagacaucaugugcauccccuacugcaacuacagcaaguacugguaccugaaccacaccgugaccggcaagaccagccugcccagaugcuggcuggugagcaacggcagcuaccugaacgagacccacuucagcgacgacaucgagcagcaggccgacaacaugaucaccgagcugcugcagaaggaguacaucgacagacagggcaagaccccccugggccugguggaccuguucguguucagcaccagcuucuaccugaucagcaucuuccugcaccuggugaagauccccacccacagacacguggugggcaagcccugccccaagccccacagacugaaccacaugggcaucugcagcugcggccuguacaagcaccccggcgugcccgugaaguggaagagaugaggacuagucccuguucccagagcccacuuuuuuuucuuuuuuugaaauaaaauagccugucuuucagaucucaaaggcucuuuucagagccaccaaaaaaaaaaaaaaaaaaaaaaaaaaaaaaaaaaaaaaaaaaaaaaaaaaaaaaaaaaaaaaaaagaauu

SEQ ID NO: 35446 - RNA, 1733 nt, Artificial Sequence
  mRNA product Design a-2 (hSL-A64-N5) comprising derived and/or modified sequence from LASV(LASV221-NIG-2010;Clade II)__AIT17624__GPCmut9 (opt4)
aggagaguccgcucagccagguugcagaagcggcuuagcguguguccuaaucuucucucugcguguagguaggccugugccgcaaacaagcuuaccaugggccagaucaucaccuucuuccaggaggugccccacgugaucgaggaggugaugaacaucgugcugaucgcccugagccugcuggccauccugaagggcaucuacaacguggccaccugcggccuguucggccuggugagcuuccugcugcugugcggcagaagcugcagcaccaccuacaagggcguguacgagcugcagacccuggagcuggacauggccagccugaacaugaccaugccccugagcugcaccaagaacaacagccaccacuacaucauggugggcaacgagaccggccuggagcugacccugaccaacaccagcaucaucaaccacaaguucugcaaccugagcgacgcccacaagaagaaccuguacgaccacgcccugaugagcaucaucagcaccuuccaccugagcauccccaacuucaaccaguacgaggccaugagcugcgacuucaacggcggcaagaucagcgugcaguacaaccugagccacaccuacgccaucgacgccgccaaccacugcggcaccaucgccaacggcgugcugcagaccuucaugagaauggccuggggcggcagcuacaucgcccuggacagcggcugcggcagcugggacugcaucaugaccagcuaccaguaccugaucauccagaacaccaccugggaggaccacugccaguucagcagacccagccccaucggcuaccugggccugcugagccagagaaccagagacaucuacaucagcagaagacugcugggcaccuucaccuggacccugagcgacagcgagggcaacgagacccccggcggcuacugccugaccagauggaugcugaucgaggccgagcugaagugcuucggcaacaccgccguggccaagugcaacgagaagcacgacgaggaguucugcgacaugcugagacuguucgacuucaacaagcaggccaucagaagacugaagaccgaggcccagaugagcauccagcugaucaacaaggccgugaacgcccugaucaacgaccagcugaucaugaagaaccaccugagagacaucaugugcauccccuacugcaacuacagcaaguacugguaccugaaccacaccgugaccggcaagaccagccugcccagaugcuggcuggugagcaacggcagcuaccugaacgagacccacuucagcgacgacaucgagcagcaggccgacaacaugaucaccgagaugcugcagaaggaguacauggacagacagggcaagaccccccugggccugguggaccuguucguguucagcaccagcuucuaccugaucagcaucuuccugcaccuggugaagauccccacccacagacacgugaucggcaagcccugccccaagccccacagacugaaccacaugggcaucugcagcugcggccuguacaagcaccccggcgugcccgugaaguggaagagaugaggacuagucccuguucccagagcccacuuuuuuuucuuuuuuugaaauaaaauagccugucuuucagaucucaaaggcucuuuucagagccaccaaaaaaaaaaaaaaaaaaaaaaaaaaaaaaaaaaaaaaaaaaaaaaaaaaaaaaaaaaaaaaaaagaauu

SEQ ID NO: 35447 - RNA, 1733 nt, Artificial Sequence
  mRNA product Design a-2 (hSL-A64-N5) comprising derived and/or modified sequence from LASV(LASV237-NIG-2010;Clade II)__AIT17638__GPCmut9 (opt4)
aggagaguccgcucagccagguugcagaagcggcuuagcguguguccuaaucuucucucugcguguagguaggccugugccgcaaacaagcuuaccaugggccagaucaucaccuucuuccaggaggugccccacgugaucgaggaggugaugaacaucgugcugaucgcccugagccugcuggccauccugaagggcaucuacaacguggccaccugcggccuguucggccuggugagcuuccugcugcugugcggcagaagcugcagcaccaccuacaagggcguguacgagcugcagacccuggagcuggacauggccagccugaacaugaccaugccccugagcugcaccaagaacaacagccaccacuacaucauggugggcaacgagaccggccuggagcugacccugaccaacaccagcaucaucaaccacaaguucugcaaccugagcgacgcccacaagaaggaccuguacgaccacgcccugaugagcaucaucagcaccuuccaccugagcauccccaacuucaaccaguacgaggccaugagcugcgacuucaacggcggcaagaucagcgugcaguacaaccugagccacaccuacgccguggacgccgccaaccacugcggcaccaucgccaacggcgugcugcagaccuucaugagaauggccuggggcggcagcuacaucgcccuggacagcggcugcggcagcugggacugcaucaugaccagcuaccaguaccugaucauccagaacaccaccugggaggaccacugccaguucagcagacccagccccaucggcuaccugggccugcugagccagagaaccagagacaucuacaucagcagaagacugcugggcaccuucaccuggacccugagcgacagcgagggcaacgagacccccggcggcuacugccugaccagauggaugcugaucgaggccgagcugaagugcuucggcaacaccgccguggccaagugcaacgagaagcacgacgaggaguucugcgacaugcugagacuguucgacuucaacaagcaggccaucagaagacugaagaccgaggcccagaugagcauccagcugaucaacaaggccgugaacgcccugaucaacgaccagcugaucaugaagaaccaccugagagacaucaugugcauccccuacugcaacuacagcaaguacugguaccugaaccacaccgugaccggcaagaccagccugcccagaugcuggcuggugagcaacggcagcuaccugaacgagacccacuucagcgacgacaucgagcagcaggccgacaacaugaucaccgagcugcugcagaaggaguacauggacagacagggcaagaccccccugggccugguggaccuguucguguucagcaccagcuucuaccugaucagcaucuuccugcaccugaucaagauccccacccacagacacaucaccggcaagcccugccccaagccccacagacugaaccacaugggcaucugcagcugcggccuguacaagcaccccggcgugcccgugaaguggaagagaugaggacuagucccuguucccagagcccacuuuuuuuucuuuuuuugaaauaaaauagccugucuuucagaucucaaaggcucuuuucagagccaccaaaaaaaaaaaaaaaaaaaaaaaaaaaaaaaaaaaaaaaaaaaaaaaaaaaaaaaaaaaaaaaaagaauu

SEQ ID NO: 35448 - RNA, 1733 nt, Artificial Sequence
  mRNA product Design a-2 (hSL-A64-N5) comprising derived and/or modified sequence from LASV(LASV253-NIG-2011;Clade II)__AIT17670__GPCmut9 (opt4)
aggagaguccgcucagccagguugcagaagcggcuuagcguguguccuaaucuucucucugcguguagguaggccugugccgcaaacaagcuuaccaugggccagaucaucaccuucuuccaggaggugccccacgugaucgaggaggugaugaacaucgugcugaucgcccugagccugcuggccauccugaagggcaucuacaacguggccaccugcggccuguucggccuggugagcuuccugcugcugugcggcagaagcugcagcaccaccuacaagggcguguacgagcugcagacccuggagcuggacauggccagccugaacaugaccaugccccugagcugcaccaagaacaacagccaccacuacaucauggugggcaacgagaccggccuggagcugacccugaccaacaccagcaucaucaaccacaaguucugcaaccugagcgacgcccacaagaagaaccuguacgaccacgcccugaugagcaucaucagcaccuuccaccugagcauccccaacuucaaccaguacgaggccaugagcugcgacuucaacggcggcaagaucagcgugcaguacaaccugagccacaccuacgccguggacgccgccaaccacugcggcaccaucgccaacggcgugcugcagaccuucaugagaauggccuggggcggcagcuacaucgcccuggacagcggcugcggcagcugggacugcaucaugaccagcuaccaguaccugaucauccagaacaccaccugggaggaccacugccaguucagcagacccagccccaucggcuaccugggccugcugagccagagaaccagagacaucuacaucagcagaagacugcugggcaccuucaccuggacccugagcgacagcgagggcaacgagacccccggcggcuacugccugaccagauggaugcugaucgaggccgagcugaagugcuucggcaacaccgccguggccaagugcaacgagaagcacgacgaggaguucugcgacaugcugagacuguucgacuucaacaagcaggccaucagaagacugaaggccgaggcccagaugagcauccagcugaucaacaaggccgugaacgcccugaucaacgaccagcugaucaugaagaaccaccugagagacaucaugugcauccccuacugcaacuacagcaaguacugguaccugaaccacaccgugaccggcagaaccagccugcccagaugcuggcuggugagcaacggcagcuaccugaacgagacccacuucagcgacgacaucgagcagcaggccgacaacaugaucaccgagcugcugcagaaggaguacaucgacagacagggcaagaccccccugggccugguggaccuguucguguucagcaccagcuucuaccugaucagcaucuuccugcaccuggugaagauccccacccacagacacaucaucggcaagcccugccccaagccccacagacugaaccacaugggcaucugcagcugcggccuguacaagcaccccggcgugcccgugaaguggaagagaugaggacuagucccuguucccagagcccacuuuuuuuucuuuuuuugaaauaaaauagccugucuuucagaucucaaaggcucuuuucagagccaccaaaaaaaaaaaaaaaaaaaaaaaaaaaaaaaaaaaaaaaaaaaaaaaaaaaaaaaaaaaaaaaaagaauu

SEQ ID NO: 35449 - RNA, 1733 nt, Artificial Sequence
  mRNA product Design a-2 (hSL-A64-N5) comprising derived and/or modified sequence from LASV(LASV254-NIG-2011;Clade II)__AIT17674__GPCmut9 (opt4)
aggagaguccgcucagccagguugcagaagcggcuuagcguguguccuaaucuucucucugcguguagguaggccugugccgcaaacaagcuuaccaugggccagaucaucaccuucuuccaggaggugccccacgugaucgaggaggugaugaacaucgugcugaucgcccugagccugcuggccauccugaagggcaucuacaacguggccaccugcggccuguucggccuggugagcuuccugcugcugugcggcagaagcugcagcaccaccuacaagggcguguacgagcugcagacccuggagcuggacaugaccaaccugaacaugaccaugccccugagcugcaccaagaacaacagccaccacuacaucauggugggcaacgagaccggccuggagcugacccugaccaacaccagcaucaucaaccacaaguucugcaaccugagcgacgcccacaagaagaaccuguacaaccacgcccugaugagcaucaucagcaccuuccaccugagcauccccaacuucaaccaguacgaggccaugagcugcgacuucaacggcggcaagaucagcgugcaguacaaccugagccacagcuacgccguggacgccgccaaccacugcggcaccaucgccaacggcgugcugcagaccuucaugagaauggccuggggcggcagcuacaucgcccuggacagcggcugcggcaacugggacugcaucaugaccagcuaccaguaccugaucauccagaacaccaccugggaggaccacugccaguucagcagacccagccccaucggcuaccugggccugcugagccagagaaccagagacaucuacaucagcagaagacugcugggcaccuucaccuggacccugagcgacagcgagggcaacgagacccccggcggcuacugccugaccagauggaugcugaucgaggccgagcugaagugcuucggcaacaccgccguggccaagugcaacgagaagcacgacgaggaguucugcgacaugcugagacuguucgacuucaacaagcaggccaucagaagacugaagaccgaggcccaggccaacauccagcugaucaacaaggccgugaacgcccugaucaacgaccagcugaucaugaagaaccaccugagagacaucaugugcauccccuacugcaacuacagcaaguacugguaccugaaccacaccgugaccggcaagaccagccugcccagaugcuggcuggugagcaacggcagcuaccugaacgagacccacuucagcgacgacaucgagcagcaggccgacaacaugaucaccgagcugcugcagaaggaguacauggacagacagggcaagaccccccugggccugguggaccuguucguguucagcaccagcuucuaccugaucagcaucuuccugcaccuggugaagauccccacccacagacacgugaucggcaagcccugccccaagccccacagacugaaccacaugggcaucugcagcugcggccuguacaagcaccccggcgugcccgugaaguggaagagaugaggacuagucccuguucccagagcccacuuuuuuuucuuuuuuugaaauaaaauagccugucuuucagaucucaaaggcucuuuucagagccaccaaaaaaaaaaaaaaaaaaaaaaaaaaaaaaaaaaaaaaaaaaaaaaaaaaaaaaaaaaaaaaaaagaauu

SEQ ID NO: 35450 - RNA, 1733 nt, Artificial Sequence
  mRNA product Design a-2 (hSL-A64-N5) comprising derived and/or modified sequence from LASV(Nig08-A19;Clade III)__ADU56618__GPCmut9 (opt4)
aggagaguccgcucagccagguugcagaagcggcuuagcguguguccuaaucuucucucugcguguagguaggccugugccgcaaacaagcuuaccaugggccagaucgugaccuucuuccaggaggugccccacgugaucgaggaggugaugaacaucgugcugaucgcccugagcauccuggccauccugaagggccuguacaacaucgccaccugcggccugaucggccuggugaccuuccugcugcugagcggcagaagcugcagcaugaccuacaagggcguguacgagcugcagacccuggagcugaacaugaacacccugaacaugaccaugccccugagcugcaccaagaacaacagccaccacuacaucauggugggcaacgagaccggccuggagcugacccugaccaacaccagccugcugcaccacaaguucugcaaccugagcgacgcccacaagaagaaccuguacgaccacacccugaugagcaucaucagcaccuuccaccugagcauccccaacuucaaccaguacgaggccaugagcugcgacuucaacggcggcaagaucaccgugcaguacaaccugagccacagcuacgccaucgacgccgccaaccacugcggcaccguggccaacggcgugcugcagaccuucaugagaauggccuggggcggcagcuacaucgcccuggacagcggcugcggcaagugggacugcaucaugaccagcuaccaguaccugaucauccagaacaccaccugggaggaccacugccaguucagcagacccagccccaucggcuaccugggccugcugagccagagaaccagagacaucuacaucagcagaagacugcugggcaccuucaccuggacccugagcgacagcgagggcaacgagacccccggcggcuacugccugaccagauggaugcugaucgaggccgagcugaagugcuucggcaacaccgccguggccaagugcaacgagaagcacgacgaggaguucugcgacaugcugagacuguucgacuucaacaagcaggccaucagaagacugaaggccgaggcccagaugagcauccagcugaucaacaaggccgugaacgcccugaucaacgaccagcugaucaugaagaaccaccugagagacaucaugugcauccccuacugcaacuacagcaaguacugguaccugaaccacaccagcaccggcagaaccagccugcccagaugcuggcuggugagcaacggcagcuaccugaacgagacccacuucagcgacgacaucgagcagcaggccgacaacaugaucaccgagaugcugcagaaggaguaccuggacagacagggcaagaccccccugggccugguggaccuguucguguucagcaccagcuucuaccugaucagcaucuuccugcaccuggugaagauccccacccacagacacaucgugggcaagcccugccccaagccccacagacugaaccacaugggcaucugcagcugcggccuguacaagcagcccggcgugcccgugagauggaagagaugaggacuagucccuguucccagagcccacuuuuuuuucuuuuuuugaaauaaaauagccugucuuucagaucucaaaggcucuuuucagagccaccaaaaaaaaaaaaaaaaaaaaaaaaaaaaaaaaaaaaaaaaaaaaaaaaaaaaaaaaaaaaaaaaagaauu

SEQ ID NO: 35451 - RNA, 1736 nt, Artificial Sequence
  mRNA product Design a-2 (hSL-A64-N5) comprising derived and/or modified sequence from LASV(G1180-SLE-2010;Clade IV)__AIT17168__GPCmut9 (opt4)
aggagaguccgcucagccagguugcagaagcggcuuagcguguguccuaaucuucucucugcguguagguaggccugugccgcaaacaagcuuaccaugggccagaucgugaccuucuuccaggaggugccccacgugaucgaggaggugaugaacaucgugcugaucgcccugagcauccuggccgugcugaagggccuguacaacuucgccaccugcggccuggugggccugcugaccuuccugcugcugugcggcagaagcugcaccgccagcagauacaagggcguguacgagcugcagacccuggagcugaacauggagacccugaacaugaccaugccccugagcugcaccaagaacaacagccaccacuacaucauggugggcaacgagaccggccuggagcugacccugaccaacaccagcaucaucaaccacaaguucugcaaccugagcgacgcccacaagaagaaccuguacgaccacgcccugaugagcaucaucagcaccuuccaccugagcauccccaacuucaaccaguacgaggccaugagcugcgacuucaacggcggcaagaucagcgugcaguacaaccugagccacagcuacgccggcgacgccgccaaccacugcggcaccguggccaacggcgugcugcagaccuucaugagaauggccuggggcggcagcuacaucgcccuggacagcggcugcggcagcugggacugcaucaugaccagcuaccaguaccugaucauccagaacaccaccugggaggaccacugccaguucagcagacccagccccaucggcuaccugggccugcugagccagagaaccagagacaucuacaucagcagaagacugcugggcaccuucaccuggacccugagcgacagcgagggcaaggacacccccggcggcuacugccugaccagauggaugcugaucgaggccgagcugaagugcuucggcaacaccgccguggccaagugcaacgagaagcacgacgaggaguucugcgacaugcugagacuguucgacuucaacaagcaggccauccagagacugaaggccgaggcccagaugagcauccagcugaucaacaaggccgugaacgcccugaucaacgaccagcugaucaugaagaaccaccugagagacaucaugugcauccccuacugcaacuacagcaaguacugguaccugaaccacaccaccaccggcaagaccagccugcccaagugcuggcuggugagcaacggcagcuaccugaacgagacccacuucagcgacgacaucgagcagcaggccgacaacaugaucaccgagaugcugcagaaggaguacauggagagacagggcaagaccccccugggccugguggaccuguucguguucagcaccagcuucuaccugaucagcaucuuccugcaccuggugaagauccccacccacagacacaucgugggcaagagcugccccaagccccacagacugaaccacaugggcaucugcagcugcggccuguacaagcagcccggcgugcccgugaaguggaagagaugaggacuagucccuguucccagagcccacuuuuuuuucuuuuuuugaaauaaaauagccugucuuucagaucucaaaggcucuuuucagagccaccaaaaaaaaaaaaaaaaaaaaaaaaaaaaaaaaaaaaaaaaaaaaaaaaaaaaaaaaaaaaaaaaagaauu

SEQ ID NO: 35452 - RNA, 1736 nt, Artificial Sequence
  mRNA product Design a-2 (hSL-A64-N5) comprising derived and/or modified sequence from LASV(G1442-SLE-2011;Clade IV)__AIT17180__GPCmut9 (opt4)
aggagaguccgcucagccagguugcagaagcggcuuagcguguguccuaaucuucucucugcguguagguaggccugugccgcaaacaagcuuaccaugggccagaucgugaccuucuuccaggaggugccccacgugaucgaggaggugaugaacaucgugcugaucgcccugagcauccuggccgugcugaagggccuguacaacguggccaccugcggccugaucggccuggugaccuuccugcugcugugcggcagaagcugcaccaccacccuguacaagggcguguacgagcugcagacccuggagcugaacauggagacccugaacaugaccaugccccugagcugcaccaagaacaacagccaccacuacaucagagugggcaacgagaccggccuggagcugacccugaccaacaccagcaucaucaaccacaaguucugcaaccugagcgacgcccacaagaagaaccuguacgaccacgcccugaugagcaucaucagcaccuuccaccugagcauccccaacuucaaccaguacgaggccaugagcugcgacuucaacggcggcaagaucagcgugcaguacaaccugagccacagcuacgccggcgacgccgccaaccacugcggcaccguggccaacggcgugcugcagaccuucaugagaauggccuggggcggcagcuacaucgcccuggacagcggcugcggcaacugggacugcaucaugaccagcuaccaguaccugaucauccagaacaccaccugggacgaccacugccaguucagcagacccagccccaucggcuaccugggccugcugagccagagaaccagagacguguacaucagcagaagacugcugggcaccuucaccuggacccugagcgacagcgagggcaaggacacccccggcggcuacugccugaccagauggaugcugaucgaggccgagcugaagugcuucggcaacaccgccguggccaagugcaacgagaagcacgacgaggaguucugcgacaugcugagacuguucgacuucaacaagcaggccauccagagacugaaggccgaggcccagaugagcauccagcugaucaacaaggccgugaacgcccugaucaacgaccagcugaucaugaagaaccaccugagagacaucaugugcauccccuacugcaacuacagcaaguacugguaccugaacaacaccgccaccggcaagaccagccugcccaagugcuggcugaucagcaacggcagcuaccugaacgagacccacuucagcgacgacaucgagcaggaggccgacaacaugaucaccgagaugcugcagaaggaguacauggagagacagggcaagaccccccugggccugguggaccuguucguguucagcaccagcuucuaccugaucagcaucuuccugcaccuggugaagauccccacccacagacacaucgugggcaagagcugccccaagccccacagacugaaccacaugggcaucugcagcugcggccuguacaagcagcccggcgugcccgugagauggaagagaugaggacuagucccuguucccagagcccacuuuuuuuucuuuuuuugaaauaaaauagccugucuuucagaucucaaaggcucuuuucagagccaccaaaaaaaaaaaaaaaaaaaaaaaaaaaaaaaaaaaaaaaaaaaaaaaaaaaaaaaaaaaaaaaaagaauu

SEQ ID NO: 35453 - RNA, 1736 nt, Artificial Sequence
  mRNA product Design a-2 (hSL-A64-N5) comprising derived and/or modified sequence from LASV(G3010-SLE-2013;Clade IV)__AIT17344__GPCmut9 (opt4)
aggagaguccgcucagccagguugcagaagcggcuuagcguguguccuaaucuucucucugcguguagguaggccugugccgcaaacaagcuuaccaugggccagaucgugaccuucuuccaggaggugccccacgugaucgaggaggugaugaacaucgugcugaucgcccugagcauccuggccgugcugaagggccuguacaacuucgccaccugcggccuggugggccuggugaccuuccugcugcugugcggcagaagcugcaccaccagccuguacaagggcguguacgagcugcagacccuggagcugaacauggagacccugaacaugaccaugccccugagcugcaccaagaacaacagccaccacuacaucauggugggcaacgagaccggccuggagcugacccugaccaacaccagcaucaucaaccacaaguucugcaaccugagcgacgcccacaagaagaaccuguacaaccacgcccugaugagcaucaucagcaccuuccaccugagcauccccaacuucaaccaguacgaggccaugagcugcgacuucaacggcggcaagaucagcgugcaguacaaccugagccacagcuacgccggcgacgccgccagccacugcggcaccguggccaacggcgugcugcagaccuucaugagaauggccuggggcggcagcuacaucgcccuggacagcggcugcggcaagugggacugcaucaugaccagcuaccaguaccugaucauccagaacaccaccugggaggaccacugccaguucagcagacccagccccaucggcuaccugggccugcugagccagagaaccagagacaucuacaucagcagaagacugcugggcaccuucaccuggacccugagcgacagcgagggcaaggacacccccggcggcuacugccugaccagauggaugcugaucgaggccgagcugaagugcuucggcaacaccgccguggccaagugcaacgagaagcacgacgaggaguucugcgacaugcugagacuguucgacuucaacaagcaggccauccagagacugaagaccgaggcccagaugagcauccagcugaucaacaaggccgugaacgcccugaucaacgaccagcugaucaugaagaaccaccugagagacaucaugugcauccccuacugcaacuacagcaaguacugguaccugaaccacaccaccaccggcaagaccagccugcccaagugcuggcuggugagcaacggcagcuaccugaacgagacccacuucagcgacgacaucgagcagcaggccgacaacaugaucaccgagaugcugcagaaggaguacauggagagacagggcaagaccccccugggccugguggaccuguucguguucagcaccagcuucuaccugaucagcaucuuccugcaccuggugaagauccccacccacagacacaucgugggcaagagcugccccaagccccacagacugaaccacaugggcaucugcagcugcggccuguacaagcagcccggcgugcccgugagauggaagagaugaggacuagucccuguucccagagcccacuuuuuuuucuuuuuuugaaauaaaauagccugucuuucagaucucaaaggcucuuuucagagccaccaaaaaaaaaaaaaaaaaaaaaaaaaaaaaaaaaaaaaaaaaaaaaaaaaaaaaaaaaaaaaaaaagaauu

SEQ ID NO: 35454 - RNA, 1736 nt, Artificial Sequence
  mRNA product Design a-2 (hSL-A64-N5) comprising derived and/or modified sequence from LASV(G502-SLE-2009;Clade IV)__AIT17126__GPCmut9 (opt4)
aggagaguccgcucagccagguugcagaagcggcuuagcguguguccuaaucuucucucugcguguagguaggccugugccgcaaacaagcuuaccaugggccagaucgugaccuucuuccaggaggugccccacgugaucgaggaggugaugaacaucgugcugaucgcccugagcauccuggccgugcugaagggccuguacaacuucgccaccugcggccuggugggccugcugaccuuccugcugcugugcggcagaagcugcaccaccggccuguacaagggcguguacgagcugcagacccuggagcugaacauggagacccugaacaugaccaugccccugagcugcaccaagaacaacagccaccacuacaucauggugggcaacgagaccggccuggagcugacccugaccaacaccagcaucaucaaccacaaguucugcaaccugagcgacgcccacaagaagaaccuguacgaccacgcccugaugagcaucaucagcaccuuccaccugagcauccccaacuucaaccaguacgaggccaugagcugcgacuucaacggcggcaagaucagcgugcaguacaaccugagccacagcuacgccggcgacgccgccgaccacugcggcaccguggccaacggcgugcugcagaccuucaugagaauggccuggggcggcagcuacaucgcccuggacagcggcugcggcagaugggacugcaucaugaccagcuaccaguaccugaucauccagaacaccaccugggaggaccacugccaguucagcagacccagccccaucggcuaccugggccugcugagccagagaaccagagacaucuacaucagcagaagacugcugggcaccuucaccuggacccugagcgacagcgagggcaaggacacccccggcggcuacugccugaccagauggaugcugaucgaggccgagcugaagugcuucggcaacaccgccguggccaagugcaacgagaagcacgacgaggaguucugcgacaugcugagacuguucgacuucaacaagcaggccauccagagacugaaggccgaggcccagaugagcauccagcugaucaacaaggccgugaacgcccugaucaacgaccagcuggugaugaagaaccaccugagagacaucaugugcauccccuacugcaacuacagcagauacugguaccugaaccacaccaccaccggcagaaccagccugcccaagugcuggcuggugagcaacggcagcuaccugaacgagacccacuucagcgacgacaucgagcagcaggccgacaacaugaucaccgagaugcugcagaaggaguacauggagagacagggcaagaccccccugggccugguggaccuguucguguucagcaccagcuucuaccugaucagcaucuuccugcaccuggugaagauccccacccacagacacaucgugggcaagagcugccccaagccccacagacugaaccacaugggcaucugcagcugcggccuguacaagcagcccggcgugcccgugaaguggaagagaugaggacuagucccuguucccagagcccacuuuuuuuucuuuuuuugaaauaaaauagccugucuuucagaucucaaaggcucuuuucagagccaccaaaaaaaaaaaaaaaaaaaaaaaaaaaaaaaaaaaaaaaaaaaaaaaaaaaaaaaaaaaaaaaaagaauu

SEQ ID NO: 35455 - RNA, 1736 nt, Artificial Sequence
  mRNA product Design a-2 (hSL-A64-N5) comprising derived and/or modified sequence from LASV(G733-SLE-2010;Clade IV)__AIT17154__GPCmut9 (opt4)
aggagaguccgcucagccagguugcagaagcggcuuagcguguguccuaaucuucucucugcguguagguaggccugugccgcaaacaagcuuaccaugggccagaucgugaccuucuuccaggaggugccccacgugaucgaggaggugaugaacaucgugcugaucgcccugagcauccuggccgugcugaagggccuguacaacuucgccaccugcggcaucgugggccuggugagcuuccugcugcugugcggcagaagcugcaccaccagccuguacaagggcguguacgagcugcagacccuggagcugaacauggagacccugaacaugaccaugccccugagcugcaccaagaacaacagccaccacuacaucauggugggcaacgagaccggccuggagcugacccugaccaacaccagcaucaucaaccacaaguucugcaaccugagcgacgcccacaagaagaaccuguacgaccacgcccugaugagcaucaucagcaccuuccaccugagcauccccaacuucaaccaguacgaggccaugagcugcgacuucaacggcggcaagaucagcgugcaguacaaccugagccacagcuacgccggcgacgccgccaaccacugcggcaccaucgccaacggcgugcugcagaccuucaugagaauggccuggggcggcagcuacaucgcccuggacagcggcugcgacagaugggacugcaucaugaccagcuaccaguaccugaucauccagaacaccaccugggaggaccacugccaguucagcagacccagccccaucggcuaccugggccugcugagccagagaaccagagacaucuacaucagcagaagacugcugggcaccuucaccuggacccugagcgacagcgagggcaaggacacccccggcggcuacugccugaccagauggaugcugaucgaggccgagcugaagugcuucggcaacaccgccguggccaagugcaacgagaagcacgacgaggaguucugcgacaugcugagacuguucgacuucaacaagcaggccauccagagacugaaggccgaggcccagaugagcauccagcugaucaacaaggccgugaacgcccugaucaacgaccagcugaucaugaagaaccaccugagagacaucaugugcauccccuacugcaacuacagcaaguacugguaccugaaccacaccaccaccggcaagaccagccugcccaagugcuggcuggugagcaacggcagcuaccugaacgagacccacuucagcgacgacaucgagcagcaggccgacaacaugaucaccgagaugcugcagaaggaguacauggagagacagggcaagaccccccugggccugguggaccuguucguguucagcaccagcuucuaccugaucagcaucuuccugcaccuggugaagauccccacccacagacacguggugggcaagagcugccccaagccccacagacugaaccacaugggcaucugcagcugcggccuguacggccagcccggcgugcccgugaaguggaagagaugaggacuagucccuguucccagagcccacuuuuuuuucuuuuuuugaaauaaaauagccugucuuucagaucucaaaggcucuuuucagagccaccaaaaaaaaaaaaaaaaaaaaaaaaaaaaaaaaaaaaaaaaaaaaaaaaaaaaaaaaaaaaaaaaagaauu

SEQ ID NO: 35456 - RNA, 1736 nt, Artificial Sequence
  mRNA product Design a-2 (hSL-A64-N5) comprising derived and/or modified sequence from MOPV/LASV reassortant(IGS-1;Clade IV)__AFY05576__GPCmut9 (opt4)
aggagaguccgcucagccagguugcagaagcggcuuagcguguguccuaaucuucucucugcguguagguaggccugugccgcaaacaagcuuaccaugggccagaucgugaccuucuuccaggaggugccccacgugaucgaggaggugaugaacaucgugcugaucgcccugagcgugcuggccgugcugaagggccuguacaacuucgccaccugcggccuggugggccuggugaccuuccugcugcugugcggcagaagcugcaccaccagccuguacaagggcguguacgagcugcagacccuggagcugaacauggagacccugaacaugaccaugccccugagcugcaccaagaacaacagccaccacuacaucauggugggcaacgagaccggccuggagcugacccugaccaacaccagcaucaucaaccacaaguucugcaaccugagcgacgcccacaagaagaaccuguacgaccacgcccugaugagcaucaucagcaccuuccaccugagcauccccaacuucaaccaguacgaggccaugagcugcgacuucaacggcggcaagaucagcgugcaguacaaccugagccacagcuacgccggcgacgccgccaaccacugcggcaccguggccaacggcgugcugcagaccuucaugagaauggccuggggcggcagcuacaucgcccuggacagcggcugcggcaacugggacugcaucaugaccagcuaccaguaccugaucauccagaacaccaccugggaggaccacugccaguucagcagacccagccccaucggcuaccugggccugcugagccagagaaccagagacaucuacaucagcagaagacugcugggcaccuucaccuggacccugagcgacagcgagggcgaggacacccccggcggcuacugccugaccagauggaugcugaucgaggccgagcugaagugcuucggcaacaccgccguggccaagugcaacgagaagcacgacgaggaguucugcgacaugcugagacuguucgacuucaacaagcaggccauccagagacugaaggccgaggcccagaugagcauccagcugaucaacaaggccgugaacgcccugaucaacgaccagcugaucaugaagaaccaccugagagacaucaugugcauccccuacugcaacuacagcaaguacugguaccugaaccacaccaccaccggcagaaccagccugcccaagugcuggcuggugagcaacggcagcuaccugaacgagacccacuucagcgacgacaucgagcagcaggccgacaacaugaucaccgagaugcugcagaaggaguacauggagagacagggcaagaccccccugggccugguggaccuguucguguucagcaccagcuucuaccugaucagcaucuuccugcaccuggugaagauccccacccacagacacaucgugggcaagagcugccccaagccccacagacugaaccacaugggcaucugcagcugcggccuguacaagcagcccggcgugcccgugaaguggaagagaugaggacuagucccuguucccagagcccacuuuuuuuucuuuuuuugaaauaaaauagccugucuuucagaucucaaaggcucuuuucagagccaccaaaaaaaaaaaaaaaaaaaaaaaaaaaaaaaaaaaaaaaaaaaaaaaaaaaaaaaaaaaaaaaaagaauu

SEQ ID NO: 35457 - RNA, 1736 nt, Artificial Sequence
  mRNA product Design a-2 (hSL-A64-N5) comprising derived and/or modified sequence from LASV(LM765-SLE-2012;Clade IV)__AIT17814__GPCmut9 (opt4)
aggagaguccgcucagccagguugcagaagcggcuuagcguguguccuaaucuucucucugcguguagguaggccugugccgcaaacaagcuuaccaugggccagaucgugaccuucuuccaggaggugccccacgugaucgaggaggugaugaacaucgugcugaucgcccugagcauccuggccgugcugaagggccuguacaacuucgccaccugcggccuggugggccuggugaccuuccugcugcugugcggcagaagcugcaccaccagccuguacaagggcguguacgagcugcagacccuggagcugaacauggagacccugaacaugaccaugccccugagcugcaccaagaacaacagccaccacuacaucauggugggcaacgagaccggccuggagcugacccugaccaacaccagcaucaucgaccacaaguucugcaaccugagcgacgcccacagaaagaaccuguacgaccacgcccugaugagcaucaucagcaccuuccaccugagcauccccaacuucaaccaguacgaggccaugagcugcgacuucaacggcggcaagaucagcgugcaguacaaccugagccacagcuacgccaaggacgccgccgaccacugcggcaccguggccaacggcgugcugcagaccuucaugagaauggccuggggcggcagcuacaucgcccuggacagcggcugcggcagaugggacugcaucaugaccagcuaccaguaccugaucauccagaacaccaccugggaggaccacugccaguucagcagacccagccccaucggcuaccugggccugcugagccagagaaccagagacaucuacaucagcagaagacugcugggcaccuucaccuggacccugagcgacagcgagggcaaggacacccccggcggcuacugccugaccagauggaugcugaucgaggccgagcugaagugcuucggcaacaccgccguggccaagugcaacgagaagcacgacgaggaguucugcgacaugcugagacuguucgacuucaacaagcaggccauccagagacugaaggccgaggcccagaugagcauccagcugaucaacaaggccgugaacgcccugaucaacgaccagcugaucaugaagaaccaccugagagacaucaugugcauccccuacugcaacuacagcaaguacugguaccugaaccacaccaccaccggcaagaccagccugcccaagugcuggcuggugagcaacggcagcuaccugaacgagacccacuucagcgacgacaucgagcagcaggccgacaacaugaucaccgagaugcugcagaaggaguacauggagagacagggcaagaccccccugggccugguggaccuguucguguucagcaccagcuucuaccugaucagcaucuuccugcaccuggugaagauccccacccacagacacaucgugggcaagcccugccccaagccccacagacugaaccacaugggcaucugcagcugcggccuguacaagcagcccggcgugcccgugaaguggaagagaugaggacuagucccuguucccagagcccacuuuuuuuucuuuuuuugaaauaaaauagccugucuuucagaucucaaaggcucuuuucagagccaccaaaaaaaaaaaaaaaaaaaaaaaaaaaaaaaaaaaaaaaaaaaaaaaaaaaaaaaaaaaaaaaaagaauu

SEQ ID NO: 35458 - RNA, 1736 nt, Artificial Sequence
  mRNA product Design a-2 (hSL-A64-N5) comprising derived and/or modified sequence from LASV(LM776-SLE-2012;Clade IV)__AIT17824__GPCmut9 (opt4)
aggagaguccgcucagccagguugcagaagcggcuuagcguguguccuaaucuucucucugcguguagguaggccugugccgcaaacaagcuuaccaugggccagaucgugaccuucuuccaggaggugccccacgugaucgaggaggugaugaacaucgugcugaucgcccugagcauccuggccgugcugaagggccuguacaacuucgccaccugcggccuggugggccuggugaccuuccugcugcugugcggcagaagcugcaccaccagcguguacaagggcguguacgagcugcagacccuggagcugaacauggagacccugaacaugaccaugccccugagcugcaccaagaacaacagccaccacuacaucauggugggcaacgagaccggccuggagcugacccugaccaacaccagcaucaucaaccacaaguucugcaaccugagcgacgcccacaagaagaaccuguacgaccacgcccugaugagcaucaucagcaccuuccaccugagcauccccaacuucaaccaguacgaggccaugagcugcgacuucaacggcggcaagaucagcgugcaguacaaccugagccacagcuacgccggcgacgccgccaaccacugcggcaccguggccaacggcgugcugcagaccuucaugagaauggccuggggcggcagcuacaucgcccuggacagcggcugcggcaagugggacugcaucaugaccagcuaccaguaccugaucauccagaacaccaccugggaggaccacugccaguucagcagacccagccccaucggcuaccugggccugcugagccagagaaccagagacaucuacaucagcagaagacugcugggcaccuucaccuggacccugagcgacagcgagggcaaggacacccccggcggcuacugccugaccagauggaugcugaucgaggccgagcugaagugcuucggcaacaccgccguggccaagugcaacgagaagcacgacgaggaguucugcgacaugcugagacuguucgacuucaacaagcaggccauccagagacugaaggccgaggcccagaugagcauccagcugaucaacaaggccgugaacgcccugaucaacgaccagcugaucaugaagaaccaccugagagacaucaugugcauccccuacugcaacuacagcaaguacugguaccugaaccacaccaccaccggcaagaccagccugcccaagugcuggcuggugagcaacggcagcuaccugaacgagacccacuucagcgacgacaucgagcagcaggccgacaacaugaucaccgagaugcugcagaaggaguacauggagagacagggcaagaccccccugggccugguggaccuguucguguucagcaccagcuucuaccugaucagcaucuuccugcaccuggugaagauccccacccacagacacaucgugggcaagagcugccccaagccccacagacugaaccacaugggcaucugcagcugcggccuguacaagcagcccggcgugcccgugagauggaagagaugaggacuagucccuguucccagagcccacuuuuuuuucuuuuuuugaaauaaaauagccugucuuucagaucucaaaggcucuuuucagagccaccaaaaaaaaaaaaaaaaaaaaaaaaaaaaaaaaaaaaaaaaaaaaaaaaaaaaaaaaaaaaaaaaagaauu

SEQ ID NO: 35459 - RNA, 1736 nt, Artificial Sequence
  mRNA product Design a-2 (hSL-A64-N5) comprising derived and/or modified sequence from LASV(Mad39;Clade IV)__ANH09722__GPCmut9 (opt4)
aggagaguccgcucagccagguugcagaagcggcuuagcguguguccuaaucuucucucugcguguagguaggccugugccgcaaacaagcuuaccaugggccagaucgugaccuucuuccaggaggugccccacgugaucgaggaggugaugaacaucgugcugaucgcccugagcauccuggccgugcugaagggccuguacaacguggccaccugcggccugaucggccuggugaccuuccugcugcugugcggcagaagcugcaccaccacccuguacaagggcguguacgagcugcaggcccuggagcugaacauggagacccugaacaugaccaugccccugagcugcaccaagaacaacagccaccacuacaucagagugggcaacgagaccggccuggagcugacccugaccaacaccagccugaucaaccacaaguucugcaaccugagcgacgcccacaagaagaaccuguacgaccacgcccugaugagcaucaucagcaccuuccaccugagcauccccaacuucaaccaguacgaggccaugagcugcgacuucaacgacggcaagaucagcgugcaguacaaccugagccacaccuacgccggcgacaccgccaaccacugcggcaccguggccaacggcgugcugcagaccuucaugagaauggccuggggcggcagcuacaucgcccuggacagcggcugcggcggcugggacugcaucaugaccagcuaccaguaccugaucauccagaacaccaccugggaggaccacugccaguucagcagacccagccccaucggcuaccugggccugcugagccagagaaccagagacaucuacaucagcagaagacugcugggcaccuucaccuggacccugagcgacagcgagggcaaggacacccccggcggcuacugccugaccagauggaugcugaucgaggccgagcugaagugcuucggcaacaccgccguggccaagugcaacgagaagcacgacgaggaguucugcgacaugcugagacuguucgacuucaacaagcaggccauccagagacugaaggccgaggcccagaugagcauccagcugaucaacaaggccgugaacgcccugaucaacgaccagcugaucaugaagaaccaccugagagacaucaugugcauccccuacugcaacuacagcaaguacugguaccugaaccacaccgugaccggcaagaccagccugcccaagugcuggcuggugagcaacggcagcuaccugaacgagacccacuucagcgacgacaucgagcagcaggccgacaacaugaucaccgagaugcugcagaaggaguacauggagagacagggcaagaccccccugggccugguggaccuguucguguucagcaccagcuucuaccugaucagcaucuuccugcaccuggugaagauccccacccacagacacguggugggcaagcccugccccaagccccacagacugaaccacaugggcaucugcagcugcggcuucuacaagcagcccggcgugcccgugagauggaagagaugaggacuagucccuguucccagagcccacuuuuuuuucuuuuuuugaaauaaaauagccugucuuucagaucucaaaggcucuuuucagagccaccaaaaaaaaaaaaaaaaaaaaaaaaaaaaaaaaaaaaaaaaaaaaaaaaaaaaaaaaaaaaaaaaagaauu

SEQ ID NO: 35460 - RNA, 1736 nt, Artificial Sequence
  mRNA product Design a-2 (hSL-A64-N5) comprising derived and/or modified sequence from LASV(Z0947-SLE-2011;Clade IV)__AIT17840__GPCmut9 (opt4)
aggagaguccgcucagccagguugcagaagcggcuuagcguguguccuaaucuucucucugcguguagguaggccugugccgcaaacaagcuuaccaugggccagaucgugaccuucuuccaggaggugccccacgugaucgaggaggugaugaacaucgugcugaucgcccugagcauccuggccgugcugaagggccuguacaacuucgccaccugcggccuggugggccuggugaccuuccugcugcugugcggcagaagcugcaccaucagccuguacaagggcguguacgagcugcagacccuggagcugaacauggagacccugaacaugaccaugccccugagcugcaccaagaacaacagccaccacuacaucauggugggcaacgagaccggccuggagcugacccugaccaacaccagcaucaucaaccacaaguucugcaaccugagcgacgcccacaagaagaaccuguacgaccacgcccugaugagcaucaucagcaccuuccaccugagcauccccaacuucaaccaguacgaggccaugagcugcgacuucaacggcggcaagaucagcgugcaguacaaccugagccacagcuacgccggcgacgccgccaaccacugcggcaccguggccaacggcgugcugcagaccuucaugagaauggccuggggcggcagcuacaucgcccuggacagcggcugcgacagaugggacugcaucaugaccagcuaccaguaccugaucauccagaacaccaccugggaggaccacugccaguucagcagacccagccccaucggcuaccugggccugcugagccagagaaccagagacaucuacaucagcagaagacugcugggcaccuucaccuggacccugagcgacagcgagggcaaggacacccccggcggcuacugccugaccagauggaugcugaucgaggccgagcugaagugcuucggcaacaccgccguggccaagugcaacgagaagcacgacgaggaguucugcgacaugcugagacuguucgacuucaacaagcaggccauccagagacugaaggccgaggcccagaugagcauccagcugaucaacaaggccgugaacgcccugaucaacgaccagcugaucaugaagaaccaccugagagacaucaugugcauccccuacugcaacuacagcaaguacugguaccugaaccacaccaccaccggcaagaccagccugcccaagugcuggcuggugagcaacggcagcuaccugaacgagacccacuucagcgacgacaucgagcagcaggccgacaacaugaucaccgagaugcugcagaaggaguacauggagagacagggcaagaccccccugggccugguggaccuguucguguucagcaccagcuucuaccugaucagcaucuuccugcaccuggugaagauccccacccacagacacaucgugggcaagcccugccccaagccccacagacugaaccacaugggcaucugcagcugcggccuguacaagcagcccggcgugcccgugaaguggaagagaugaggacuagucccuguucccagagcccacuuuuuuuucuuuuuuugaaauaaaauagccugucuuucagaucucaaaggcucuuuucagagccaccaaaaaaaaaaaaaaaaaaaaaaaaaaaaaaaaaaaaaaaaaaaaaaaaaaaaaaaaaaaaaaaaagaauu

SEQ ID NO: 35461 - RNA, 1736 nt, Artificial Sequence
  mRNA product Design a-2 (hSL-A64-N5) comprising derived and/or modified sequence from LASV(Josiah;Clade IV)__NP_694870__GPCmut9 (opt5)
aggagaguccgcucagccagguugcagaagcggcuuagcguguguccuaaucuucucucugcguguagguaggccugugccgcaaacaagcuuaccaugggccagaucgugaccuucuuucaagaggucccccacguuauugaagaggugaugaacaucgugcugauugcccucagcguccuggcugugcuuaaggggcuguacaauuucgccacaugcggacucguuggccuggugacguuucuucugcucugugggagauccugcaccacaucucuguauaaaggagucuacgaacugcagacccucgagcugaacauggaaacacuuaauaugaccaugccucugagcuguacaaagaacaauucccaucacuauaucauggugggcaacgagaccgggcucgagcugacgcuuaccaauacaucuauuaucaaccauaaauucugcaaucugagcgacgcgcacaagaaaaaccucuacgaucaugcucugauguccaucauuucuaccuuucaccugagcaucccgaauuucaaccaguaugaagccauguccugugacuuuaauggaggcaagauuagcguucaguacaaccucucucacuccuaugccggcgaugcugccaaucauugcgggacaguggcuaacggaguccugcaaaccuucaugcggauggccuggggcgggagcuacaucgcgcuugacucuggauguggcaacugggauugcauuaugacguccuaccaguaucugaucauucagaauacaaccugggaggaccacugucaguuuagccgccccucuccuaucggguaccucggacugcuuucccaaagaacacgggauaucuauauuagccgcagacugcucggcaccuucaccuggacacuguccgacucugaaggcaaggauacgcccgggggauacugccugacccgguggaugcucaucgaggccgagcugaaauguuuuggcaacacagcuguggccaagugcaaugaaaaacaugacgaggaguucugcgauaugcuucgccuguuugacuucaacaagcaggcuauucagagacucaaagccgaagcgcagaugagcauccaacugauuaauaaggccgugaacgcucuuaucaaugaucagcugaucaugaagaaccaccuccgggacauuauguguaucccuuauugcaauuacuccaaauauugguaccugaaccacaccacaaccgggcgcacgagccugcccaaguguuggcucgucucuaauggauccuaccugaacgaaacacauuucagcgacgauauugagcagcaagccgacaauaugaucaccgagaugcuucagaaagaauauauggagagacagggcaagaccccucuggggcucguugaucuguuuguguucucuaccagcuuuuaccugauuuccaucuuccuucaccucgugaaaaucccgacacaucggcacauugucggaaagucuugccccaaaccucaucgccugaaccacaugggcaucuguagcugcggccuguauaagcagcccggggugccuguuaaguggaaaagaugaggacuagucccuguucccagagcccacuuuuuuuucuuuuuuugaaauaaaauagccugucuuucagaucucaaaggcucuuuucagagccaccaaaaaaaaaaaaaaaaaaaaaaaaaaaaaaaaaaaaaaaaaaaaaaaaaaaaaaaaaaaaaaaaagaauu

SEQ ID NO: 35462 - RNA, 1733 nt, Artificial Sequence
  mRNA product Design a-2 (hSL-A64-N5) comprising derived and/or modified sequence from LASV(LP;Clade I)__AAF86701__GPCmut9 (opt5)
aggagaguccgcucagccagguugcagaagcggcuuagcguguguccuaaucuucucucugcguguagguaggccugugccgcaaacaagcuuaccaugggccagaucauuaccuucuuucaagaggugccccacgucaucgaagagguuaugaacauugugcugaucgcccucagccugcuugcuauucugaaggggcucuacaauaucgccacaugcggaaucauuggccugguggcguuccuuuuucugugugggaaauccugcucucucacgcugaagggaggcuaugaacugcagacccucgagcugaacauggaaacacuuaauaugaccaugccucugagcuguaccaaaaacuccucucaucacuacaucagagucgggaaugagacaggacucgagcugacacuuaccaacacgagcauuaucaaucauaaguucugcaaccuguccgacgcucacaaaaagaaucucuaugaucaugcccugaugucuauuaucagcaccuuucaccuguccauuccgaacuucaaucaguacgaagccaugagcugugacuuuaacggcggcaagaucucugugcaguauaaucucucccacagcuacgcuggggaugccgcugagcauugcggaacaguugccaacggcgugcugcaaaccuucaugcggauggcguggggagggcgcuauaucgcccuugacucuggcugugggaauugggauugcauuaugacauccuaccaguaccugaucauucagaacaccacgugggaagaccacugucaguuuagcagacccucuccuaucggauaucucggccugcuuucccaacggacacgcgauauuuacaucagcagacggcugcucggcaccuucacauggacccuguccgacucugaggggaacgagacccccggaggcuauugccugacacgcuggaugcucaucgaagcugagcugaaauguuuugggaauacggccgucgcuaagugcaacgaaaaacaugaugaggaguucugcgacaugcuuagacuguuugauuucaauaagcaggccauucggcgccucaaagcggaagcccagaugagcauccagcugauuaacaaggcugugaaugcccuuaucaacgaccaacugauuaugaagaaucaccucagagauaucauguguaucccuuacugcaacuauuccaaauacugguaucugaaucacaccagcucuggacggacaucccugcccaaguguuggcucauuagcaacggcucuuaccugaaugagacccaguucagcgacgacaucgaacagcaagcugauaacaugauuacagagaugcuucagaaagaauacaucgagcgccaggggaagaccccucugggacucguugacauuuuuaucuucuccacgucuuuuuaucugauuagcaucuuccugcaucuuaucaaaauuccgacacacagacauaucgugggcaagcccugcccuaaaccccaccggcucaaucauaugggcgucuguuccugcgggcuguacaagcacccuggagugcccaccaaguggaaacgcugaggacuagucccuguucccagagcccacuuuuuuuucuuuuuuugaaauaaaauagccugucuuucagaucucaaaggcucuuuucagagccaccaaaaaaaaaaaaaaaaaaaaaaaaaaaaaaaaaaaaaaaaaaaaaaaaaaaaaaaaaaaaaaaaagaauu

SEQ ID NO: 35463 - RNA, 1733 nt, Artificial Sequence
  mRNA product Design a-2 (hSL-A64-N5) comprising derived and/or modified sequence from LASV(803213;Clade II)__AAF86703__GPCmut9 (opt5)
aggagaguccgcucagccagguugcagaagcggcuuagcguguguccuaaucuucucucugcguguagguaggccugugccgcaaacaagcuuaccaugggccagaucauuaccuucuuucaagaggugccccacgucaucgaagagguuaugaacauugugcugaucgcccucagccugcuugcuauucugaaggggaucuacaauguggccacaugcggacucuucggccugaucuccuuucuucugcucugugggagaucuugcagcgucacguauaaaggaguguacgaacugcagacccuggagcucaacauggcgaaucugaacaugacaaugccucuuuccuguaccaagaauaacucucaucacuauauuaugguuggcaaugaaacagggcuggagcucacccugacaaacaccagcaucauuaaucauaaauucugcaaccuuuccgacgcucacaagaaaaaucuguacgaucaugcccucaugucuaucauuagcacguuucaccuguccaucccgaacuucaaucaguaugaggccaugagcugugacuuuaacggaggcaagauuucugugcaguacaaucugucccacagcuucgcugucgaugccgcuaaccauugcggcaccaucgccaacggggugcuccaaacauuuaugcggauggcguggggaggcucuuauaucgcccuggacuccggguguggaaauugggauugcauuaugaccagcuaccaguaccuuaucauucagaacacaaccugggaagaccacugucaguucucucgccccuccccuaucggcuaucuggggcuccugagccaaagaacgcgggauauuuacaucucccgcagacuucugggaacauuuaccuggacacucucugacagcgagggcaaugaagcucccggcggguauugccugacccgguggaugcugaucgaggccgagcucaaguguuucggaaacaccgcuguugccaaaugcaaugaaaagcaugaugaggaauuuugcgacaugcugcgccuuuucgauuucaacaaacaggcgauuaagagacugaaaacagaggcccagauguccauccagcucauuaauaaggcugugaacgcccugaucaaugaccaacuuauuaugaagaaccaucugcgggauaucauguguaucccuuacugcaauuauagccgcuacugguaucucaaccacacggucaccggcaaaacaucucugcccagauguuggcugguguccaaugggagcuaccucaacgaaacccacuuuucugacgacauugagcagcaggcugauaauaugaucacagagaugcugcaaaaggaauacauggaccggcagggaaaaaccccucuuggccugguggaucucuucgucuuuagcacguccuucuaucugauuucuaucuuucugcaccuuguuaagauuccgacacaucgccacaucguggggaaacccugcccuaagccccauagacucaaccacaugggaauuuguagcugcggccuguacaaacacccuggcgugcccgucaaguggaagcggugaggacuagucccuguucccagagcccacuuuuuuuucuuuuuuugaaauaaaauagccugucuuucagaucucaaaggcucuuuucagagccaccaaaaaaaaaaaaaaaaaaaaaaaaaaaaaaaaaaaaaaaaaaaaaaaaaaaaaaaaaaaaaaaaagaauu

SEQ ID NO: 35464 - RNA, 1733 nt, Artificial Sequence
  mRNA product Design a-2 (hSL-A64-N5) comprising derived and/or modified sequence from LASV(GA391;Clade III)__CAA36645__GPCmut9 (opt5)
aggagaguccgcucagccagguugcagaagcggcuuagcguguguccuaaucuucucucugcguguagguaggccugugccgcaaacaagcuuaccaugggccagaucgugaccuucuuucaagaggucccccacguuauugaagaggugaugaacaucgugcugauugcccucagcauccuggcuauucuuaaggggcuguacaaugucgccacaugcggacucaucggccuggugacguuccuucugcucuccgggagaucuuguagccugaucuauaaaggaaccuacgaacugcagacacucgagcugaacauggaaacccuuaauaugacaaugccucuguccugcaccaagaacaauucucaucacuauauucggguuggcaacgagacagggcucgagcugacccuuacgaauaccagcauccugaaccauaaauuuuguaaucucuccgacgcgcacaagcgcaaccuguacgaucauucucugaugagcauuaucuccacauuccaccucagcauuccgaauuuuaaccaguaugaagcuaugucuugcgacuucaauggaggcaaaaucaccgugcaguacaaccugucccacagcuuugccgucgaugccgcuggccauugugggacacuugccaauggagugcugcaaaccuucaugagaauggcuuggggcgggucuuauauugcccucgacuccggaugcggcaacugggauuguaucaugacgagcuaccaguaccugaucauucagaacacaaccugggacgaucacugccaguuuucucggcccuccccuaucggguaucuuggacugcucagccaacgcacaagagacauuuacaucucccggcgccugcugggcaccuucaccuggacacucucugauagcgagggcaaugaaacgcccgggggauauugucugaccagauggaugcuuauugaggcggagcugaagugcuuuggcaacacagccguugcuaaguguaaugaaaaacaugacgaggaguucugcgauaugcuccggcuguuugacuucaacaagcaggccauccgcagacuuaaaaccgaagcucagauguccauccagcugauuaauaaggccgugaacgcgcucaucaaugaucaacugauuaugaaaaaccaucugcgggacaucaugugcauuccuuacuguaauuauagccgcuacugguaucucaaccacacaucuaccgggaagacgucccugcccagaugcuggcuuaucagcaauggaucuuaccugaacgaaacaaaguucagcgacgauaucgagcagcaggccgacaauaugauuaccgagaugcuccaaaaagaauacaucgaucggcagggcaagaccccucuggggcuggucgaccuuuuuguguucuccacaucuuuuuaucucauuagcaucuuccugcaccuggugaaaauuccgacccaccgccauaucgucggaaagcccuguccuaaaccccacagacucaaccauaugggcauuugcuccuguggccuguacaagcagccugggguucccgugcgguggaaaagaugaggacuagucccuguucccagagcccacuuuuuuuucuuuuuuugaaauaaaauagccugucuuucagaucucaaaggcucuuuucagagccaccaaaaaaaaaaaaaaaaaaaaaaaaaaaaaaaaaaaaaaaaaaaaaaaaaaaaaaaaaaaaaaaaagaauu

SEQ ID NO: 35465 - RNA, 1736 nt, Artificial Sequence
  mRNA product Design a-2 (hSL-A64-N5) comprising derived and/or modified sequence from LASV(AV;Clade V)__CCA30314__GPCmut9 (opt5)
aggagaguccgcucagccagguugcagaagcggcuuagcguguguccuaaucuucucucugcguguagguaggccugugccgcaaacaagcuuaccaugggccagaucgugaccuucuuucaagaggucccccacguuauugaagaggugaugaacaucgugcugauugcccucagcauccuggcuguccuuaaggggcuguacaauauugccacaugcggacucaucggccugaucacguuccuucugcucugugggagauccugcucuagcaaccuguauaaaggaguguacgaacugcagucccucgaccugaauauggagacccuuaacaugacaaugccucugucuuguaccaagaauaacagccaucacuauauucggguuggcaaugauacagggcucgaacugacccuuacaaacaccuccauccugaaucauaaauuuugcaaccucucugacgcgcacaagaaagaucuguacgaccaugcucugaugagcauuaucuccacguuccaccucagcauuccgaauuuuaaccaguaugaggccaugucuugugauuucaauggaggcaagaucuccgugcaguacaaccugagccacucuuaugccauugacgcugccaaucauugcggcaccgucgcuaacgggauccuucaaacauuuaugcgcauggccuggggaggcuccuacaucgcgcuggauagcggguguggaaacugggacugcauuaugaccucuuaccaguaucucaucauucagaauacaaccugggagaaccacugucaguucuccagacccagcccuaucggcuaccuggggcuucugucccaacggacgcgcgauauuuauaucucuagacggcuccugggaacauuuaccuggacacugagcgacuccgaaggcaaugccacccccggcggguacugccucacccgcuggaugcugaucgaggcugaacuuaaguguuucggaaacacagccguggcuaaaugcaaugagaagcaugaugaggaauuuugcgacaugcugagacucuucgauuuuaacaaacaggccauuagccggcugaagucugaggcgcagauguccauccagcuuauuaauaaagccguuaacgcucugaucaaugaccaacucauuaugaagaaccaucugcgcgacaucauguguaucccuuauugcaauuacagcaaguauugguaccugaaccacacgauuaccggcaaaacaucucuccccaaguguuggcuggugagcaauggguccuaccuuaacgaaacccacuucucugaugacaucgagcagcaggccgauaauaugauuacagaaaugcugcaaaaagaguauauggagagacagggaaagaccccucucggccuggucgaccuguucguguuuagcacguccuucuaccuuaucagcauuuuucuccggcuggugaaaaucccgacacaccgccauauugucgggaagcccugcccuaaaccccacagacugaaccauaugggaaucuguucuugcggccucuauaagcagccuggcguucccgugcgguggaagcgcugaggacuagucccuguucccagagcccacuuuuuuuucuuuuuuugaaauaaaauagccugucuuucagaucucaaaggcucuuuucagagccaccaaaaaaaaaaaaaaaaaaaaaaaaaaaaaaaaaaaaaaaaaaaaaaaaaaaaaaaaaaaaaaaaagaauu

SEQ ID NO: 35466 - RNA, 1733 nt, Artificial Sequence
  mRNA product Design a-2 (hSL-A64-N5) comprising derived and/or modified sequence from LASV(Togo/2016/7082;Clade VI)__AMR44577__GPCmut9 (opt5)
aggagaguccgcucagccagguugcagaagcggcuuagcguguguccuaaucuucucucugcguguagguaggccugugccgcaaacaagcuuaccaugggccagaucauuaccuucuuucaagaggugccccacgucaucgaagagguuaugaacauugugcugaucgcccucagccugcuugcuauucugaaggggguguacaaugucgccacaugcggaaucaucggccucgugacguuccuguuucuuugugggagauccugcucucugauuuauaaaggaagcuacgaacuccagacccuggagcugaacauggaaacacucaauaugaccaugccucuguccuguacaaagaacucuagccaucacuauauccggguuggcaaugagaccgggcuugagcugacacucaccaacacguccauuaucaaucauaaauucugcaaccugucugacgcgcacaagcgcaaucuuuacgaucaugcucugaugagcauucucuccaccuuucaccugagcaucccgaacuucaaucaguaugaagccaugucuugugacuuuaacggaggcaaaauuuccgugcaguacaaucugagccacgccuaugcugucgaugccgcugagcauugcggcacaguggccaacgggguucuccaaaccuucaugagaauggcguggggaggcucuuacaucgcccuggacuccggguguggaaauugggauugcaucaugacaagcuaccaguaucuuauuauccagaacaccacgugggaagaccacugucaguuuucucggcccuccccuauuggcuaccuggggcuccugagccaacgcacaagagauaucuauauuucccggcgccuucugggaaccuucacauggacccucucugacagcgagggcaacgagacccccggcggguacugccugacaagauggaugcugaucgaagcugagcucaaguguuuuggaaauacggccguggcuaagugcaacgaaaaacaugaugaggaguucugcgacaugcugcggcuuuuugauuucaauaagcaggccauccagcgccugaaauccgaagcgcagaugagcauucaacucaucaacaaggccgucaaugcucugauuaacgaccagcuuaucaugaaaaaucaccugagagauaugauguguauuccuuauugcaacuacucuaaguauugguaccucaaucacaccuccagcggccggacaucucugcccaaguguuggcuggugagcaacggguccuaccucaaugagacccauuucucugacgacaucgaacagcaagccgauaacaugaucacagagaugcugcagaaagaauauauugaccgccagggaaagaccccucuuggccugguggaucucuuugucuucagcacguccuuuuaccugaucagcauuuuccugcaccuuaucaaaauuccgacacauagacacaucguugggaagcccugcccuaaaccccaucggcucaaucacaugggaauuuguucuugcggccuguauaagcagccuggcgugcccacccgcuggaaaagaugaggacuagucccuguucccagagcccacuuuuuuuucuuuuuuugaaauaaaauagccugucuuucagaucucaaaggcucuuuucagagccaccaaaaaaaaaaaaaaaaaaaaaaaaaaaaaaaaaaaaaaaaaaaaaaaaaaaaaaaaaaaaaaaaagaauu

SEQ ID NO: 35467 - RNA, 1733 nt, Artificial Sequence
  mRNA product Design a-2 (hSL-A64-N5) comprising derived and/or modified sequence from LASV(KAK-428;Clade n.d. (VII))__ANH09740__GPCmut9 (opt5)
aggagaguccgcucagccagguugcagaagcggcuuagcguguguccuaaucuucucucugcguguagguaggccugugccgcaaacaagcuuaccaugggccagaucgugaccuucuuucaagaggucccccacguuauugaagaggugaugaacaucgugcugauugcccucagccugcuugcuauccugaaggggcucuacaauuucgccacaugcggagucauuggccugaucacguuucuucugcucugugggagauccugcucugcgaccuauaaaggacaguacgaacugcagacacuggagcucaacauggaaagccugaauaugaccaugccucuuuccuguacaaagaacaauucucaucacuauauccgggcuggcaacaauaccgggcuggagcucacacugaccaacacgagcauuaucucccauaaauucugcaaucuuucugacgcccacaagaaaaaccuguacgaucauacccucaugagcauuaucacaaccuuucaccuguccauuccgaauuucaaccaguaugaggccaugagcugugacuuuaauggaggcaagaucucuauucaauacaaccugucccacagcuaugcuggcgaugccgcucagcauugcgggacaguggccaauggaguucuccagaccuucaugcgcauggcguggggcgggucuuaccuggcccuugacuccggauguagaggcugggauugcaucaucagcucuuaccaguaucugauuauccaaaacacgacaugggacgaucacugucaguuuucccggcccagcccuauuggguaccucggauucgugucccagaagacccgcgacaucuauauuucuagacggcugcuuggcacauuuaccuggacccugagcgauuccgaaggccaugacaugcccgggggauacugccucacacgcuggaugcugaucgaggcugaucugaaauguuucggcaacacggccgucgcuaagugcaaugaaaaacacgacgaggaguuuugcgauauguggagacucuucgacuucaacaagcaggccauccaacggcugaaagcggaagcccagaugaauauucagcuuaucaacaaggcugugaaugcccugauuaacgaccaacucaugaugaagaaucaucugcgcgauaucauguguauuccuuauugcaacuacagcaaauuuugguaucuuaauaacaccacaaccgggagaacaucucugccccgguguuggcucaucuccaauggaagcuaccugaacgagacccacuucucugacgauaucgaacagcaggcugacaauaugauuacggagaugcugcagaaggaauacauggaucgccaaggcaaaacaccucucgggcugguugaccuuuuuguguucagcaccuccuuuuaucugaucaccauuuuccuccaccuggucaagaucccgacacauagacacauugugggaaaacccugcccuaagccccaucggcugaaccacaugggcaucuguucuugcggccuuuacaaacagccuggggugcccguccgcuggaagagaugaggacuagucccuguucccagagcccacuuuuuuuucuuuuuuugaaauaaaauagccugucuuucagaucucaaaggcucuuuucagagccaccaaaaaaaaaaaaaaaaaaaaaaaaaaaaaaaaaaaaaaaaaaaaaaaaaaaaaaaaaaaaaaaaagaauu

SEQ ID NO: 35468 - RNA, 1733 nt, Artificial Sequence; identical to SEQ ID NO: 35462
  mRNA product Design a-2 (hSL-A64-N5) comprising derived and/or modified sequence from LASV(Pinneo-NIG-1969;Clade I)__AIT17836__GPCmut9 (opt5)

SEQ ID NO: 35469 - RNA, 1733 nt, Artificial Sequence
  mRNA product Design a-2 (hSL-A64-N5) comprising derived and/or modified sequence from LASV(ISTH0009-NIG-2011;Clade II)__AIT17404__GPCmut9 (opt5)
aggagaguccgcucagccagguugcagaagcggcuuagcguguguccuaaucuucucucugcguguagguaggccugugccgcaaacaagcuuaccaugggccagaucauuaccuucuuucaagaggugccccacgucaucgaagagguuaugaacauugugcugaucgcccucagccugcuugcuauucugaaggggaucuacaauguggccacaugcggacucuucggccuggucuccuuucuucugcucugugggagaucuugcagcacgaccuauaaaggaguguacgaacugcagacacuggagcucgacauggcgucccugaacaugaccaugccucuuucuuguacaaagaauaacagccaucacuauaucaugguuggcaaugaaaccgggcuggagcucacacugaccaacacguccauuaucaaucauaaauucugcaaccuuucugaugcucacaagaaaaaucuguacgaccaugcccucaugagcauuaucuccaccuuucaccugagcauuccgaacuucaaucaguaugaggccaugucuugugauuuuaacggaggcaagaucuccgugcaguacaaucugagccacgcuuaugccgucgacgcugccaaccauugcggcacaauugcgaauggggugcuccaaaccuucaugcggauggccuggggaggcucuuacaucgcucuggauuccggguguggaagcugggacugcaucaugacaucuuaccaguaucuuauuauccagaacaccacgugggaagaucacugucaguuuucccgccccagcccuauuggcuaccuggggcuccugucccaaagaacacgggacaucuauauuucucgcagacuucugggaaccuucacauggacccucagcgauuccgagggcaacgaaacccccggcggguacugccugacacgguggaugcugaucgaggccgagcucaaguguuuuggaaauacggcuguugccaaaugcaacgaaaagcaugacgaggaguucugcgauaugcugcgccuuuuugacuucaauaaacaggcgaucagacggcugaagaccgaagcccagaugagcauucagcucaucaacaaagcugugaaugcccugauuaacgaucaacuuaucaugaagaaucaucugcgcgacauuauguguaucccuuauugcaacuacucuaaguauugguaccucaaucacacagucaccggcaaaacaucccugcccagauguuggcuggugagcaacgggucuuaccucaaugaaacccacuucagcgacgauaucgagcagcaggcugacaacaugauuacggagcugcuucaaaaggaauauauggaucggcagggaaaaacaccucugggccucguggaccuguuugucuucuccaccucuuuuuaccugaucagcauuuuccuucaccucaucaagauuccgacccaucgccacaucacagggaaacccugcccuaagccccauagacugaaucacaugggaauuuguuccugcggccuguauaaacacccuggcguucccgugaaguggaagcggugaggacuagucccuguucccagagcccacuuuuuuuucuuuuuuugaaauaaaauagccugucuuucagaucucaaaggcucuuuucagagccaccaaaaaaaaaaaaaaaaaaaaaaaaaaaaaaaaaaaaaaaaaaaaaaaaaaaaaaaaaaaaaaaaagaauu

SEQ ID NO: 35470 - RNA, 1733 nt, Artificial Sequence
  mRNA product Design a-2 (hSL-A64-N5) comprising derived and/or modified sequence from LASV(ISTH2010-NIG-2012;Clade II)__AIT17482__GPCmut9 (opt5)
aggagaguccgcucagccagguugcagaagcggcuuagcguguguccuaaucuucucucugcguguagguaggccugugccgcaaacaagcuuaccaugggccagaucauuaccuucuuucaagaggugccccacgucaucgaagagguuaugaacauugugcugaucgcccucagccugcuugcuauucugaaggggaucuacaauguggccacaugcggacucuucggccuggucuccuuucuucugcucugugggagaucuugcagcacgaccuauaaaggaguguacgaacugcagacacuggagcucgacauggcgucccugaacaugaccaugccucuuucuuguacaaagaauaacagccaucacuauaucaugguuggcaaugaaaccgggcuggagcucacacugaccaacacguccauuaucaaucauaaauucugcaaccuuucugaugcucacaagaaaaaucuguacgaccaugcccucaugagcauuaucuccaccuuucaccugagcauuccgaacuucaaucaguaugaggccaugucuugugauuuuaacggaggcaagaucuccgugcaguacaaucugagccacgcuuaugccgucgacgcugccaaccauugcggcacaauugcgaauggggugcuccaaaccuucaugcggauggccuggggaggcucuuacaucgcucuggauuccggguguggaagcugggacugcaucaugacaucuuaccaguaucuuauuauccagaacauuaccugggaagaucacugucaguuuucccgccccagcccuaucggcuaccuggggcuccugucccaaagaacgcgggacauuuauaucucucgcagacuucugggaacauucaccuggacacucagcgauuccgagggcaacgaaacccccggcggguacugccugacccgguggaugcugaucgaggccgagcucaaguguuuuggaaauacagcuguugccaaaugcaacgaaaagcaugacgaggaguucugcgauaugcugcgccuuuuugacuucaauaaacaggcgauuagacggcugaagacggaagcccagaugagcauccagcucauuaacaaagcugugaaugcccugaucaacgaucaacuuauuaugaagaaucaucugcgcgacaucauguguaucccuuauugcaacuacucuaaguauugguaccucaaucacaccgucacaggcaaaaccucccugcccagauguuggcuggugagcaacgggucuuaccucaaugaaacacacuucagcgacgauauugagcagcaggcugacaacaugaucaccgagcugcuucaaaaggaauauauugaucggcagggaaaaacgccucugggccucguggaccuguuugucuucuccacaucuuuuuaccugaucagcauuuuccuucaccucguuaagaucccgacccaucgccacgugguggggaaacccugcccuaagccccauagacugaaucacaugggaauuuguuccugcggccuguauaaacacccuggcguccccgugaaguggaagcggugaggacuagucccuguucccagagcccacuuuuuuuucuuuuuuugaaauaaaauagccugucuuucagaucucaaaggcucuuuucagagccaccaaaaaaaaaaaaaaaaaaaaaaaaaaaaaaaaaaaaaaaaaaaaaaaaaaaaaaaaaaaaaaaaagaauu

SEQ ID NO: 35471 - RNA, 1733 nt, Artificial Sequence
  mRNA product Design a-2 (hSL-A64-N5) comprising derived and/or modified sequence from LASV(Lassa virus/H.sapiens-wt/NGA/2015/ISTH_0543;Clade II)__AVO03639__GPCmut9 (opt5)
aggagaguccgcucagccagguugcagaagcggcuuagcguguguccuaaucuucucucugcguguagguaggccugugccgcaaacaagcuuaccaugggccagaucauuaccuucuuucaagaggugccccacgucaucgaagagguuaugaacauugugcugaucgcccucagccugcuugcuauucugaaggggaucuacaauguggccacaugcggacucuucggccuggucuccuuucuucugcucugugggagaucuugcagcacgaccuauaaaggaguguacgaacugcagacacuggagcucgacauggcgaaccugaauaugaccaugccucuuuccuguacaaagaacaauucucaucacuauaucaugguuggcaacgaaaccgggcuggagcucacacugaccaauacgagcauuaucaaccauaaauucugcaaucuuuccgaugcucacaagaaaaaccuguacgaccaugcccucaugucuauuaucagcaccuuucaccuguccauuccgaauuucaaccaguaugaggccaugagcugugauuuuaauggaggcaagaucucugugcaguacaaccugucccacacauaugcugucgacgccgcuaaucauugcggcaccauugccaacggggugcuccaaacauucaugcggauggcguggggaggcagcuacaucgcccuggauucuggguguggauccugggacugcaucaugaccagcuaccaguaucuuguuauucagaacacgacaugggaagaucacugucaguuuucucgccccuccccuaucggcuaccuggggcuccugagccaaagaacccgggacauuuauaucucccgcagacuucugggaacauucaccuggacccucucugauagcgagggcaaugaaacacccggcggguacugccugacgcgguggaugcugauugaggcugagcucaaguguuuuggaaacaccgccguggcuaaaugcaaugaaaagcaugacgaggaguucugcgauaugcugcgccuuuuugacuucaacaaacaggccaucagacggcugaagacagaagcgcagauguccauccagcucauuaauaaagccgucaacgcucugaucaaugaucaacuuauuaugaagaaccaucugcgcgacaucauguguauuccuuauugcaauuacagcaaguauugguaccucaaccacaccgugacaggcaaaaccucucugcccagauguuggcugguguccaaugggagcuaccucaacgaaacgcacuucucugacgauaucgagcagcaggccgacaauaugaucacagagcugcuucaaaaggaauauauugaucggcagggaaaaaccccucugggccucgucgaccuguuuguuuucagcaccuccuuuuaccugaucucuauuuuccuucaccucgugaagaucccgacacaucgccacauuaccgggaaacccugcccuaagccccauagacugaaccacaugggaaucuguagcugcggccuguauaaacacccuggcgugcccgucaaguggaagcggugaggacuagucccuguucccagagcccacuuuuuuuucuuuuuuugaaauaaaauagccugucuuucagaucucaaaggcucuuuucagagccaccaaaaaaaaaaaaaaaaaaaaaaaaaaaaaaaaaaaaaaaaaaaaaaaaaaaaaaaaaaaaaaaaagaauu

SEQ ID NO: 35472 - RNA, 1733 nt, Artificial Sequence
  mRNA product Design a-2 (hSL-A64-N5) comprising derived and/or modified sequence from LASV(Lassa virus/H.sapiens-wt/NGA/2016/ISTH_0009;Clade II)__AVO03571__GPCmut9 (opt5)
aggagaguccgcucagccagguugcagaagcggcuuagcguguguccuaaucuucucucugcguguagguaggccugugccgcaaacaagcuuaccaugggccagaucauuaccuucuuucaagaggugccccacgucaucgaagagguuaugaacauugugcugaucgcccucagccugcuugcuauucugaaggggaucuacaauguggccacaugcggacuccugggccuugucuccuuccugcuccugugugggagaucuugcagcacgaccuauaaaggaguguacgaacugcagacacucgagcuggacauggcgucccuuaacaugaccaugccucugucuuguacaaagaauaacagccaucacuauaucaugguuggcaaugaaaccgggcucgagcugacacuuaccaacacguccauuaucaaucauaaauuuugcaaccugucugaugcucacaagaaaaaucucuacgaccaugcccugaugagcauuaucuccaccuuccaccugagcauuccgaacuuuaaucaguaugaggccaugucuugugauuucaacggaggccggaucuccgugcaguacaaucucagccacucuuaugcugucgacgccgcuaaccauugcggcacaauugccaauggggugcugcaaaccuuuaugcgcauggcguggggaggcuccuacaucgcccuugauagcggguguggaucuugggacugcaucaugacauccuaccaguaucugauuauccagaacaccacgugggaagaucacugucaguucagcagacccuccccuauuggcuaccucgggcugcuuucucaacggacacgcgacaucuauauuagcagacggcugcucggaaccuuuacauggacccuguccgauagcgagggcaacgaaacccccggcggguacugccugacacgcuggaugcucaucgaggcugagcugaaguguuucggaaauacggccguugcuaagugcaacgaaaaacaugacgaggaauuuugcgauaugcuuagacuguucgacuuuaauaagcaggccauccggcgccucaaaaccgaggcgcagaugucuauucagcugaucaacaaggccgugaaugcucuuauuaacgaucaacugaucaugaaaaaucaccucagagacauuauguguaucccuuauugcaacuacuccaaguauugguaccugaaucacacagucaccggcaagacaagccugccccgguguuggcucgugucuaacgggagcuaccugaaugaaacccauuucuccgacgauaucgagcagcaggccgacaacaugauuacggagcuucugcaaaaagaauauaucgaucgccagggaaagacaccucucggccugguggaccuguucgucuuuucuaccagcuucuaccuuauuuccaucuuucuccaccugguuaaaauuccgacccauagacacaucacagggaagcccugcccuaaaccccaucggcugaaucacaugggaauuuguagcugcggccucuauaaccacccuggcgugcccgugaaguggaaacgcugaggacuagucccuguucccagagcccacuuuuuuuucuuuuuuugaaauaaaauagccugucuuucagaucucaaaggcucuuuucagagccaccaaaaaaaaaaaaaaaaaaaaaaaaaaaaaaaaaaaaaaaaaaaaaaaaaaaaaaaaaaaaaaaaagaauu

SEQ ID NO: 35473 - RNA, 1733 nt, Artificial Sequence
  mRNA product Design a-2 (hSL-A64-N5) comprising derived and/or modified sequence from LASV(Lassa virus/H.sapiens-wt/NGA/2016/ISTH_0017;Clade II)__AVO03567__GPCmut9 (opt5)
aggagaguccgcucagccagguugcagaagcggcuuagcguguguccuaaucuucucucugcguguagguaggccugugccgcaaacaagcuuaccaugggccagaucauuaccuucuuucaagaggugccccacgucaucgaagagguuaugaacauugugcugaucgcccucagccugcuugcuauucugaaggggaucuacaauguggccacaugcggacucuucggccuggucuccuuucuucugcucugugggagaucuugcagcacgaccuauaaaggaguguacgaacugcagacacuggagcucgacauggcgucccugaacaugaccaugccucuuucuuguacaaagaauaacagccaucacuauaucaugguuggcaaugaaaccgggcuggagcucacacugaccaacacguccauuaucaaucauaaauucugcaaccuuucugaugcucacaagaaaaaucuguacgaccaugcccucaugagcauuaucuccaccuuucaccugagcauuccgaacuucaaucaguaugaggccaugucuugugauuuuaacggaggcaagaucuccgugcaguacaaucugagccacacauaugcuauugacgccgcuaaccauugcggcaccaucgccaaugggguccuccaaacauucaugcggauggcguggggaggcucuuacaucgcccuggauuccggguguggaagcugggacugcauuaugaccucuuaccaguaucuuaucauucagaacacgacaugggaagaucacugucaguuuucccgccccagcccuaucggcuaccuggggcuccugucccaaagaacccgggacauuuauaucucucgcagacuucugggaacauucaccuggacccucagcgauuccgagggcaacgaaacacccggcggguacugccugacgcgguggaugcugaucgaggcugagcucaaguguuuuggaaauaccgccguggcuaaaugcaacgaaaagcaugacgaggaguucugcgauaugcugcgccuuuuugacuucaauaaacaggccauuagacggcugaagacagaagcgcagaugagcauccagcucauuaacaaagccguuaaugcucugaucaacgaucaacuuauuaugaagaaucaucugcgcgacaucauguguaucccuuauugcaacuacucuaaguauugguaccucaaucacaccgugacaggcaaaaccucccugcccagauguuggcuggucagcaacgggucuuaccucaaugaaacgcacuucagcgacgauauugagcagcaggccgacaacaugaucacagagcugcuucaaaaggaauauauggaucggcagggaaaaaccccucugggccucguggaccuguuuguguucuccaccucuuuuuaccugauuagcaucuuccuucaccucguccgcauuccgacacauagacacguuaucgggaagcccugcccuaaaccccaucggcugaaucacaugggaauuuguuccugcggccuguauaagcacccuggcgugcccgugaaauggaagcgcugaggacuagucccuguucccagagcccacuuuuuuuucuuuuuuugaaauaaaauagccugucuuucagaucucaaaggcucuuuucagagccaccaaaaaaaaaaaaaaaaaaaaaaaaaaaaaaaaaaaaaaaaaaaaaaaaaaaaaaaaaaaaaaaaagaauu

SEQ ID NO: 35474 - RNA, 1733 nt, Artificial Sequence
  mRNA product Design a-2 (hSL-A64-N5) comprising derived and/or modified sequence from LASV(Lassa virus/H.sapiens-wt/NGA/2018/ISTH_0959;Clade II)__AVV65099__GPCmut9 (opt5)
aggagaguccgcucagccagguugcagaagcggcuuagcguguguccuaaucuucucucugcguguagguaggccugugccgcaaacaagcuuaccaugggccagaucauuaccuucuuucaagaggugccccacgucaucgaagagguuaugaacauugugcugaucgcccucagccugcuugcuauucugaaggggaucuacaauguggucacaugcggacucuucggccugguguccuuucuucugcucugugggagaucuugcagcacgaccuauaaaggaguuuacgaacugcagacacuggagcucgacauggccucccugaacaugaccaugccucuuucuuguacaaagaauaacagccaucacuauaucauggugggcaaugaaaccgggcuggagcucacacugaccaacacguccauuaucaaucauaaauucugcaaccuuucugaugcgcacaagaaaaaucuguacgaccaugcucucaugagcauuaucuccaccuuucaccugagcauuccgaacuucaaucaguaugaggccaugucuugugauuuuaacggaggcaagaucuccguccaguacaaucugagccacgccuaugcuauugacgccgcuaaccauugcggcacaaucgccaauggggugcuccaaaccuucaugcggauggcguggggaggcucuuacaucgcccuggauuccggguguggaagcugggacugcauuaugacaucuuaccaguaucuuaucauucagaacaccacgugggaagaucacugucaguuuucccgccccagcccuaucggcuaccuggggcuccugucccaaagaacacgggacauuuauaucucucgcagacuucugggaaccuucacauggacccucagcgauuccgagggcaacgaaacccccggcggguacugccugacacgguggaugcugaucgaggcugagcucaaguguuuuggaaauacggccguugcuaaaugcaacgaaaagcaugacgaggaguucugcgauaugcugcgccuuuuugacuucaauaaacaggccauuagacggcugaagaccgaagcgcagaugagcauccagcucauuaacaaagccgugaaugcucugaucaacgaucaacuuauuaugaagaaucaucugcgcgacaucauguguaucccuuauugcaacuacucuaaguauugguaccucaaucacacagucaccggcaaaacaucccugcccagauguuggcuggugagcaacgggucuuaccucaaugaaacccacuucagcgacgauauugagcagcaggccgacaacaugaucacggagcugcuucaaaaggaauauauugaucggcagggaaaaacaccucugggccucguggaccuguuugucuucuccaccucuuuuuaccugaucagcauuuuccuucaccucguuaagaucccgacccaucgccacgugauugggaaacccugcccuaagccccauagacugaaucacaugggaaucuguuccugcggccuguauaaacacccuggcgugcccgucaaguggaagcggugaggacuagucccuguucccagagcccacuuuuuuuucuuuuuuugaaauaaaauagccugucuuucagaucucaaaggcucuuuucagagccaccaaaaaaaaaaaaaaaaaaaaaaaaaaaaaaaaaaaaaaaaaaaaaaaaaaaaaaaaaaaaaaaaagaauu

SEQ ID NO: 35475 - RNA, 1733 nt, Artificial Sequence
  mRNA product Design a-2 (hSL-A64-N5) comprising derived and/or modified sequence from LASV(LASV003-NIG-2008;Clade II)__AIT17580__GPCmut9 (opt5)
aggagaguccgcucagccagguugcagaagcggcuuagcguguguccuaaucuucucucugcguguagguaggccugugccgcaaacaagcuuaccaugggccagaucauuaccuucuuucaagaggugccccacgucaucgaagagguuaugaacauugugcugaucgcccucagccugcuugcuauucugaaggggaucuacaauguggccacaugcggacucuucggccuggucuccuuucuucugcucugugggagaucuugcagcacgaccuauaaaggaguguacgaacugcagacacuggagcucgacauggcgucccugaacaugaccaugccucuuucuuguacaaagaauaacagccaucacuauaucaugguuggcaaugaaaccgggcuggagcucacacugaccaacacguccauuaucaaucauaaauucugcaaccuuucugaugcucacaagaaaaaucuguacgaccaugcccucaugagcauuaucuccaccuuucaccugagcauuccgaacuucaaucaguaugaggccaugucuugugauuuuaacggaggcaagaucuccgugcaguacaaucugagccacacauaugcugucgacgccgcuaaccauugcggcaccauugccaauggggugcuccaaacauucaugcggauggcguggggaggcucuuacaucgcccuggauuccggguguggaagcugggacugcaucaugaccucuuaccaguaucuuauuauccagaacacgacaugggaagaucacugucaguuuucccgccccagcccuauuggcuaccuggggcuccugucccaaagaacccgggacaucuauauuucucgcagacuucugggaacauucaccuggacccucagcgauuccgagagcaacgaaacacccggcggcuacugccugacgcgguggaugcugaucgaggcugagcucaaguguuuugggaauaccgccguugcuaaaugcaacgaaaagcaugacgaggaguucugcgauaugcugcgccuuuuugacuucaauaaacaggccaucagacggcugaaggcggaagcccagaugucuauucagcucaucaacaaagcugugaaugcccugauuaacgaucaacuuaucaugaagaaucaucugcgcgacauuauguguaucccuuauugcaacuacuccaaguauugguaccucaaucacacagucaccggaagaacaagccugccccgguguuggcuggugucuaacggcagcuaccucaaugaaacccacuucuccgacgauaucgagcagcaggcugacaacaugauuacggagcugcuucaaaaagaauauauggaucgccaggggaagacaccucugggacucguggaccuguuugucuucucuaccagcuuuuaccugaucuccauuuuccuucaccucguuaaaaucccgacccauagacacgugauuggcaagcccugcccuaaaccccaucggcugaaucacauggggaucuguagcugcggacuguauaagcacccuggcgugcccgucaaauggaagcgcugaggacuagucccuguucccagagcccacuuuuuuuucuuuuuuugaaauaaaauagccugucuuucagaucucaaaggcucuuuucagagccaccaaaaaaaaaaaaaaaaaaaaaaaaaaaaaaaaaaaaaaaaaaaaaaaaaaaaaaaaaaaaaaaaagaauu

SEQ ID NO: 35476 - RNA, 1733 nt, Artificial Sequence
  mRNA product Design a-2 (hSL-A64-N5) comprising derived and/or modified sequence from LASV(LASV035-NIG-2009;Clade II)__AIT17588__GPCmut9 (opt5)
aggagaguccgcucagccagguugcagaagcggcuuagcguguguccuaaucuucucucugcguguagguaggccugugccgcaaacaagcuuaccaugggccagaucauuaccuucuuucaagaggugccccacgucaucgaagagguuaugaacauugugcugaucgcccucagccugcuugcuauucugaaggggaucuacaauguggccacaugcggacucuucggccuggucuccuuucuucugcucugugggagaucuugcagcacgaccuauaaaggaguguacgaacugcagacacuggagcucgacauggcgucccugaacaugaccaugccucuuucuuguacaaagaauaacagccaucacuauaucaugguuggcaaugaaaccgggcuggagcucacacugaccaacacguccauuaucaaucauaaauucugcaaccuuucugaugcucacaagaaaaaucuguacgaccaugcccucaugagcauuaucuccaccuuucaccugagcauuccgaacuucaaucaguaugaggccaugucuugugauuuuaacggaggcaagaucuccgugcaguacaaucugagccacgcuuaugccgucgacgcugccaaccauugcggcacaauugcgaauggggugcuccaaaccuucaugcggauggccuggggaggcucuuacaucgcucuggauuccggguguggaagcugggacugcaucaugacaucuuaccaguaucuuauuauccagaacaccacgugggaagaucacugucaguuuucccgccccagcccuauuggcuaccuggggcuccugucccaaagaacacgggacaucuauauuucucgcagacuucugggaaccuucacauggacccucagcgauuccgagggcaacgaaacccccggcggguacugccugacacgguggaugcugaucgaggccgagcucaaguguuuuggaaauacggcuguugccaaaugcaacgaaaagcaugacgaggaguucugcgauaugcugcgccuuuuugacuucaauaaacaggcgaucagacggcugaaggccgaagcucagaugagcauucagcucaucaacaaagccgugaaugcucugauuaacgaucaacuuaucaugaagaaucaucugcgcgacauuauguguaucccuuauugcaacuacucuaaguauugguaccucaaucacaccgucacaggcaaaaccucccugcccagauguuggcuggugagcaacgggucuuaccucaaugaaacacacuucagcgacgauaucgagcagcaggccgacaacaugauuaccgagcugcuucaaaaggaauauaucgaucggcagggaaaaacgccucugggccucguggaccuguuugucuucuccacaucuuuuuaccugauuagcaucuuccuucaccucguuaagauuccgacccaucgccacgugaucgggaaacccugcccuaagccccauagacugaaucacaugggaauuuguuccugcggccuguauaaacacccuggcgugcccgucaaguggaagcggugaggacuagucccuguucccagagcccacuuuuuuuucuuuuuuugaaauaaaauagccugucuuucagaucucaaaggcucuuuucagagccaccaaaaaaaaaaaaaaaaaaaaaaaaaaaaaaaaaaaaaaaaaaaaaaaaaaaaaaaaaaaaaaaaagaauu

SEQ ID NO: 35477 - RNA, 1733 nt, Artificial Sequence
  mRNA product Design a-2 (hSL-A64-N5) comprising derived and/or modified sequence from LASV(LASV1000-NIG-2009;Clade II)__AIT17782__GPCmut9 (opt5)
aggagaguccgcucagccagguugcagaagcggcuuagcguguguccuaaucuucucucugcguguagguaggccugugccgcaaacaagcuuaccaugggccagaucauuaccuucuuucaagaggugccccacgucaucgaagagguuaugaacauugugcugaucgcccucagccugcuugcuauucugaaggggaucuacaauguggccacaugcggacucuucggccuggucuccuuucuucugcucugugggagaucuugcagcacgaccuauaaaggaguguacgaacugcagacacuggagcucgacauggcgucccugaacaugaccaugccucuuucuuguacaaagaauaacagccaucacuauaucaugguuggcaaugaaaccgggcuggagcucacacugaccaacacguccauuaucaaucauaaauucugcaaccuuucugaugcucacaagaaaaaucuguacgaccaugcccucaugagcauuaucuccaccuuucaccugagcauuccgaacuucaaucaguaugaggccaugucuugugauuuuaacggaggcaagaucuccgugcaguacaaucugagccacacauaugcugucgacgccgcuaaccauugcggcaccauugccaauggggugcuccaaacauucaugcggauggcguggggaggcucuuacaucgcccuggauuccggguguggaagcugggacugcaucaugaccucuuaccaguaucuuauuauccagaacacgacaugggaagaucacugucaguuuucccgccccagcccuauuggcuaccuggggcuccugucccaaagaacccgggacaucuauauuucucgcagacuucugggaacauucaccuggacccucagcgauuccgagggcaacgaaacacccggcggguacugccugacgcgguggaugcugaucgaggcugagcucaaguguuuuggaaauaccgccguugcuaaaugcaacgaaaagcaugacgaggaguucugcgauaugcugcgccuuuuugacuucaauaaacaggccaucaagagacugaaaacagaagcgcagaugagcauucagcucaucaacaaggccgugaaugcucugauuaacgaucaacuuaucaugaagaaucaucugcgggacauuauguguaucccuuauugcaacuacucuaaauauugguaccucaaucacaccgucacaggcaagaccucccugccccgcuguuggcuggugagcaacgggucuuaccucaaugaaacgcacuucagcgacgauaucgagcagcaggccgacaacaugauuacagagcugcuucaaaaagaauauaucgauagacagggaaagaccccucugggccucguggaccuguuugucuucuccaccucuuuuuaccugauuagcaucuuccuucaccucguuaaaauuccgacacaucggcacgugguggggaagcccugcccuaaaccccaucgccugaaucacaugggaaucuguuccugcggccuguauaagcacccuggcguccccgugaaguggaaaagaugaggacuagucccuguucccagagcccacuuuuuuuucuuuuuuugaaauaaaauagccugucuuucagaucucaaaggcucuuuucagagccaccaaaaaaaaaaaaaaaaaaaaaaaaaaaaaaaaaaaaaaaaaaaaaaaaaaaaaaaaaaaaaaaaagaauu

SEQ ID NO: 35478 - RNA, 1733 nt, Artificial Sequence
  mRNA product Design a-2 (hSL-A64-N5) comprising derived and/or modified sequence from LASV(LASV221-NIG-2010;Clade II)__AIT17624__GPCmut9 (opt5)
aggagaguccgcucagccagguugcagaagcggcuuagcguguguccuaaucuucucucugcguguagguaggccugugccgcaaacaagcuuaccaugggccagaucauuaccuucuuucaagaggugccccacgucaucgaagagguuaugaacauugugcugaucgcccucagccugcuugcuauucugaaggggaucuacaauguggccacaugcggacucuucggccuggucuccuuucuucugcucugugggagaucuugcagcacgaccuauaaaggaguguacgaacugcagacacuggagcucgacauggcgucccugaacaugaccaugccucuuucuuguacaaagaauaacagccaucacuauaucaugguuggcaaugaaaccgggcuggagcucacacugaccaacacguccauuaucaaucauaaauucugcaaccuuucugaugcucacaagaaaaaucuguacgaccaugcccucaugagcauuaucuccaccuuucaccugagcauuccgaacuucaaucaguaugaggccaugucuugugauuuuaacggaggcaagaucuccgugcaguacaaucugagccacacauaugcuauugacgccgcuaaccauugcggcaccaucgccaaugggguccuccaaacauucaugcggauggcguggggaggcucuuacaucgcccuggauuccggguguggaagcugggacugcauuaugaccucuuaccaguaucuuaucauucagaacacgacaugggaagaucacugucaguuuucccgccccagcccuaucggcuaccuggggcuccugucccaaagaacccgggacauuuauaucucucgcagacuucugggaacauucaccuggacccucagcgauuccgagggcaacgaaacacccggcggguacugccugacgcgguggaugcugaucgaggcugagcucaaguguuuuggaaauaccgccguggcuaaaugcaacgaaaagcaugacgaggaguucugcgauaugcugcgccuuuuugacuucaauaaacaggccauuagacggcugaagacagaagcgcagaugagcauccagcucauuaacaaagccguuaaugcucugaucaacgaucaacuuauuaugaagaaucaucugcgcgacaucauguguaucccuuauugcaacuacucuaaguauugguaccucaaucacaccgugacaggcaaaaccucccugcccagauguuggcuggucagcaacgggucuuaccucaaugaaacgcacuucagcgacgauauugagcagcaggccgacaacaugaucacagagaugcugcaaaaggaauauauggaucggcagggaaaaaccccucuuggccugguggaccucuuuguguucuccaccucuuuuuaccugauuagcaucuuccugcaccuugucaagauuccgacacaucgccacguuaucgggaaacccugcccuaagccccauagacucaaucacaugggaauuuguuccugcggccuguauaaacacccuggcgugcccgugaaguggaagcggugaggacuagucccuguucccagagcccacuuuuuuuucuuuuuuugaaauaaaauagccugucuuucagaucucaaaggcucuuuucagagccaccaaaaaaaaaaaaaaaaaaaaaaaaaaaaaaaaaaaaaaaaaaaaaaaaaaaaaaaaaaaaaaaaagaauu

SEQ ID NO: 35479 - RNA, 1733 nt, Artificial Sequence
  mRNA product Design a-2 (hSL-A64-N5) comprising derived and/or modified sequence from LASV(LASV237-NIG-2010;Clade II)__AIT17638__GPCmut9 (opt5)
aggagaguccgcucagccagguugcagaagcggcuuagcguguguccuaaucuucucucugcguguagguaggccugugccgcaaacaagcuuaccaugggccagaucauuaccuucuuucaagaggugccccacgucaucgaagagguuaugaacauugugcugaucgcccucagccugcuugcuauucugaaggggaucuacaauguggccacaugcggacucuucggccuggucuccuuucuucugcucugugggagaucuugcagcacgaccuauaaaggaguguacgaacugcagacacuggagcucgacauggcgucccugaacaugaccaugccucuuucuuguacaaagaauaacagccaucacuauaucaugguuggcaaugaaaccgggcuggagcucacacugaccaacacguccauuaucaaucauaaauucugcaaccuuucugaugcucacaagaaagaccuguacgaucaugcccucaugagcauuaucuccaccuuucaccugagcauuccgaauuucaaccaguaugaggccaugucuugugacuuuaauggaggcaagaucuccgugcaguacaaccugagccacacauaugcugucgaugccgcuaaucauugcggcaccauugccaacggggugcuccaaacauucaugcggauggcguggggaggcucuuacaucgcccuggacuccggguguggaagcugggauugcaucaugaccucuuaccaguaucuuauuauccagaauacgacaugggaagaccacugucaguuuucccgccccagcccuauuggcuaccuggggcuccugucccaaagaacccgggauaucuauauuucucgcagacuucugggaacauucaccuggacccucagcgacuccgagggcaacgaaacacccggcggguacugccugacgcgguggaugcugaucgaggcugagcucaaguguuuuggaaacaccgccguugcuaaaugcaaugaaaagcaugaugaggaguucugcgacaugcugcgccuuuuugauuucaacaaacaggccaucagacggcugaagacagaagcgcagaugagcauucagcucaucaauaaagccgugaacgcucugauuaaugaccaacuuaucaugaagaaccaucugcgcgacauuauguguaucccuuauugcaauuacucuaaguauugguaccucaaccacaccgucacaggcaaaaccucccugcccagauguuggcuggugagcaaugggucuuaccucaacgaaacgcacuucagcgaugacaucgagcagcaggccgauaauaugauuacagagcugcuucaaaaggaauauauggaccggcagggaaaaaccccucugggccucguggaucuguuugucuucuccaccucuuuuuaccugaucagcauuuuccuucaccucaucaagauuccgacacaucgccacaucaccgggaaacccugcccuaagccccauagacugaaccacaugggaauuuguuccugcggccuguauaaacacccuggcguucccgugaaguggaagcggugaggacuagucccuguucccagagcccacuuuuuuuucuuuuuuugaaauaaaauagccugucuuucagaucucaaaggcucuuuucagagccaccaaaaaaaaaaaaaaaaaaaaaaaaaaaaaaaaaaaaaaaaaaaaaaaaaaaaaaaaaaaaaaaaagaauu

SEQ ID NO: 35480 - RNA, 1733 nt, Artificial Sequence
  mRNA product Design a-2 (hSL-A64-N5) comprising derived and/or modified sequence from LASV(LASV253-NIG-2011;Clade II)__AIT17670__GPCmut9 (opt5)
aggagaguccgcucagccagguugcagaagcggcuuagcguguguccuaaucuucucucugcguguagguaggccugugccgcaaacaagcuuaccaugggccagaucauuaccuucuuucaagaggugccccacgucaucgaagagguuaugaacauugugcugaucgcccucagccugcuugcuauucugaaggggaucuacaauguggccacaugcggacucuucggccuggucuccuuucuucugcucugugggagaucuugcagcacgaccuauaaaggaguguacgaacugcagacacuggagcucgacauggcgucccugaacaugaccaugccucuuucuuguacaaagaauaacagccaucacuauaucaugguuggcaaugaaaccgggcuggagcucacacugaccaacacguccauuaucaaucauaaauucugcaaccuuucugaugcucacaagaaaaaucuguacgaccaugcccucaugagcauuaucuccaccuuucaccugagcauuccgaacuucaaucaguaugaggccaugucuugugauuuuaacggaggcaagaucuccgugcaguacaaucugagccacacauaugcugucgacgccgcuaaccauugcggcaccauugccaauggggugcuccaaacauucaugcggauggcguggggaggcucuuacaucgcccuggauuccggguguggaagcugggacugcaucaugaccucuuaccaguaucuuauuauccagaacacgacaugggaagaucacugucaguuuucccgccccagcccuauuggcuaccuggggcuccugucccaaagaacccgggacaucuauauuucucgcagacuucugggaacauucaccuggacccucagcgauuccgagggcaacgaaacacccggcggguacugccugacgcgguggaugcugaucgaggcugagcucaaguguuuuggaaauaccgccguugcuaaaugcaacgaaaagcaugacgaggaguucugcgauaugcugcgccuuuuugacuucaauaaacaggccaucagacggcugaaggcggaagcccagaugagcauucagcucaucaacaaagcugugaaugcccugauuaacgaucaacuuaucaugaagaaucaucugcgcgacauuauguguaucccuuauugcaacuacucuaaguauugguaccucaaucacacagucaccggcagaacaucccugccccgguguuggcuggugagcaacgggucuuaccucaaugaaacccacuucagcgacgauaucgagcagcaggcugacaacaugauuacggagcugcuucaaaaagaauauaucgaucgccagggaaagacaccucugggccucguggaccuguuugucuucuccaccucuuuuuaccugauuagcaucuuccuucaccucguuaaaauuccgacccauagacacaucauugggaagcccugcccuaaaccccaucggcugaaucacaugggaaucuguuccugcggccuguauaagcacccuggcgugcccgugaaauggaagcgcugaggacuagucccuguucccagagcccacuuuuuuuucuuuuuuugaaauaaaauagccugucuuucagaucucaaaggcucuuuucagagccaccaaaaaaaaaaaaaaaaaaaaaaaaaaaaaaaaaaaaaaaaaaaaaaaaaaaaaaaaaaaaaaaaagaauu

SEQ ID NO: 35481 - RNA, 1733 nt, Artificial Sequence
  mRNA product Design a-2 (hSL-A64-N5) comprising derived and/or modified sequence from LASV(LASV254-NIG-2011;Clade II)__AIT17674__GPCmut9 (opt5)
aggagaguccgcucagccagguugcagaagcggcuuagcguguguccuaaucuucucucugcguguagguaggccugugccgcaaacaagcuuaccaugggccagaucauuaccuucuuucaagaggugccccacgucaucgaagagguuaugaacauugugcugaucgcccucagccugcuugcuauucugaaggggaucuacaauguggccacaugcggacucuucggccuggucuccuuucuucugcucugugggagaucuugcagcacgaccuauaaaggaguguacgaacugcagacacuggagcucgacaugaccaaccugaauaugacaaugccucuuuccuguaccaagaacaauucucaucacuauaucaugguuggcaacgaaacagggcuggagcucacccugacgaauaccagcauuaucaaccauaaauucugcaaucuuuccgaugcgcacaagaaaaaccuguacaaucaugcucucaugucuauuaucagcacauuucaccuguccauuccgaacuucaaucaguaugaggccaugagcugugacuuuaacggaggcaagaucucugugcaguacaaucugucccacagcuaugccgucgaugcugccaaccauugcggcaccauugcuaacggggugcuccaaacauucaugcggauggccuggggaggcucuuacaucgcgcuggacuccggguguggaaauugggauugcaucaugaccagcuaccaguaucuuauuauccagaacacgacaugggaagaccacugucaguuuucucgccccuccccuauuggcuaccuggggcuccugagccaaagaacccgggauaucuauauuucccgcagacuucugggaacauucaccuggacccucucugacagcgagggcaaugaaacacccggcggguacugccugacgcgguggaugcugaucgaggccgagcucaaguguuuuggaaacaccgcuguugccaaaugcaaugaaaagcaugaugaggaguucugcgacaugcugcgccuuuuugauuucaacaaacaggcuaucagacggcugaagacagaagcccaggcgaauauucagcucaucaacaaagccgugaaugcucugauuaacgaccaacuuaucaugaagaaucaucugcgcgauauuauguguaucccuuauugcaacuacuccaaguauugguaccucaaucacaccgucacaggcaaaaccagccugcccagauguuggcuggugucuaacggguccuaccucaaugaaacgcacuucagcgacgacaucgagcagcaggccgauaacaugauuacagagcugcuucaaaaggaauauauggaccggcagggaaaaaccccucugggccucguggaucuguuugucuucucuaccagcuuuuaccugaucuccauuuuccuucaccucguuaagaucccgacacaucgccacgugauugggaaacccugcccuaagccccauagacugaaccacaugggaaucuguucuugcggccuguauaaacacccuggcgugcccgucaaguggaagcggugaggacuagucccuguucccagagcccacuuuuuuuucuuuuuuugaaauaaaauagccugucuuucagaucucaaaggcucuuuucagagccaccaaaaaaaaaaaaaaaaaaaaaaaaaaaaaaaaaaaaaaaaaaaaaaaaaaaaaaaaaaaaaaaaagaauu

SEQ ID NO: 35482 - RNA, 1733 nt, Artificial Sequence
  mRNA product Design a-2 (hSL-A64-N5) comprising derived and/or modified sequence from LASV(Nig08-A19;Clade III)__ADU56618__GPCmut9 (opt5)
aggagaguccgcucagccagguugcagaagcggcuuagcguguguccuaaucuucucucugcguguagguaggccugugccgcaaacaagcuuaccaugggccagaucgugaccuucuuucaagaggucccccacguuauugaagaggugaugaacaucgugcugauugcccucagcauccuggcuauucuuaaggggcuguacaauaucgccacaugcggacucaucggccuggucacguuccuucugcucuccgggagaucuuguagcaugaccuauaaaggaguguacgaacugcagacacuggagcucaacaugaauacccugaacaugacaaugccucuuuccugcaccaagaauaacucucaucacuauauuaugguuggcaaugaaacagggcuggagcucacccugacgaacaccagccuucugcaucacaaauuuuguaaucucuccgacgcgcauaagaaaaaccuguacgaucacacacugaugucuaucauuagcaccuuccaccucuccaucccgaauuuuaaccaguaugaggcuaugagcugcgacuucaauggaggcaagauuacagugcaguacaaccugucucauuccuaugccaucgaugccgcuaaucacuguggcaccgucgccaacggggugcuucaaacguuuaugcggauggcuuggggaggcagcuacauugcccuggacucugggugcggaaagugggauuguaucaugacauccuaccaguaucucaucauucagaacaccacaugggaagaccauugccaguucagccgccccucuccuaucggcuaccuggggcuucugucccaaagaacccgggauauuuauaucagccgcagacuccugggaaccuuuacauggacgcuguccgacucugagggcaaugaaacccccggcggguacugucucacacgguggaugcugauugaggcggagcuuaaaugcuucggaaacaccgccguugcuaaguguaaugaaaaacacgaugaggaauuuugcgacaugcugcgccucuucgauuuuaacaagcaggccaucagacggcugaaagcugaggcccagaugagcauccagcuuauuaauaaggcggugaacgcccugaucaaugaccaacucauuaugaagaaccaucugcgcgauaucaugugcauuccuuauuguaauuacuccaaauauugguaccugaaccacacaagcaccggcagaacgucucucccccggugcuggcuggucuccaaugggagcuaccuuaacgaaacacacuucucugacgacaucgagcagcaggcugauaauaugaucaccgagaugcugcaaaaggaauaucucgaccgccagggaaaaaccccucugggccugguggaucuuuucguguuuagcacauccuucuaccucauuucuaucuuucugcaucuggucaagauuccgacccacagacauaucguugggaaacccuguccuaagccccaccggcucaaccacaugggaauuugcagcuguggccuguauaaacagccuggcgugcccgugcgcuggaagagaugaggacuagucccuguucccagagcccacuuuuuuuucuuuuuuugaaauaaaauagccugucuuucagaucucaaaggcucuuuucagagccaccaaaaaaaaaaaaaaaaaaaaaaaaaaaaaaaaaaaaaaaaaaaaaaaaaaaaaaaaaaaaaaaaagaauu

SEQ ID NO: 35483 - RNA, 1736 nt, Artificial Sequence
  mRNA product Design a-2 (hSL-A64-N5) comprising derived and/or modified sequence from LASV(G1180-SLE-2010;Clade IV)__AIT17168__GPCmut9 (opt5)
aggagaguccgcucagccagguugcagaagcggcuuagcguguguccuaaucuucucucugcguguagguaggccugugccgcaaacaagcuuaccaugggccagaucgugaccuucuuucaagaggucccccacguuauugaagaggugaugaacaucgugcugauugcccucagcauccuggcuguccuuaaggggcuguacaauuucgccacaugcggacucgugggccugcuuacguuucugcuccugugugggagauccugcaccgcgucucgguauaaaggaguuuacgaacugcagacacucgagcugaacauggaaacccuuaauaugacaaugccucugagcuguaccaagaacaauucccaucacuauauuauggugggcaacgagacagggcucgagcugacccuuacgaauaccucuaucaucaaccauaaauucugcaaucugagcgacgcucacaagaaaaaccucuacgaucaugcccugauguccauuaucucuacauuucaccugagcauuccgaauuucaaccaguaugaagccauguccugugacuuuaauggaggcaagaucagcguccaguacaaccucucucacuccuaugcuggcgaugccgcuaaucauugcgggaccguggccaacggaguucugcaaacauucaugcgcauggcguggggcgggagcuacauugcccuugacucuggauguggcuccugggauugcaucaugaccagcuaccaguaucugauuauccagaacacgacaugggaggaccacugucaguuuucuagacccuccccuaucggguaccucggacugcuuagccaacggacccgcgauauuuauaucuccagacggcugcucggcacauucaccuggacccugucugacagcgaaggcaaggauacacccgggggauacugccugacgcgcuggaugcucauugaggcugagcugaaauguuuuggcaauaccgccguggcuaagugcaacgaaaaacaugacgaggaguucugcgauaugcuuagacuguuugacuucaauaagcaggccauccagcggcucaaagcggaagcccagauguccauucaacugaucaacaaggcugucaaugcccuuaucaacgaucagcugauuaugaagaaucaccuccgcgacaucauguguauuccuuauugcaacuacagcaaauauugguaccugaaucacacaaccacagggaagaccucucugcccaaauguuggcucguguccaacggaagcuaccugaaugaaacgcauuucucugacgauaucgagcagcaagcugacaacaugauuacagagaugcuucagaaggaauauauggagagacagggcaaaaccccucuggggcucguggaucuguuugucuucagcaccuccuuuuaccugaucucuaucuuccuucaccucguuaagauuccgacacaucggcacaucgugggaaaaagcugccccaagccucaucgccugaaucacaugggcauuuguuccugcggccuguauaagcagcccggggugccugucaaauggaagagaugaggacuagucccuguucccagagcccacuuuuuuuucuuuuuuugaaauaaaauagccugucuuucagaucucaaaggcucuuuucagagccaccaaaaaaaaaaaaaaaaaaaaaaaaaaaaaaaaaaaaaaaaaaaaaaaaaaaaaaaaaaaaaaaaagaauu

SEQ ID NO: 35484 - RNA, 1736 nt, Artificial Sequence
  mRNA product Design a-2 (hSL-A64-N5) comprising derived and/or modified sequence from LASV(G1442-SLE-2011;Clade IV)__AIT17180__GPCmut9 (opt5)
aggagaguccgcucagccagguugcagaagcggcuuagcguguguccuaaucuucucucugcguguagguaggccugugccgcaaacaagcuuaccaugggccagaucgugaccuucuuucaagaggucccccacguuauugaagaggugaugaacaucgugcugauugcccucagcauccuggcuguccuuaaggggcuguacaauguggccacaugcggacucauuggccugguuacguuccuucugcucugugggagauccugcaccacaacccuguauaaaggaguguacgaacugcagacacucgagcugaacauggaaacccuuaauaugacaaugccucugucuuguaccaagaacaauagccaucacuauauccgggucggcaacgagacggggcucgagcugacccuuacaaauaccuccaucauuaaccauaaauuuugcaaucugucugacgcgcacaagaaaaaccucuacgaucaugcucugaugagcaucauuuccacauuccaccugucuaucccgaauuuuaaccaguaugaagccaugagcugugacuucaauggaggcaagauuuccgugcaguacaaccucagccacucuuaugccggcgaugcugccaaucauugcgggaccguugcuaacggagugcugcaaacguuuaugcgcauggccuggggcggguccuacaucgcgcuugacagcggauguggcaacugggauugcauuaugacaucuuaccaguaucugaucauccagaauaccacaugggacgaucacugucaguucuccagacccagcccuauuggguaccucggacugcuuucucaacggacccgcgacgucuauaucuccagacggcugcucggcaccuuuacauggacgcugagcgauuccgagggcaaggacacccccgggggauacugccugacacgcuggaugcucauugaagccgagcugaaauguuucggcaacaccgcuguggccaagugcaaugagaaacaugaugaagaguuuugcgacaugcuuagacuguucgauuuuaacaagcaggcuauccagcggcucaaagccgaagcgcagaugucuauucaacugaucaauaaggccgugaacgcucuuaucaaugaccagcugauuaugaagaaccaccuccgcgacaucauguguauuccuuauugcaauuacagcaaauauugguaccugaacaauacagccaccgggaagacgucccugcccaaauguuggcucaucagcaacggaucuuaccugaaugagacacacuucuccgaugacauugaacaggaggcugauaacaugaucaccgagaugcuucaaaaggaauauauggagagacagggcaaaaccccucuggggcucgucgaccuguucguuuuuagcacaucuuucuaccugaucagcauuuuucuucaucucgugaagaucccgacccaccggcauauugugggaaaauccugccccaagccucaccgccugaaucauaugggcaucuguucuugcggccuguauaagcagcccggggucccugugagauggaaacggugaggacuagucccuguucccagagcccacuuuuuuuucuuuuuuugaaauaaaauagccugucuuucagaucucaaaggcucuuuucagagccaccaaaaaaaaaaaaaaaaaaaaaaaaaaaaaaaaaaaaaaaaaaaaaaaaaaaaaaaaaaaaaaaaagaauu

SEQ ID NO: 35485 - RNA, 1736 nt, Artificial Sequence
  mRNA product Design a-2 (hSL-A64-N5) comprising derived and/or modified sequence from LASV(G3010-SLE-2013;Clade IV)__AIT17344__GPCmut9 (opt5)
aggagaguccgcucagccagguugcagaagcggcuuagcguguguccuaaucuucucucugcguguagguaggccugugccgcaaacaagcuuaccaugggccagaucgugaccuucuuucaagaggucccccacguuauugaagaggugaugaacaucgugcugauugcccucagcauccuggcuguccuuaaggggcuguacaauuucgccacaugcggacucgugggccugguuacguuucuucugcucugugggagauccugcaccacaucucuguauaaaggaguguacgaacugcagacccucgagcugaacauggaaacacuuaauaugaccaugccucugagcuguacaaagaacaauucccaucacuauauuauggucggcaacgagaccgggcucgagcugacgcuuaccaauacaucuaucaucaaccauaaauucugcaaucugagcgacgcgcacaagaaaaaccucuacaaucaugcucugauguccauuaucucuaccuuucaccugagcauuccgaacuucaaucaguaugaagccauguccugugauuuuaacggaggcaagaucagcgugcaguacaaucucucucacuccuaugccggcgacgcugccagccauugcgggacaguugcuaacggagugcugcaaaccuucaugcggauggccuggggcgggucuuacauugcgcuugauuccggauguggcaagugggacugcaucaugacgagcuaccaguaucugauuauccagaacacaaccugggaggaucacugucaguuuucucgccccuccccuaucggguaccucggacugcuuagccaaagaacacgggacauuuauaucucccgcagacugcucggcaccuucaccuggacacugucugauagcgaaggcaaagacacgcccgggggauacugccugacccgguggaugcucauugaggccgagcugaaguguuuuggcaauacagcugucgccaaaugcaacgaaaagcaugaugaggaguucugcgacaugcuucgccuguuugauuucaauaaacaggcuauccagagacucaagaccgaagcccagauguccauucaacugaucaacaaggcggugaaugcccuuaucaacgaccagcugauuaugaaaaaucaccuccgggauaucauguguauuccuuauugcaacuacagcaaguauugguaccugaaucacacaaccacggggaaaacaucucugcccaaguguuggcucguguccaacggaagcuaccugaaugaaacccauuucucugacgacaucgagcagcaagcugauaacaugauuaccgagaugcuucagaaagaauauauggagcgccagggcaagacaccucuggggcucgucgaccuguuuguuuucagcaccuccuuuuaccugaucucuaucuuccuucaccucgugaaaauuccgacacauagacacaucgugggaaagagcugccccaagccucaucggcugaaucacaugggcauuuguuccugcggccuguauaaacagcccggggucccugugcgcuggaagagaugaggacuagucccuguucccagagcccacuuuuuuuucuuuuuuugaaauaaaauagccugucuuucagaucucaaaggcucuuuucagagccaccaaaaaaaaaaaaaaaaaaaaaaaaaaaaaaaaaaaaaaaaaaaaaaaaaaaaaaaaaaaaaaaaagaauu

SEQ ID NO: 35486 - RNA, 1736 nt, Artificial Sequence
  mRNA product Design a-2 (hSL-A64-N5) comprising derived and/or modified sequence from LASV(G502-SLE-2009;Clade IV)__AIT17126__GPCmut9 (opt5)
aggagaguccgcucagccagguugcagaagcggcuuagcguguguccuaaucuucucucugcguguagguaggccugugccgcaaacaagcuuaccaugggccagaucgugaccuucuuucaagaggucccccacguuauugaagaggugaugaacaucgugcugauugcccucagcauccuggcuguccuuaaggggcuguacaauuucgccacaugcggacucgugggccugcuuacguuucugcuccugugugggagauccugcaccacaggacuguauaaaggcguuuacgaacuccagacccuggagcuuaacauggaaacacugaauaugaccaugccucucucuuguacaaagaacaauagccaucacuauauuaugguggggaacgagaccggacuggagcuuacgcugaccaauacauccaucaucaaccauaaauucugcaaucucucugacgcgcacaagaaaaaccuguacgaucaugcucugaugagcauuaucuccaccuuucaccucucuauuccgaauuucaaccaguaugaagccaugagcugugacuuuaauggcggcaagaucuccguccaguacaaccugagccacucuuaugccggggaugcugccgaccauugcggaacaguggcuaauggcguucuucaaaccuucaugcggauggccuggggaggguccuacauugcgcuggauagcggcugugggcgcugggacugcaucaugacgucuuaccaguaucucauuauccagaacacaaccugggaggaucacugucaguuuuccagacccagcccuaucggauaccugggccuucugucucaacggacacgcgacauuuauaucuccagacggcuccugggcaccuucaccuggacacugagcgauuccgaagggaaggacacgcccggaggcuacugccucacccgcuggaugcugauugaggccgagcuuaaauguuuugggaacacagcuguggccaagugcaaugaaaaacaugaugaggaguucugcgacaugcugagacucuuugauuucaacaagcaggcuauccagcggcugaaagccgaagcgcagaugucuauucaacuuaucaauaaggccgucaacgcucugaucaaugaccagcucgugaugaagaaccaucugcgcgacauuauguguaucccuuauugcaauuacagcagauauugguaccugaaccacaccacaaccggacggacgucccuccccaaauguuggcuggugagcaauggcucuuaccuuaacgaaacacacuucuccgaugacauugagcagcaagccgauaauaugaucaccgagaugcugcagaaggaauauauggagcgccaggggaaaaccccucucggacuggucgaccuguuuguuuucagcacaucuuuuuaccuuauuagcaucuuccuccaccuggugaagaucccgacccauagacacauugugggcaaauccugccccaagccucaucggcugaaccacaugggcaucuguucuugcgggcucuauaaacagcccggagucccugugaaguggaagcgcugaggacuagucccuguucccagagcccacuuuuuuuucuuuuuuugaaauaaaauagccugucuuucagaucucaaaggcucuuuucagagccaccaaaaaaaaaaaaaaaaaaaaaaaaaaaaaaaaaaaaaaaaaaaaaaaaaaaaaaaaaaaaaaaaagaauu

SEQ ID NO: 35487 - RNA, 1736 nt, Artificial Sequence
  mRNA product Design a-2 (hSL-A64-N5) comprising derived and/or modified sequence from LASV(G733-SLE-2010;Clade IV)__AIT17154__GPCmut9 (opt5)
aggagaguccgcucagccagguugcagaagcggcuuagcguguguccuaaucuucucucugcguguagguaggccugugccgcaaacaagcuuaccaugggccagaucgugaccuucuuucaagaggucccccacguuauugaagaggugaugaacaucgugcugauugcccucagcauccuggcuguccuuaaggggcuguacaauuucgccacaugcggaauugugggccucguuuccuuucugcuucugugugggagaucuugcacgaccagccucuauaaaggaguguacgaacugcagacacuggagcucaacauggaaacccugaauaugacaaugccucuuuccuguaccaagaacaauucucaucacuauaucauggucggcaacgagacagggcuggagcucacccugacgaauaccagcaucauuaaccauaaauucugcaaucuuuccgacgcgcacaagaaaaaccuguacgaucaugcucucaugucuaucauuagcacauuucaccuguccaucccgaauuucaaccaguaugaagccaugagcugugacuuuaauggaggcaagauuucugugcaguacaaccugucccacagcuaugccggcgaugcugccaaucauugcgggaccaucgcuaacggaguucuccaaacauucaugcggauggccuggggcgggucuuacauugcgcuggacuccggaugugaucgcugggacugcaucaugaccagcuaccaguaucuuaucauucagaacacgacaugggaggaucacugucaguuuucuagacccuccccuaucggcuaccuggggcuccugagccaacggacccgcgacauuuauaucuccagacggcuucugggaacauucaccuggacccucucugauagcgaaggcaaggacacacccggcggguacugccugacgcgcuggaugcugauugaggccgagcucaaauguuuuggaaauaccgcuguggccaagugcaacgaaaaacaugaugaggaguucugcgacaugcugagacuuuuugauuucaauaagcaggcuauccagcggcugaaagccgaagcgcagauguccauccaacucauuaacaaggccgucaaugcucugaucaacgaccagcuuauuaugaagaaucaucugcgcgacaucauguguauuccuuauugcaacuacagcaaauauugguaccucaaucacacaaccacaggcaagaccucucugcccaaauguuggcugguguccaacgggagcuaccucaaugaaacgcacuucucugaugacaucgagcagcaagccgauaacaugaucacagagaugcugcagaaggaauauauggagagacagggaaaaaccccucuuggccugguggaccucuuugucuucagcaccuccuuuuaccugauuucuaucuuccugcaccuuguuaagauuccgacacaucggcacgugguggggaaaagcugccccaagccucaucgccucaaucacaugggaaucuguuccugcggccuguauggccagcccggggucccugugaaguggaaaagaugaggacuagucccuguucccagagcccacuuuuuuuucuuuuuuugaaauaaaauagccugucuuucagaucucaaaggcucuuuucagagccaccaaaaaaaaaaaaaaaaaaaaaaaaaaaaaaaaaaaaaaaaaaaaaaaaaaaaaaaaaaaaaaaaagaauu

SEQ ID NO: 35488 - RNA, 1736 nt, Artificial Sequence
  mRNA product Design a-2 (hSL-A64-N5) comprising derived and/or modified sequence from MOPV/LASV reassortant(IGS-1;Clade IV)__AFY05576__GPCmut9 (opt5)
aggagaguccgcucagccagguugcagaagcggcuuagcguguguccuaaucuucucucugcguguagguaggccugugccgcaaacaagcuuaccaugggccagaucgugaccuucuuucaagaggucccccacguuauugaagaggugaugaacaucgugcugauugcccucagcguccuggcugugcuuaaggggcuguacaauuucgccacaugcggacucguuggccuggugacguuucuucugcucugugggagauccugcaccacaucucuguauaaaggagucuacgaacugcagacccucgagcugaacauggaaacacuuaauaugaccaugccucugagcuguacaaagaacaauucccaucacuauaucauggugggcaacgagaccgggcucgagcugacgcuuaccaauacaucuauuaucaaccauaaauucugcaaucugagcgacgcgcacaagaaaaaccucuacgaucaugcucugauguccaucauuucuaccuuucaccugagcaucccgaauuucaaccaguaugaagccauguccugugacuuuaauggaggcaagauuagcguucaguacaaccucucucacuccuaugccggcgaugcugccaaucauugcgggacaguggcuaacggaguccugcaaaccuucaugcggauggccuggggcgggagcuacaucgcgcuugacucuggauguggcaacugggauugcauuaugacguccuaccaguaucugaucauucagaauacaaccugggaggaccacugucaguuuagccgccccucuccuaucggguaccucggacugcuuucccaaagaacacgggauaucuauauuagccgcagacugcucggcaccuucaccuggacacuguccgacucugaaggcgaggauacgcccgggggauacugccugacccgguggaugcucaucgaggccgaacugaaguguuuuggcaacacagcuguggccaaaugcaaugagaagcaugacgaagaguucugcgauaugcuucgccuguuugacuucaacaaacaggcuauucagagacucaaggccgaagcgcagaugagcauccaacugauuaauaaagccgugaacgcucuuaucaaugaucagcugaucaugaagaaccaccuccgggacauuauguguaucccuuauugcaauuacuccaaguauugguaccugaaccacaccacaaccgggcgcacgagccugcccaaauguuggcucgucucuaauggauccuaccugaacgagacacauuucagcgacgauauugagcagcaagccgacaauaugaucaccgaaaugcuucagaaggaguauauggaaagacagggcaaaaccccucuggggcucguugaucuguuuguguucucuaccagcuuuuaccugauuuccaucuuccuucaccucgugaagaucccgacacaucggcacauugucggaaaaucuugccccaagccucaucgccugaaccacaugggcaucuguagcugcggccuguauaaacagcccggggugccuguuaaguggaagagaugaggacuagucccuguucccagagcccacuuuuuuuucuuuuuuugaaauaaaauagccugucuuucagaucucaaaggcucuuuucagagccaccaaaaaaaaaaaaaaaaaaaaaaaaaaaaaaaaaaaaaaaaaaaaaaaaaaaaaaaaaaaaaaaaagaauu

SEQ ID NO: 35489 - RNA, 1736 nt, Artificial Sequence
  mRNA product Design a-2 (hSL-A64-N5) comprising derived and/or modified sequence from LASV(LM765-SLE-2012;Clade IV)__AIT17814__GPCmut9 (opt5)
aggagaguccgcucagccagguugcagaagcggcuuagcguguguccuaaucuucucucugcguguagguaggccugugccgcaaacaagcuuaccaugggccagaucgugaccuucuuucaagaggucccccacguuauugaagaggugaugaacaucgugcugauugcccucagcauccuggcuguccuuaaggggcuguacaauuucgccacaugcggacucgugggccugguuacguuucuucugcucugugggagauccugcaccacaucucuguauaaaggaguguacgaacugcagacccucgagcugaacauggaaacacuuaauaugaccaugccucugagcuguacaaagaacaauucccaucacuauauuauggucggcaacgagaccgggcucgagcugacgcuuaccaauacaucuaucaucgaccauaaauucugcaaccugagcgaugcgcaccggaagaaucucuacgaccaugcucugauguccauuaucucuaccuuucaccugagcauuccgaacuucaaucaguaugaagccauguccugugauuuuaacggaggcaaaaucagcgugcaguacaaucucucucacuccuaugccaaggacgcugccgaucauugcggcacaguugcuaacggggugcugcaaaccuucaugcgcauggccuggggaggcagcuacauugcgcuugacucuggguguggaagaugggauugcaucaugacguccuaccaguaucugauuauccagaauacaaccugggaggaccacugucaguuuagccggcccucuccuaucggcuaccucgggcugcuuucccaacgcacaagagauauuuauaucagccggcgccugcucggaaccuucaccuggacacuguccgacucugaaggcaaggauacgcccggcggguacugccugaccagauggaugcucauugaggccgagcugaaauguuuuggaaacacagcugucgccaagugcaacgaaaaacaugacgaggaguucugcgauaugcuucggcuguuugacuucaauaagcaggcuauccagcgccucaaagccgaagcgcagaugagcauucaacugaucaacaaggccgugaaugcucuuaucaacgaccagcugauuaugaagaaucaccucagagauaucauguguauuccuuauugcaacuacuccaaauauugguaccugaaucacaccacaaccggcaagacgagccugcccaaauguuggcucgugucuaacggguccuaccugaaugaaacacauuucagcgacgauaucgagcagcaagccgacaacaugauuaccgagaugcuucagaaggaauauauggagcggcagggaaaaaccccucugggccucgucgaucuguuuguuuucucuaccagcuuuuaccugaucuccaucuuccuucaccucgugaagauuccgacacaucgccacaucguggggaaacccugcccuaagccccauagacugaaucacaugggaauuuguucuugcggccuguauaagcagccuggcguccccgugaaauggaagcggugaggacuagucccuguucccagagcccacuuuuuuuucuuuuuuugaaauaaaauagccugucuuucagaucucaaaggcucuuuucagagccaccaaaaaaaaaaaaaaaaaaaaaaaaaaaaaaaaaaaaaaaaaaaaaaaaaaaaaaaaaaaaaaaaagaauu

SEQ ID NO: 35490 - RNA, 1736 nt, Artificial Sequence
  mRNA product Design a-2 (hSL-A64-N5) comprising derived and/or modified sequence from LASV(LM776-SLE-2012;Clade IV)__AIT17824__GPCmut9 (opt5)
aggagaguccgcucagccagguugcagaagcggcuuagcguguguccuaaucuucucucugcguguagguaggccugugccgcaaacaagcuuaccaugggccagaucgugaccuucuuucaagaggucccccacguuauugaagaggugaugaacaucgugcugauugcccucagcauccuggcuguccuuaaggggcuguacaauuucgccacaugcggacucgugggccugguuacguuucuucugcucugugggagauccugcaccacaucuguguauaaaggagucuacgaacugcagacccuggagcucaacauggaaacacugaauaugaccaugccucuuagcuguacaaagaacaauucccaucacuauauuauggugggcaacgagaccgggcuggagcucacgcugaccaauacaucuaucaucaaccauaaauucugcaaucuuagcgacgcgcacaagaaaaaccuguacgaucaugcucucauguccauuaucucuaccuuucaccugagcauuccgaauuucaaccaguaugaagccauguccugugacuuuaauggaggcaagaucagcguucaguacaaccugucucacuccuaugccggcgaugcugccaaucauugcgggacaguggcuaacggaguccuccaaaccuucaugcggauggccuggggcgggagcuacauugcgcuggacucuggauguggcaagugggauugcaucaugacguccuaccaguaucuuauuauccagaacacaaccugggaggaccacugucaguuuagccgccccucuccuaucggguaccugggacuccugucccaaagaacacgggauauuuauaucagccgcagacuucugggcaccuucaccuggacacucuccgacucugaaggcaaagauacgcccgggggauacugccugacccgguggaugcugauugaggccgagcucaaguguuuuggcaauacagcuguggccaaaugcaacgaaaagcaugacgaggaguucugcgauaugcugcgccuuuuugacuucaauaaacaggcuauccagagacugaaggccgaagcgcagaugagcauucaacucaucaacaaggccgugaaugcucugaucaacgaucagcuuauuaugaaaaaucaucugcgggacaucauguguauuccuuauugcaacuacuccaaguauugguaccucaaucacaccacaaccgggaaaacgagccugcccaaguguuggcuggucucuaacggauccuaccucaaugaaacacacuucagcgacgauaucgagcagcaagccgacaacaugauuaccgagaugcugcagaaagaauauauggagcgccagggcaagaccccucuugggcugguugaucucuuuguguucucuaccagcuuuuaccugaucuccaucuuccugcaccuugugaaaauuccgacacauagacacaucgucggaaagucuugccccaagccucaucggcucaaucacaugggcauuuguagcugcggccuguauaaacagcccggggugccuguucgcuggaagagaugaggacuagucccuguucccagagcccacuuuuuuuucuuuuuuugaaauaaaauagccugucuuucagaucucaaaggcucuuuucagagccaccaaaaaaaaaaaaaaaaaaaaaaaaaaaaaaaaaaaaaaaaaaaaaaaaaaaaaaaaaaaaaaaaagaauu

SEQ ID NO: 35491 - RNA, 1736 nt, Artificial Sequence
  mRNA product Design a-2 (hSL-A64-N5) comprising derived and/or modified sequence from LASV(Mad39;Clade IV)__ANH09722__GPCmut9 (opt5)
aggagaguccgcucagccagguugcagaagcggcuuagcguguguccuaaucuucucucugcguguagguaggccugugccgcaaacaagcuuaccaugggccagaucgugaccuucuuucaagaggucccccacguuauugaagaggugaugaacaucgugcugauugcccucagcauccuggcuguccuuaaggggcuguacaauguggccacaugcggacucauuggccugguuacguuccuucugcucugugggagauccugcaccacaacccuguauaaaggaguguacgaacugcaggcgcucgagcugaacauggaaacacuuaauaugaccaugccucugucuuguacaaagaacaauagccaucacuauauccgggucggcaacgagaccgggcucgagcugacgcuuaccaauacaucccugaucaaccauaaauuuugcaaucucucugacgcucacaagaaaaaccuguacgaucaugcccugaugagcauuaucuccaccuuccaccucucuauuccgaauuuuaaccaguaugaagccaugagcugugacuucaaugauggaaagaucuccgugcaguacaaccugagccacacauaugcuggcgacaccgccaaucauugcggcacgguugcuaacggggugcuucaaacauuuaugcgcauggccuggggaggcucuuacauugcgcuggauuccggguguggaggcugggacugcaucaugaccagcuaccaguaucucauuauccagaacacaaccugggaggaucacugucaguucucuagacccuccccuaucggguaccugggacuucugagccaacggacccgcgacauuuauaucucuagacggcuccugggcacauuuacguggacccuguccgauagcgaaggcaaggacacacccgggggauacugccucacccgcuggaugcugauugaggccgagcuuaaauguuucggcaauacagcugucgccaagugcaacgaaaaacaugaugaggaauuuugcgacaugcugagacucuucgauuuuaauaagcaggcuauccagcggcugaaagccgaggcgcagauguccauucaacuuaucaacaaggccgugaaugcucugaucaacgaccagcucauuaugaagaaucaucugcgcgacaucauguguauuccuuauugcaacuacucuaaauauugguaccugaaucacaccgugacggggaagacaagccuccccaaauguuggcuggucuccaacggaagcuaccuuaaugaaacccacuucucugaugacaucgagcagcaagccgauaacaugauuaccgagaugcugcagaaggaauauauggagagacagggcaaaacaccucucgggcugguugaccuguucguguuuuccaccagcuucuaccuuaucucuaucuuucuccaccuggugaagauuccgacacaucggcacgucgugggaaaacccugcccuaagccccaucgccugaaucacaugggcaucuguagcugcggcuucuauaagcagccugggguucccgugagauggaaacggugaggacuagucccuguucccagagcccacuuuuuuuucuuuuuuugaaauaaaauagccugucuuucagaucucaaaggcucuuuucagagccaccaaaaaaaaaaaaaaaaaaaaaaaaaaaaaaaaaaaaaaaaaaaaaaaaaaaaaaaaaaaaaaaaagaauu

SEQ ID NO: 35492 - RNA, 1736 nt, Artificial Sequence
  mRNA product Design a-2 (hSL-A64-N5) comprising derived and/or modified sequence from LASV(Z0947-SLE-2011;Clade IV)__AIT17840__GPCmut9 (opt5)
aggagaguccgcucagccagguugcagaagcggcuuagcguguguccuaaucuucucucugcguguagguaggccugugccgcaaacaagcuuaccaugggccagaucgugaccuucuuucaagaggucccccacguuauugaagaggugaugaacaucgugcugauugcccucagcauccuggcuguccuuaaggggcuguacaauuucgccacaugcggacucgugggccugguuacguuucuucugcucugugggagauccugcaccauuucucuguauaaaggaguguacgaacugcagacacucgagcugaacauggaaacccuuaauaugacaaugccucugagcuguaccaagaacaauucccaucacuauaucauggucggcaacgagacagggcucgagcugacccuuacgaauaccucuaucauuaaccauaaauucugcaaucugagcgacgcgcacaagaaaaaccucuacgaucaugcucugauguccaucauuucuacauuucaccugagcaucccgaauuucaaccaguaugaagccauguccugugacuuuaauggaggcaagauuagcgugcaguacaaccucucucacuccuaugccggcgaugcugccaaucauugcgggaccguugcuaacggagugcugcaaacauucaugcggauggccuggggcgggagcuacaucgcgcuugacucuggaugugaucgcugggacugcauuaugaccuccuaccaguaucugaucauccagaacacgacaugggaggaucacugucaguuuagcagacccucuccuauuggcuaccucgggcugcuuucccaacggacccgcgacaucuauauuagcagacggcugcucggaacauucaccuggacccuguccgauucugaaggcaaggacacacccggcggguacugccugacgcgcuggaugcucaucgaggccgagcugaaauguuuuggaaauaccgcugucgccaagugcaacgaaaaacaugaugaggaguucugcgacaugcuuagacuguuugauuucaauaagcaggcuauucagcggcucaaagccgaagcgcagaugagcauccaacugaucaacaaggccgugaaugcucuuauuaacgaccagcugaucaugaagaaucaccuccgcgacauuauguguaucccuuauugcaacuacuccaaauauugguaccugaaucacacaaccacaggcaagaccagccugcccaaauguuggcucgugucuaacggguccuaccugaaugaaacgcauuucagcgaugacauugagcagcaagccgauaacaugaucacagagaugcuucagaaggaauauauggagagacagggaaaaaccccucugggccucgucgaccuguuuguuuucucuaccagcuuuuaccugaucuccauuuuccuucaccucgugaagaucccgacacaucggcacauuguggggaaacccugcccuaagccccaucgccugaaucacaugggaaucuguucuugcggccuguauaagcagccuggcguccccgugaaauggaagagaugaggacuagucccuguucccagagcccacuuuuuuuucuuuuuuugaaauaaaauagccugucuuucagaucucaaaggcucuuuucagagccaccaaaaaaaaaaaaaaaaaaaaaaaaaaaaaaaaaaaaaaaaaaaaaaaaaaaaaaaaaaaaaaaaagaauu

SEQ ID NO: 35493 - RNA, 1767 nt, Artificial Sequence
  mRNA product Design a-2 (hSL-A100) comprising derived and/or modified sequence from LASV(Josiah;Clade IV)__NP_694870__GPCmut9 (opt1)
aggagaguccgcucagccagguugcagaagcggcuuagcguguguccuaaucuucucucugcguguagguaggccugugccgcaaacaagcuuaccaugggccagaucgugaccuucuuccaggaggucccccacgugaucgaggaggugaugaacaucguccugaucgcccucagcgugcuggccgugcugaaggggcucuacaacuucgcgaccugcggccuggucgggcuggugacguuccuccugcugugcggccgcuccugcaccaccagccucuacaaggggguguacgagcugcagacccuggagcucaacauggagacgcugaacaugaccaugccgcuguccugcaccaagaacaacagccaccacuacaucauggucggcaacgagaccggccucgagcugacgcugaccaacaccuccaucaucaaccacaaguucugcaaccucagcgacgcccacaagaagaaccuguacgaccacgcccugauguccaucaucagcaccuuccaccucuccauccccaacuucaaccaguacgaggccaugagcugcgacuucaacgggggcaagaucuccgugcaguacaaccugagccacuccuacgccggggacgcggccaaccacugcggcacgguggccaacgggguccugcagaccuucaugcggauggccuggggcggcagcuacaucgcgcucgacuccgggugcggcaacugggacugcaucaugaccagcuaccaguaccugaucauccagaacaccacgugggaggaccacugccaguucucccggcccagccccaucggguaccugggccuccugucccagcgcacccgggacaucuacaucagccgccggcugcucggcaccuucaccuggacgcugagcgacuccgaggggaaggacaccccgggcggguacugccugacccgcuggaugcucaucgaggccgagcugaagugcuucggcaacaccgccguggccaagugcaacgagaagcacgacgaggaguucugcgacaugcugcggcuguucgacuucaacaagcaggccauccagcgccugaaggcggaggcccagaugagcauccagcugaucaacaaggccgugaacgcccucaucaacgaccagcugaucaugaagaaccaccuccgggacaucaugugcauccccuacugcaacuacuccaaguacugguaccucaaccacacgaccaccggccgcaccagccugcccaagugcuggcuggucuccaacggcagcuaccucaacgagacgcacuucuccgacgacaucgagcagcaggccgacaacaugaucaccgagaugcugcagaaggaguacauggagcggcaggggaagacgccccugggccucguggaccuguucguguucagcaccuccuucuaccugaucagcaucuuccugcaccucgucaagaucccgacccaccgccacaucguggggaaguccugccccaagccccaccggcugaaccacaugggcaucugcagcugcgggcuguacaagcagcccggcgugccggucaaguggaagcgcugaggacuagucccuguucccagagcccacuuuuuuuucuuuuuuugaaauaaaauagccugucuuucagaucucaaaggcucuuuucagagccaccaaaaaaaaaaaaaaaaaaaaaaaaaaaaaaaaaaaaaaaaaaaaaaaaaaaaaaaaaaaaaaaaaaaaaaaaaaaaaaaaaaaaaaaaaaaaaaaaaaaaa

SEQ ID NO: 35494 - RNA, 1764 nt, Artificial Sequence
  mRNA product Design a-2 (hSL-A100) comprising derived and/or modified sequence from LASV(LP;Clade I)__AAF86701__GPCmut9 (opt1)
aggagaguccgcucagccagguugcagaagcggcuuagcguguguccuaaucuucucucugcguguagguaggccugugccgcaaacaagcuuaccaugggccagaucaucaccuucuuccaggaggugccccacgucaucgaggaggugaugaacaucgugcugaucgcccucagccugcuggccauccucaaggggcuguacaacaucgcgaccugcggcaucaucgggcuggucgccuuccucuuccugugcggcaaguccugcagccugacgcucaagggcggguacgagcugcagacccuggagcucaacauggagacccugaacaugaccaugccgcuguccugcacgaagaacagcucccaccacuacauccgcgugggcaacgagaccgggcucgagcugacccugaccaacacgagcaucaucaaccacaaguucugcaaccucuccgacgcccacaagaagaaccuguacgaccacgcccugaugagcaucaucuccaccuuccaccucagcauccccaacuucaaccaguacgaggccauguccugcgacuucaacggcgggaagaucagcgugcaguacaaccugucccacagcuacgcgggcgacgccgccgagcacugcgggaccgucgccaacggcgugcugcagaccuucaugcggauggcguggggcgggcgcuacaucgcccucgacuccggcugcgggaacugggacugcaucaugacgagcuaccaguaccugaucauccagaacaccaccugggaggaccacugccaguucucccggcccagccccaucggcuaccugggccuccugucccagcgcacccgggacaucuacaucagccgccggcugcucgggacguucaccuggacccugagcgacuccgagggcaacgagacccccgggggcuacugccugacgcgcuggaugcucaucgaggccgagcugaagugcuucgggaacaccgccguggccaagugcaacgagaagcacgacgaggaguucugcgacaugcugcggcuguucgacuucaacaagcaggcgauccgccggcugaaggccgaggcccagaugagcauccagcugaucaacaaggccgucaacgcccucaucaacgaccagcugaucaugaagaaccaccuccgcgacaucaugugcauccccuacugcaacuacuccaaguacugguaccucaaccacaccagcuccggccggaccagccugcccaagugcuggcugaucuccaacgggagcuaccucaacgagacgcaguucuccgacgacaucgagcagcaggcggacaacaugaucaccgagaugcugcagaaggaguacaucgagcgccagggcaagaccccgcuggggcucguggacaucuucaucuucagcaccuccuucuaccugaucagcaucuuccugcaccugaucaagaucccgacgcaccggcacaucgugggcaagcccugccccaagccccaccgccucaaccacaugggggucugcuccugcggccuguacaagcacccgggcgugcccaccaaguggaagcggugaggacuagucccuguucccagagcccacuuuuuuuucuuuuuuugaaauaaaauagccugucuuucagaucucaaaggcucuuuucagagccaccaaaaaaaaaaaaaaaaaaaaaaaaaaaaaaaaaaaaaaaaaaaaaaaaaaaaaaaaaaaaaaaaaaaaaaaaaaaaaaaaaaaaaaaaaaaaaaaaaaaaa

SEQ ID NO: 35495 - RNA, 1764 nt, Artificial Sequence
  mRNA product Design a-2 (hSL-A100) comprising derived and/or modified sequence from LASV(803213;Clade II)__AAF86703__GPCmut9 (opt1)
aggagaguccgcucagccagguugcagaagcggcuuagcguguguccuaaucuucucucugcguguagguaggccugugccgcaaacaagcuuaccaugggccagaucaucaccuucuuccaggaggugccccacgucaucgaggaggugaugaacaucgugcugaucgcccucagccugcuggccauccucaaggggaucuacaacgucgcgaccugcggccuguucgggcugaucuccuuccuccugcugugcggccgcagcugcuccgugacguacaaggggguguacgagcuccagacccuggagcugaacauggccaaccucaacaugaccaugccgcugagcugcaccaagaacaacucccaccacuacaucauggucggcaacgagacgggccuggagcucacccugaccaacaccagcaucaucaaccacaaguucugcaaccuguccgacgcccacaagaagaaccucuacgaccacgcccugaugagcaucaucuccacguuccaccugagcauccccaacuucaaccaguacgaggccauguccugcgacuucaacgggggcaagaucagcgugcaguacaaccucucccacagcuucgcgguggacgccgccaaccacugcgggaccaucgccaacggcguccugcagaccuucaugcggauggcguggggcggguccuacaucgcccuggacagcggcugcgggaacugggacugcaucaugaccuccuaccaguaccucaucauccagaacacgaccugggaggaccacugccaguucagccgccccucccccaucggcuaccuggggcugcucagccagcggacccgcgacaucuacaucagccggcgccugcugggcaccuucacguggacccucuccgacagcgagggcaacgaggcccccgggggcuacugccugacccgguggaugcugaucgaggccgagcucaagugcuucgggaacaccgccguggcgaagugcaacgagaagcacgacgaggaguucugcgacaugcugcgccuguucgacuucaacaagcaggccaucaagcggcucaagacggaggcccagauguccauccagcugaucaacaaggccgugaacgcccugaucaacgaccagcucaucaugaagaaccaccuccgcgacaucaugugcauccccuacugcaacuacagccgguacugguaccugaaccacaccgucaccgggaagaccucccugccccgcugcuggcuggugagcaacggcuccuaccugaacgagacgcacuucagcgacgacaucgagcagcaggcggacaacaugaucaccgagaugcuccagaaggaguacauggaccggcagggcaagaccccgcuggggcugguggaccucuucgucuucuccaccagcuucuaccugaucuccaucuuccugcaccuggugaagaucccgacgcaccgccacaucgugggcaagcccugccccaagccccaccggcucaaccacauggggaucugcagcugcggccuguacaagcacccggggguccccgugaaguggaagcgcugaggacuagucccuguucccagagcccacuuuuuuuucuuuuuuugaaauaaaauagccugucuuucagaucucaaaggcucuuuucagagccaccaaaaaaaaaaaaaaaaaaaaaaaaaaaaaaaaaaaaaaaaaaaaaaaaaaaaaaaaaaaaaaaaaaaaaaaaaaaaaaaaaaaaaaaaaaaaaaaaaaaaa

SEQ ID NO: 35496 - RNA, 1764 nt, Artificial Sequence
  mRNA product Design a-2 (hSL-A100) comprising derived and/or modified sequence from LASV(GA391;Clade III)__CAA36645__GPCmut9 (opt1)
aggagaguccgcucagccagguugcagaagcggcuuagcguguguccuaaucuucucucugcguguagguaggccugugccgcaaacaagcuuaccaugggccagaucgugaccuucuuccaggaggucccccacgugaucgaggaggugaugaacaucguccugaucgcccucagcauccuggccauccugaaggggcucuacaacguggcgaccugcggccugaucgggcuggugacguuccuccugcuguccggccgcagcugcucccucaucuacaaggggaccuacgagcugcagacccuggagcucaacauggagacccugaacaugacgaugccgcugagcugcaccaagaacaacucccaccacuacauccgggucggcaacgagaccggccucgagcugacccugacgaacaccagcauccucaaccacaaguucugcaaccuguccgacgcccacaagcgcaaccuguacgaccacagccucauguccaucaucagcaccuuccaccuguccauccccaacuucaaccaguacgaggccaugagcugcgacuucaacgggggcaagaucaccgugcaguacaaccugucccacagcuucgccguggacgccgcggggcacugcggcacgcucgccaacgggguccugcagaccuucaugcggauggccuggggcggcuccuacaucgcccuggacagcgggugcggcaacugggacugcaucaugaccuccuaccaguaccucaucauccagaacaccacgugggacgaccacugccaguucagccggcccucccccaucggguaccugggccugcucagccagcgcacccgggacaucuacaucagccgccggcugcugggcaccuucaccuggacgcucuccgacagcgaggggaacgagaccccgggcggguacugccugacccgcuggaugcugaucgaggcggagcucaagugcuucggcaacaccgccguggccaagugcaacgagaagcacgacgaggaguucugcgacaugcugcggcuguucgacuucaacaagcaggccauccgccggcucaagacggaggcccagauguccauccagcugaucaacaaggcggugaacgcccugaucaacgaccagcucaucaugaagaaccaccuccgcgacaucaugugcauccccuacugcaacuacagccgguacugguaccugaaccacaccuccaccggcaagaccagccugccccgcugcuggcugaucuccaacggcagcuaccugaacgagacgaaguucuccgacgacaucgagcagcaggccgacaacaugaucaccgagaugcuccagaaggaguacaucgaccggcaggggaagacgccccugggccuggucgaccuguucguguucagcaccuccuucuaccucaucagcaucuuccugcaccuggugaagaucccgacccaccgccacaucgucgggaagcccugccccaagccccaccggcucaaccacaugggcaucugcuccugcgggcuguacaagcagccgggcgugcccgugcgcuggaagcggugaggacuagucccuguucccagagcccacuuuuuuuucuuuuuuugaaauaaaauagccugucuuucagaucucaaaggcucuuuucagagccaccaaaaaaaaaaaaaaaaaaaaaaaaaaaaaaaaaaaaaaaaaaaaaaaaaaaaaaaaaaaaaaaaaaaaaaaaaaaaaaaaaaaaaaaaaaaaaaaaaaaaa

SEQ ID NO: 35497 - RNA, 1767 nt, Artificial Sequence
  mRNA product Design a-2 (hSL-A100) comprising derived and/or modified sequence from LASV(AV;Clade V)__CCA30314__GPCmut9 (opt1)
aggagaguccgcucagccagguugcagaagcggcuuagcguguguccuaaucuucucucugcguguagguaggccugugccgcaaacaagcuuaccaugggccagaucgugaccuucuuccaggaggucccccacgugaucgaggaggugaugaacaucguccugaucgcccucagcauccuggccgugcugaaggggcucuacaacaucgcgaccugcggccugaucgggcugaucacguuccuccugcugugcggccgcuccugcagcuccaaccucuacaaggggguguacgagcugcagagccuggaccucaacauggagacccugaacaugaccaugccgcuguccugcaccaagaacaacagccaccacuacauccgggucggcaacgacacgggccucgagcugacccugaccaacaccuccauccucaaccacaaguucugcaaccugagcgacgcccacaagaaggaccuguacgaccacgcccucauguccaucaucagcacguuccaccuguccauccccaacuucaaccaguacgaggccaugagcugcgacuucaacgggggcaagaucuccgugcaguacaaccugagccacuccuacgccaucgacgcggccaaccacugcgggaccguggccaacggcauccuccagaccuucaugcgcauggccuggggcgggagcuacaucgcgcuggacuccggcugcgggaacugggacugcaucaugaccagcuaccaguaccugaucauccagaacacgaccugggagaaccacugccaguucucccgccccagccccaucggcuaccucgggcugcugagccagcggacccgcgacaucuacaucucccggcgccuccugggcaccuucacguggacccugagcgacuccgagggcaacgccacccccgggggcuacugccucacccgguggaugcugaucgaggccgagcugaagugcuucgggaacacggccgucgccaagugcaacgagaagcacgacgaggaguucugcgacaugcuccgccuguucgacuucaacaagcaggcgaucagccggcugaaguccgaggcccagaugagcauccagcucaucaacaaggccgugaacgcccugaucaacgaccagcugaucaugaagaaccaccuccgcgacaucaugugcauccccuacugcaacuacuccaaguacugguaccugaaccacaccaucaccgggaagaccagccugcccaagugcuggcucguguccaacggcagcuaccugaacgagacgcacuucuccgacgacaucgagcagcaggccgacaacaugaucaccgagaugcugcagaaggaguacauggagcggcagggcaagaccccgcucgggcuggucgaccuguucguguucagcaccuccuucuaccugaucagcaucuuccuccgccuggugaagaucccgacgcaccggcacaucgucggcaagcccugccccaagccccaccgccugaaccacauggggaucugcuccugcggccucuacaagcagccgggggugcccgugcgguggaagcgcugaggacuagucccuguucccagagcccacuuuuuuuucuuuuuuugaaauaaaauagccugucuuucagaucucaaaggcucuuuucagagccaccaaaaaaaaaaaaaaaaaaaaaaaaaaaaaaaaaaaaaaaaaaaaaaaaaaaaaaaaaaaaaaaaaaaaaaaaaaaaaaaaaaaaaaaaaaaaaaaaaaaaa

SEQ ID NO: 35498 - RNA, 1764 nt, Artificial Sequence
  mRNA product Design a-2 (hSL-A100) comprising derived and/or modified sequence from LASV(Togo/2016/7082;Clade VI)__AMR44577__GPCmut9 (opt1)
aggagaguccgcucagccagguugcagaagcggcuuagcguguguccuaaucuucucucugcguguagguaggccugugccgcaaacaagcuuaccaugggccagaucaucaccuucuuccaggaggugccccacgucaucgaggaggugaugaacaucgugcugaucgcccucagccugcuggccauccucaagggggucuacaacguggcgaccugcggcaucaucgggcuggugacguuccuguuccucugcggccgcuccugcagccugaucuacaagggguccuacgagcugcagacccucgagcugaacauggagacccugaacaugaccaugccgcucagcugcacgaagaacuccagccaccacuacauccgggucggcaacgagaccggccuggagcugacccucaccaacacguccaucaucaaccacaaguucugcaaccugagcgacgcccacaagcgcaaccuguacgaccacgcccucauguccauccugagcaccuuccaccuguccauccccaacuucaaccaguacgaggccaugagcugcgacuucaacgggggcaagaucuccgugcaguacaaccucagccacgccuacgcgguggacgccgccgagcacugcgggaccgucgccaacggcgugcugcagaccuucaugcggauggcguggggcggguccuacaucgcccuggacagcggcugcgggaacugggacugcaucaugacguccuaccaguaccucaucauccagaacaccaccugggaggaccacugccaguucagccggcccucccccaucggcuaccuggggcugcucagccagcgcacccgggacaucuacaucagccgccggcugcugggcacguucaccuggacccucuccgacagcgagggcaacgagacccccgggggcuacugccugacgcgcuggaugcugaucgaggccgagcucaagugcuucgggaacaccgccguggccaagugcaacgagaagcacgacgaggaguucugcgacaugcugcggcuguucgacuucaacaagcaggcgauccagcgccucaaguccgaggcccagaugagcauccagcugaucaacaaggccgucaacgcccugaucaacgaccagcucaucaugaagaaccaccuccgggacaugaugugcauccccuacugcaacuacuccaaguacugguaccugaaccacaccagcuccgggcgcaccagccugcccaagugcuggcugguguccaacggcagcuaccugaacgagacgcacuucuccgacgacaucgagcagcaggccgacaacaugaucaccgagaugcuccagaaggaguacaucgaccggcagggcaagaccccgcuggggcugguggaccucuucgucuucagcaccuccuucuaccugaucagcaucuuccugcaccugaucaagaucccgacgcaccgccacaucgugggcaagcccugccccaagccccaccggcucaaccacauggggaucugcuccugcggccuguacaagcagccgggggugcccacccgcuggaagcggugaggacuagucccuguucccagagcccacuuuuuuuucuuuuuuugaaauaaaauagccugucuuucagaucucaaaggcucuuuucagagccaccaaaaaaaaaaaaaaaaaaaaaaaaaaaaaaaaaaaaaaaaaaaaaaaaaaaaaaaaaaaaaaaaaaaaaaaaaaaaaaaaaaaaaaaaaaaaaaaaaaaaa

SEQ ID NO: 35499 - RNA, 1764 nt, Artificial Sequence
  mRNA product Design a-2 (hSL-A100) comprising derived and/or modified sequence from LASV(KAK-428;Clade n.d. (VII))__ANH09740__GPCmut9 (opt1)
aggagaguccgcucagccagguugcagaagcggcuuagcguguguccuaaucuucucucugcguguagguaggccugugccgcaaacaagcuuaccaugggccagaucgugaccuucuuccaggaggucccccacgugaucgaggaggugaugaacaucguccugaucgcccucagccugcuggccauccucaaggggcuguacaacuucgcgaccugcggcgugaucgggcugaucacguuccuccugcugugcggccgcuccugcagcgccaccuacaaggggcaguacgagcuccagacccuggagcugaacauggagucccucaacaugaccaugccgcugagcugcacgaagaacaacucccaccacuacauccgggccggcaacaacaccggccuggagcucacccugaccaacacgagcaucaucucccacaaguucugcaaccugagcgacgcccacaagaagaaccucuacgaccacacccugauguccaucaucaccaccuuccaccugagcauccccaacuucaaccaguacgaggccauguccugcgacuucaacgggggcaagaucagcauccaguacaaccucucccacagcuacgcgggggacgccgcccagcacugcggcacgguggccaacgggguccugcagaccuucaugcgcauggcguggggcggcuccuaccuggcccucgacagcgggugccgcggcugggacugcaucaucuccagcuaccaguaccugaucauccagaacaccaccugggacgaccacugccaguucucccggcccagccccaucggguaccugggcuucgugagccagaagacgcgcgacaucuacaucucccggcgccuccugggcaccuucaccuggacccugagcgacuccgaggggcacgacaugccgggcggguacugccucacgcgguggaugcugaucgaggccgaccugaagugcuucggcaacaccgccguggccaagugcaacgagaagcacgacgaggaguucugcgacauguggcgccucuucgacuucaacaagcaggcgauccagcggcugaaggccgaggcccagaugaacauccagcugaucaacaaggccgucaacgcccucaucaacgaccagcugaugaugaagaaccaccuccgcgacaucaugugcauccccuacugcaacuacagcaaguucugguaccugaacaacaccaccacgggccggaccucccugccccgcugcuggcugaucagcaacggcuccuaccucaacgagacccacuucagcgacgacaucgagcagcaggcggacaacaugaucaccgagaugcugcagaaggaguacauggaccggcaggggaagacgccccugggccucguggaccuguucguguucuccaccagcuucuaccugaucaccaucuuccuccaccuggucaagaucccgacccaccgccacaucguggggaagcccugccccaagccccaccggcugaaccacaugggcaucugcuccugcgggcuguacaagcagccgggcgugcccguccgcuggaagcggugaggacuagucccuguucccagagcccacuuuuuuuucuuuuuuugaaauaaaauagccugucuuucagaucucaaaggcucuuuucagagccaccaaaaaaaaaaaaaaaaaaaaaaaaaaaaaaaaaaaaaaaaaaaaaaaaaaaaaaaaaaaaaaaaaaaaaaaaaaaaaaaaaaaaaaaaaaaaaaaaaaaaa

SEQ ID NO: 35500 - RNA, 1764 nt, Artificial Sequence; identical to SEQ ID NO: 35494
  mRNA product Design a-2 (hSL-A100) comprising derived and/or modified sequence from LASV(Pinneo-NIG-1969;Clade I)__AIT17836__GPCmut9 (opt1)

SEQ ID NO: 35501 - RNA, 1764 nt, Artificial Sequence
  mRNA product Design a-2 (hSL-A100) comprising derived and/or modified sequence from LASV(ISTH0009-NIG-2011;Clade II)__AIT17404__GPCmut9 (opt1)
aggagaguccgcucagccagguugcagaagcggcuuagcguguguccuaaucuucucucugcguguagguaggccugugccgcaaacaagcuuaccaugggccagaucaucaccuucuuccaggaggugccccacgucaucgaggaggugaugaacaucgugcugaucgcccucagccugcuggccauccucaaggggaucuacaacgucgcgaccugcggccuguucgggcugguguccuuccuccugcugugcggccgcagcugcuccacgaccuacaaggggguguacgagcuccagacccuggagcuggacauggccagccucaacaugaccaugccgcuguccugcacgaagaacaacagccaccacuacaucauggucggcaacgagaccggccuggagcucacccugaccaacacguccaucaucaaccacaaguucugcaaccugagcgacgcccacaagaagaaccucuacgaccacgcccugauguccaucaucagcaccuuccaccuguccauccccaacuucaaccaguacgaggccaugagcugcgacuucaacgggggcaagaucuccgugcaguacaaccucagccacgcguacgccguggacgccgccaaccacugcgggaccaucgcgaacggcguccugcagaccuucaugcggauggccuggggcggguccuacaucgcccuggacagcggcugcggguccugggacugcaucaugacgagcuaccaguaccucaucauccagaacaccaccugggaggaccacugccaguucucccgccccagccccaucggcuaccuggggcugcucagccagcggacccgcgacaucuacaucucccggcgccugcugggcacguucaccuggacccucagcgacuccgagggcaacgagacccccgggggcuacugccugacgcgguggaugcugaucgaggccgagcucaagugcuucgggaacaccgccguggcgaagugcaacgagaagcacgacgaggaguucugcgacaugcugcgccuguucgacuucaacaagcaggccauccggcgccucaagaccgaggcccagaugagcauccagcugaucaacaaggccgugaacgcccugaucaacgaccagcucaucaugaagaaccaccuccgggacaucaugugcaucccguacugcaacuacuccaaguacugguaccugaaccacaccgucacggggaagaccagccugccccgcugcuggcugguguccaacggcagcuaccugaacgagacccacuucuccgacgacaucgagcagcaggcggacaacaugaucaccgagcuccugcagaaggaguacauggaccggcagggcaagacgccccuggggcucguggaccuguucgucuucagcaccuccuucuaccugaucagcaucuuccugcaccucaucaagaucccgacccaccgccacaucaccggcaagcccugccccaagccccaccggcugaaccacauggggaucugcuccugcggccuguacaagcacccgggggugcccgugaaguggaagcgcugaggacuagucccuguucccagagcccacuuuuuuuucuuuuuuugaaauaaaauagccugucuuucagaucucaaaggcucuuuucagagccaccaaaaaaaaaaaaaaaaaaaaaaaaaaaaaaaaaaaaaaaaaaaaaaaaaaaaaaaaaaaaaaaaaaaaaaaaaaaaaaaaaaaaaaaaaaaaaaaaaaaaa

SEQ ID NO: 35502 - RNA, 1764 nt, Artificial Sequence
  mRNA product Design a-2 (hSL-A100) comprising derived and/or modified sequence from LASV(ISTH2010-NIG-2012;Clade II)__AIT17482__GPCmut9 (opt1)
aggagaguccgcucagccagguugcagaagcggcuuagcguguguccuaaucuucucucugcguguagguaggccugugccgcaaacaagcuuaccaugggccagaucaucaccuucuuccaggaggugccccacgucaucgaggaggugaugaacaucgugcugaucgcccucagccugcuggccauccucaaggggaucuacaacgucgcgaccugcggccuguucgggcugguguccuuccuccugcugugcggccgcagcugcuccacgaccuacaaggggguguacgagcuccagacccuggagcuggacauggccagccucaacaugaccaugccgcuguccugcacgaagaacaacagccaccacuacaucauggucggcaacgagaccggccuggagcucacccugaccaacacguccaucaucaaccacaaguucugcaaccugagcgacgcccacaagaagaaccucuacgaccacgcccugauguccaucaucagcaccuuccaccuguccauccccaacuucaaccaguacgaggccaugagcugcgacuucaacgggggcaagaucuccgugcaguacaaccucagccacgcguacgccguggacgccgccaaccacugcgggaccaucgcgaacggcguccugcagaccuucaugcggauggccuggggcggguccuacaucgcccuggacagcggcugcggguccugggacugcaucaugacgagcuaccaguaccucaucauccagaacaucaccugggaggaccacugccaguucucccgccccagccccaucggcuaccuggggcugcucagccagcggacccgcgacaucuacaucucccggcgccugcugggcaccuucacguggacccucagcgacuccgagggcaacgagacccccgggggcuacugccugacccgguggaugcugaucgaggccgagcucaagugcuucgggaacacggccguggcgaagugcaacgagaagcacgacgaggaguucugcgacaugcugcgccuguucgacuucaacaagcaggccauccggcgccucaagaccgaggcccagaugagcauccagcugaucaacaaggccgugaacgcccugaucaacgaccagcucaucaugaagaaccaccuccgggacaucaugugcauccccuacugcaacuacuccaaguacugguaccugaaccacaccgucaccgggaagacgagccugccccgcugcuggcugguguccaacggcagcuaccugaacgagacccacuucuccgacgacaucgagcagcaggcggacaacaugaucaccgagcuccugcagaaggaguacaucgaccggcagggcaagaccccgcuggggcucguggaccuguucgucuucagcacguccuucuaccugaucagcaucuuccugcaccucgugaagaucccgacccaccgccacguggucggcaagcccugccccaagccccaccggcugaaccacauggggaucugcuccugcggccuguacaagcacccgggggugcccgugaaguggaagcgcugaggacuagucccuguucccagagcccacuuuuuuuucuuuuuuugaaauaaaauagccugucuuucagaucucaaaggcucuuuucagagccaccaaaaaaaaaaaaaaaaaaaaaaaaaaaaaaaaaaaaaaaaaaaaaaaaaaaaaaaaaaaaaaaaaaaaaaaaaaaaaaaaaaaaaaaaaaaaaaaaaaaaa

SEQ ID NO: 35503 - RNA, 1764 nt, Artificial Sequence
  mRNA product Design a-2 (hSL-A100) comprising derived and/or modified sequence from LASV(Lassa virus/H.sapiens-wt/NGA/2015/ISTH_0543;Clade II)__AVO03639__GPCmut9 (opt1)
aggagaguccgcucagccagguugcagaagcggcuuagcguguguccuaaucuucucucugcguguagguaggccugugccgcaaacaagcuuaccaugggccagaucaucaccuucuuccaggaggugccccacgucaucgaggaggugaugaacaucgugcugaucgcccucagccugcuggccauccucaaggggaucuacaacgucgcgaccugcggccuguucgggcugguguccuuccuccugcugugcggccgcagcugcuccacgaccuacaaggggguguacgagcuccagacccuggagcuggacauggccaaccucaacaugaccaugccgcugagcugcacgaagaacaacucccaccacuacaucauggucggcaacgagaccggccuggagcucacccugaccaacacgagcaucaucaaccacaaguucugcaaccuguccgacgcccacaagaagaaccucuacgaccacgcccugaugagcaucaucuccaccuuccaccugagcauccccaacuucaaccaguacgaggccauguccugcgacuucaacgggggcaagaucagcgugcaguacaaccucucccacaccuacgcgguggacgccgccaaccacugcgggaccaucgccaacggcguccugcagacguucaugcggauggcguggggcgggagcuacaucgcccuggacuccggcugcgggagcugggacugcaucaugaccuccuaccaguaccucgugauccagaacaccaccugggaggaccacugccaguucagccgccccucccccaucggcuaccuggggcugcucagccagcggacgcgcgacaucuacaucagccggcgccugcugggcaccuucaccuggacccucuccgacagcgagggcaacgagacgcccgggggcuacugccugacccgguggaugcugaucgaggccgagcucaagugcuucgggaacaccgccguggccaagugcaacgagaagcacgacgaggaguucugcgacaugcugcgccuguucgacuucaacaagcaggcgauccggcgccucaagaccgaggcccagauguccauccagcugaucaacaaggccgucaacgcccugaucaacgaccagcucaucaugaagaaccaccuccgggacaucaugugcauccccuacugcaacuacagcaaguacugguaccugaaccacacggugaccgggaagaccucccugccccgcugcuggcuggugagcaacggcuccuaccugaacgagacccacuucagcgacgacaucgagcagcaggccgacaacaugaucacggagcuccugcagaaggaguacaucgaccggcagggcaagaccccgcuggggcucgucgaccuguucguguucuccaccagcuucuaccugaucuccaucuuccugcaccucgugaagaucccgacccaccgccacaucacgggcaagcccugccccaagccccaccggcugaaccacauggggaucugcagcugcggccuguacaagcacccggggguccccgugaaguggaagcgcugaggacuagucccuguucccagagcccacuuuuuuuucuuuuuuugaaauaaaauagccugucuuucagaucucaaaggcucuuuucagagccaccaaaaaaaaaaaaaaaaaaaaaaaaaaaaaaaaaaaaaaaaaaaaaaaaaaaaaaaaaaaaaaaaaaaaaaaaaaaaaaaaaaaaaaaaaaaaaaaaaaaaa

SEQ ID NO: 35504 - RNA, 1764 nt, Artificial Sequence
  mRNA product Design a-2 (hSL-A100) comprising derived and/or modified sequence from LASV(Lassa virus/H.sapiens-wt/NGA/2016/ISTH_0009;Clade II)__AVO03571__GPCmut9 (opt1)
aggagaguccgcucagccagguugcagaagcggcuuagcguguguccuaaucuucucucugcguguagguaggccugugccgcaaacaagcuuaccaugggccagaucaucaccuucuuccaggaggugccccacgucaucgaggaggugaugaacaucgugcugaucgcccucagccugcuggccauccucaaggggaucuacaacgucgcgaccugcggccugcuggggcucguguccuuccugcugcucugcggccgcagcugcuccacgaccuacaaggggguguacgagcugcagacccuggagcucgacauggccagccugaacaugaccaugccgcuguccugcacgaagaacaacagccaccacuacaucauggucggcaacgagaccggccucgagcugacccugaccaacacguccaucaucaaccacaaguucugcaaccucagcgacgcccacaagaagaaccuguacgaccacgcccugauguccaucaucagcaccuuccaccucuccauccccaacuucaaccaguacgaggccaugagcugcgacuucaacgggggccggaucuccgugcaguacaaccugagccacuccuacgcgguggacgccgccaaccacugcgggaccaucgccaacggcguccugcagaccuucaugcgcauggcguggggcgggagcuacaucgcccucgacuccggcugcgggagcugggacugcaucaugacguccuaccaguaccugaucauccagaacaccaccugggaggaccacugccaguucagccggcccagccccaucggcuaccuggggcuccugucccagcgcacccgggacaucuacaucagccgccggcugcucggcacguucaccuggacccuguccgacagcgagggcaacgagacccccgggggcuacugccugacgcgcuggaugcucaucgaggccgagcugaagugcuucgggaacaccgccguggccaagugcaacgagaagcacgacgaggaguucugcgacaugcugcggcuguucgacuucaacaagcaggcgauccgccggcugaagaccgaggcccagauguccauccagcugaucaacaaggccgugaacgcccucaucaacgaccagcugaucaugaagaaccaccuccgcgacaucaugugcaucccguacugcaacuacagcaaguacugguaccucaaccacaccgucacggggaagaccucccugccccggugcuggcuggugagcaacggcuccuaccucaacgagacccacuucagcgacgacaucgagcagcaggccgacaacaugaucaccgagcugcugcagaaggaguacaucgaccgccagggcaagacgccccucgggcugguggaccuguucgucuucuccaccagcuucuaccugaucuccaucuuccuccaccuggugaagaucccgacccaccggcacaucaccggcaagcccugccccaagccccaccgccugaaccacauggggaucugcagcugcggccucuacaaccacccgggggugcccgucaaguggaagcggugaggacuagucccuguucccagagcccacuuuuuuuucuuuuuuugaaauaaaauagccugucuuucagaucucaaaggcucuuuucagagccaccaaaaaaaaaaaaaaaaaaaaaaaaaaaaaaaaaaaaaaaaaaaaaaaaaaaaaaaaaaaaaaaaaaaaaaaaaaaaaaaaaaaaaaaaaaaaaaaaaaaaa

SEQ ID NO: 35505 - RNA, 1764 nt, Artificial Sequence
  mRNA product Design a-2 (hSL-A100) comprising derived and/or modified sequence from LASV(Lassa virus/H.sapiens-wt/NGA/2016/ISTH_0017;Clade II)__AVO03567__GPCmut9 (opt1)
aggagaguccgcucagccagguugcagaagcggcuuagcguguguccuaaucuucucucugcguguagguaggccugugccgcaaacaagcuuaccaugggccagaucaucaccuucuuccaggaggugccccacgucaucgaggaggugaugaacaucgugcugaucgcccucagccugcuggccauccucaaggggaucuacaacgucgcgaccugcggccuguucgggcugguguccuuccuccugcugugcggccgcagcugcuccacgaccuacaaggggguguacgagcuccagacccuggagcuggacauggccagccucaacaugaccaugccgcuguccugcacgaagaacaacagccaccacuacaucauggucggcaacgagaccggccuggagcucacccugaccaacacguccaucaucaaccacaaguucugcaaccugagcgacgcccacaagaagaaccucuacgaccacgcccugauguccaucaucagcaccuuccaccuguccauccccaacuucaaccaguacgaggccaugagcugcgacuucaacgggggcaagaucuccgugcaguacaaccucagccacaccuacgcgaucgacgccgccaaccacugcgggaccaucgccaacggcgugcugcagacguucaugcggauggcguggggcggguccuacaucgcccuggacagcggcugcggguccugggacugcaucaugaccagcuaccaguaccucaucauccagaacaccaccugggaggaccacugccaguucucccgccccagccccaucggcuaccuggggcugcucagccagcggacgcgcgacaucuacaucucccggcgccugcugggcaccuucaccuggacccucagcgacuccgagggcaacgagacgcccgggggcuacugccugacccgguggaugcugaucgaggccgagcucaagugcuucgggaacaccgccgucgccaagugcaacgagaagcacgacgaggaguucugcgacaugcugcgccuguucgacuucaacaagcaggcgauccggcgccucaagaccgaggcccagaugagcauccagcugaucaacaaggccgugaacgcccugaucaacgaccagcucaucaugaagaaccaccuccgggacaucaugugcauccccuacugcaacuacuccaaguacugguaccugaaccacacggugaccgggaagaccagccugccccgcugcuggcuggucuccaacggcagcuaccugaacgagacccacuucuccgacgacaucgagcagcaggccgacaacaugaucacggagcuccugcagaaggaguacauggaccggcagggcaagaccccgcuggggcucguggaccuguucguguucagcaccuccuucuaccugaucagcaucuuccugcaccucguccgcaucccgacccaccggcacgugaucggcaagcccugccccaagccccaccgccugaaccacauggggaucugcuccugcggccuguacaagcacccgggggugcccgucaaguggaagcggugaggacuagucccuguucccagagcccacuuuuuuuucuuuuuuugaaauaaaauagccugucuuucagaucucaaaggcucuuuucagagccaccaaaaaaaaaaaaaaaaaaaaaaaaaaaaaaaaaaaaaaaaaaaaaaaaaaaaaaaaaaaaaaaaaaaaaaaaaaaaaaaaaaaaaaaaaaaaaaaaaaaaa

SEQ ID NO: 35506 - RNA, 1764 nt, Artificial Sequence
  mRNA product Design a-2 (hSL-A100) comprising derived and/or modified sequence from LASV(Lassa virus/H.sapiens-wt/NGA/2018/ISTH_0959;Clade II)__AVV65099__GPCmut9 (opt1)
aggagaguccgcucagccagguugcagaagcggcuuagcguguguccuaaucuucucucugcguguagguaggccugugccgcaaacaagcuuaccaugggccagaucaucaccuucuuccaggaggugccccacgucaucgaggaggugaugaacaucgugcugaucgcccucagccugcuggccauccucaaggggaucuacaacgucgugaccugcggccuguucgggcugguguccuuccuccugcugugcggccgcagcugcuccacgaccuacaagggggucuacgagcuccagacccuggagcuggacauggcgagccucaacaugaccaugccgcuguccugcacgaagaacaacagccaccacuacaucauggugggcaacgagaccggccuggagcucacccugaccaacacguccaucaucaaccacaaguucugcaaccugagcgacgcccacaagaagaaccucuacgaccacgcccugauguccaucaucagcaccuuccaccuguccauccccaacuucaaccaguacgaggccaugagcugcgacuucaacgggggcaagaucuccgugcaguacaaccucagccacgccuacgcgaucgacgccgccaaccacugcgggaccaucgccaacggcguccugcagaccuucaugcggauggcguggggcggguccuacaucgcccuggacagcggcugcggguccugggacugcaucaugacgagcuaccaguaccucaucauccagaacaccaccugggaggaccacugccaguucucccgccccagccccaucggcuaccuggggcugcucagccagcggacccgcgacaucuacaucucccggcgccugcugggcacguucaccuggacccucagcgacuccgagggcaacgagacccccgggggcuacugccugacgcgguggaugcugaucgaggccgagcucaagugcuucgggaacaccgccguggccaagugcaacgagaagcacgacgaggaguucugcgacaugcugcgccuguucgacuucaacaagcaggcgauccggcgccucaagaccgaggcccagaugagcauccagcugaucaacaaggccgugaacgcccugaucaacgaccagcucaucaugaagaaccaccuccgggacaucaugugcaucccguacugcaacuacuccaaguacugguaccugaaccacaccgucacggggaagaccagccugccccgcugcuggcugguguccaacggcagcuaccugaacgagacccacuucuccgacgacaucgagcagcaggccgacaacaugaucaccgagcuccugcagaaggaguacaucgaccggcagggcaagacgccccuggggcucguggaccuguucgucuucagcaccuccuucuaccugaucagcaucuuccugcaccucgugaagaucccgacccaccgccacgugaucggcaagcccugccccaagccccaccggcugaaccacauggggaucugcuccugcggccuguacaagcacccggggguccccgugaaguggaagcgcugaggacuagucccuguucccagagcccacuuuuuuuucuuuuuuugaaauaaaauagccugucuuucagaucucaaaggcucuuuucagagccaccaaaaaaaaaaaaaaaaaaaaaaaaaaaaaaaaaaaaaaaaaaaaaaaaaaaaaaaaaaaaaaaaaaaaaaaaaaaaaaaaaaaaaaaaaaaaaaaaaaaaa

SEQ ID NO: 35507 - RNA, 1764 nt, Artificial Sequence
  mRNA product Design a-2 (hSL-A100) comprising derived and/or modified sequence from LASV(LASV003-NIG-2008;Clade II)__AIT17580__GPCmut9 (opt1)
aggagaguccgcucagccagguugcagaagcggcuuagcguguguccuaaucuucucucugcguguagguaggccugugccgcaaacaagcuuaccaugggccagaucaucaccuucuuccaggaggugccccacgucaucgaggaggugaugaacaucgugcugaucgcccucagccugcuggccauccucaaggggaucuacaacgucgcgaccugcggccuguucgggcugguguccuuccuccugcugugcggccgcagcugcuccacgaccuacaaggggguguacgagcuccagacccuggagcuggacauggccagccucaacaugaccaugccgcuguccugcacgaagaacaacagccaccacuacaucauggucggcaacgagaccggccuggagcucacccugaccaacacguccaucaucaaccacaaguucugcaaccugagcgacgcccacaagaagaaccucuacgaccacgcccugauguccaucaucagcaccuuccaccuguccauccccaacuucaaccaguacgaggccaugagcugcgacuucaacgggggcaagaucuccgugcaguacaaccucagccacaccuacgcgguggacgccgccaaccacugcgggaccaucgccaacggcguccugcagacguucaugcggauggcguggggcggguccuacaucgcccuggacagcggcugcggguccugggacugcaucaugaccagcuaccaguaccucaucauccagaacaccaccugggaggaccacugccaguucucccgccccagccccaucggcuaccuggggcugcucagccagcggacgcgcgacaucuacaucucccggcgccugcugggcaccuucaccuggacccucagcgacuccgagagcaacgagacgccgggcggguacugccugacccgguggaugcugaucgaggccgagcucaagugcuucggcaacaccgccguggccaagugcaacgagaagcacgacgaggaguucugcgacaugcugcgccuguucgacuucaacaagcaggcgauccggcgccucaaggccgaggcccagauguccauccagcugaucaacaaggccgugaacgcccugaucaacgaccagcucaucaugaagaaccaccuccgggacaucaugugcauccccuacugcaacuacagcaaguacugguaccugaaccacaccgucacgggccgcaccucccugccccggugcuggcuggugagcaacggguccuaccugaacgagacccacuucagcgacgacaucgagcagcaggcggacaacaugaucaccgagcuccugcagaaggaguacauggaccgccagggcaagacgccccugggccucguggaccuguucgucuucuccaccagcuucuaccugaucuccaucuuccugcaccucgugaagaucccgacccaccggcacgugaucgggaagcccugccccaagccccaccgccugaaccacaugggcaucugcagcugcgggcuguacaagcacccgggcguccccgugaaguggaagcggugaggacuagucccuguucccagagcccacuuuuuuuucuuuuuuugaaauaaaauagccugucuuucagaucucaaaggcucuuuucagagccaccaaaaaaaaaaaaaaaaaaaaaaaaaaaaaaaaaaaaaaaaaaaaaaaaaaaaaaaaaaaaaaaaaaaaaaaaaaaaaaaaaaaaaaaaaaaaaaaaaaaaa

SEQ ID NO: 35508 - RNA, 1764 nt, Artificial Sequence
  mRNA product Design a-2 (hSL-A100) comprising derived and/or modified sequence from LASV(LASV035-NIG-2009;Clade II)__AIT17588__GPCmut9 (opt1)
aggagaguccgcucagccagguugcagaagcggcuuagcguguguccuaaucuucucucugcguguagguaggccugugccgcaaacaagcuuaccaugggccagaucaucaccuucuuccaggaggugccccacgucaucgaggaggugaugaacaucgugcugaucgcccucagccugcuggccauccucaaggggaucuacaacgucgcgaccugcggccuguucgggcugguguccuuccuccugcugugcggccgcagcugcuccacgaccuacaaggggguguacgagcuccagacccuggagcuggacauggccagccucaacaugaccaugccgcuguccugcacgaagaacaacagccaccacuacaucauggucggcaacgagaccggccuggagcucacccugaccaacacguccaucaucaaccacaaguucugcaaccugagcgacgcccacaagaagaaccucuacgaccacgcccugauguccaucaucagcaccuuccaccuguccauccccaacuucaaccaguacgaggccaugagcugcgacuucaacgggggcaagaucuccgugcaguacaaccucagccacgcguacgccguggacgccgccaaccacugcgggaccaucgcgaacggcguccugcagaccuucaugcggauggccuggggcggguccuacaucgcccuggacagcggcugcggguccugggacugcaucaugacgagcuaccaguaccucaucauccagaacaccaccugggaggaccacugccaguucucccgccccagccccaucggcuaccuggggcugcucagccagcggacccgcgacaucuacaucucccggcgccugcugggcacguucaccuggacccucagcgacuccgagggcaacgagacccccgggggcuacugccugacgcgguggaugcugaucgaggccgagcucaagugcuucgggaacaccgccguggcgaagugcaacgagaagcacgacgaggaguucugcgacaugcugcgccuguucgacuucaacaagcaggccauccggcgccucaaggccgaggcccagaugagcauccagcugaucaacaaggccgugaacgcgcugaucaacgaccagcucaucaugaagaaccaccuccgggacaucaugugcauccccuacugcaacuacuccaaguacugguaccugaaccacaccgucaccgggaagacgagccugccccgcugcuggcugguguccaacggcagcuaccugaacgagacccacuucuccgacgacaucgagcagcaggccgacaacaugaucaccgagcuccugcagaaggaguacaucgaccggcagggcaagaccccgcuggggcucguggaccuguucgucuucagcacguccuucuaccugaucagcaucuuccugcaccucgugaagaucccgacccaccgccacgugaucggcaagcccugccccaagccccaccggcugaaccacauggggaucugcuccugcggccuguacaagcacccggggguccccgugaaguggaagcgcugaggacuagucccuguucccagagcccacuuuuuuuucuuuuuuugaaauaaaauagccugucuuucagaucucaaaggcucuuuucagagccaccaaaaaaaaaaaaaaaaaaaaaaaaaaaaaaaaaaaaaaaaaaaaaaaaaaaaaaaaaaaaaaaaaaaaaaaaaaaaaaaaaaaaaaaaaaaaaaaaaaaaa

SEQ ID NO: 35509 - RNA, 1764 nt, Artificial Sequence
  mRNA product Design a-2 (hSL-A100) comprising derived and/or modified sequence from LASV(LASV1000-NIG-2009;Clade II)__AIT17782__GPCmut9 (opt1)
aggagaguccgcucagccagguugcagaagcggcuuagcguguguccuaaucuucucucugcguguagguaggccugugccgcaaacaagcuuaccaugggccagaucaucaccuucuuccaggaggugccccacgucaucgaggaggugaugaacaucgugcugaucgcccucagccugcuggccauccucaaggggaucuacaacgucgcgaccugcggccuguucgggcugguguccuuccuccugcugugcggccgcagcugcuccacgaccuacaaggggguguacgagcuccagacccuggagcuggacauggccagccucaacaugaccaugccgcuguccugcacgaagaacaacagccaccacuacaucauggucggcaacgagaccggccuggagcucacccugaccaacacguccaucaucaaccacaaguucugcaaccugagcgacgcccacaagaagaaccucuacgaccacgcccugauguccaucaucagcaccuuccaccuguccauccccaacuucaaccaguacgaggccaugagcugcgacuucaacgggggcaagaucuccgugcaguacaaccucagccacaccuacgcgguggacgccgccaaccacugcgggaccaucgccaacggcguccugcagacguucaugcggauggcguggggcggguccuacaucgcccuggacagcggcugcggguccugggacugcaucaugaccagcuaccaguaccucaucauccagaacaccaccugggaggaccacugccaguucucccgccccagccccaucggcuaccuggggcugcucagccagcggacgcgcgacaucuacaucucccggcgccugcugggcaccuucaccuggacccucagcgacuccgagggcaacgagacgcccgggggcuacugccugacccgguggaugcugaucgaggccgagcucaagugcuucgggaacaccgccguggccaagugcaacgagaagcacgacgaggaguucugcgacaugcugcgccuguucgacuucaacaagcaggcgaucaagcggcucaagaccgaggcccagaugagcauccagcugaucaacaaggccgugaacgcccugaucaacgaccagcucaucaugaagaaccaccuccgcgacaucaugugcauccccuacugcaacuacuccaaguacugguaccugaaccacacggucaccgggaagaccagccugccccggugcuggcugguguccaacggcagcuaccugaacgagacccacuucuccgacgacaucgagcagcaggccgacaacaugaucacggagcuccugcagaaggaguacaucgaccgccagggcaagaccccgcuggggcucguggaccuguucgucuucagcaccuccuucuaccugaucagcaucuuccugcaccucgugaagaucccgacccaccggcacguggucggcaagcccugccccaagccccaccgccugaaccacauggggaucugcuccugcggccuguacaagcacccgggggugcccgugaaguggaagcggugaggacuagucccuguucccagagcccacuuuuuuuucuuuuuuugaaauaaaauagccugucuuucagaucucaaaggcucuuuucagagccaccaaaaaaaaaaaaaaaaaaaaaaaaaaaaaaaaaaaaaaaaaaaaaaaaaaaaaaaaaaaaaaaaaaaaaaaaaaaaaaaaaaaaaaaaaaaaaaaaaaaaa

SEQ ID NO: 35510 - RNA, 1764 nt, Artificial Sequence
  mRNA product Design a-2 (hSL-A100) comprising derived and/or modified sequence from LASV(LASV221-NIG-2010;Clade II)__AIT17624__GPCmut9 (opt1)
aggagaguccgcucagccagguugcagaagcggcuuagcguguguccuaaucuucucucugcguguagguaggccugugccgcaaacaagcuuaccaugggccagaucaucaccuucuuccaggaggugccccacgucaucgaggaggugaugaacaucgugcugaucgcccucagccugcuggccauccucaaggggaucuacaacgucgcgaccugcggccuguucgggcugguguccuuccuccugcugugcggccgcagcugcuccacgaccuacaaggggguguacgagcuccagacccuggagcuggacauggccagccucaacaugaccaugccgcuguccugcacgaagaacaacagccaccacuacaucauggucggcaacgagaccggccuggagcucacccugaccaacacguccaucaucaaccacaaguucugcaaccugagcgacgcccacaagaagaaccucuacgaccacgcccugauguccaucaucagcaccuuccaccuguccauccccaacuucaaccaguacgaggccaugagcugcgacuucaacgggggcaagaucuccgugcaguacaaccucagccacaccuacgcgaucgacgccgccaaccacugcgggaccaucgccaacggcgugcugcagacguucaugcggauggcguggggcggguccuacaucgcccuggacagcggcugcggguccugggacugcaucaugaccagcuaccaguaccucaucauccagaacaccaccugggaggaccacugccaguucucccgccccagccccaucggcuaccuggggcugcucagccagcggacgcgcgacaucuacaucucccggcgccugcugggcaccuucaccuggacccucagcgacuccgagggcaacgagacgcccgggggcuacugccugacccgguggaugcugaucgaggccgagcucaagugcuucgggaacaccgccgucgccaagugcaacgagaagcacgacgaggaguucugcgacaugcugcgccuguucgacuucaacaagcaggcgauccggcgccucaagaccgaggcccagaugagcauccagcugaucaacaaggccgugaacgcccugaucaacgaccagcucaucaugaagaaccaccuccgggacaucaugugcauccccuacugcaacuacuccaaguacugguaccugaaccacacggugaccgggaagaccagccugccccgcugcuggcuggucuccaacggcagcuaccugaacgagacccacuucuccgacgacaucgagcagcaggccgacaacaugaucacggagaugcuccagaaggaguacauggaccggcagggcaagaccccgcuggggcugguggaccucuucguguucagcaccuccuucuaccugaucagcaucuuccugcaccuggucaagaucccgacccaccgccacgugaucggcaagcccugccccaagccccaccggcucaaccacauggggaucugcuccugcggccuguacaagcacccgggggugcccgucaaguggaagcgcugaggacuagucccuguucccagagcccacuuuuuuuucuuuuuuugaaauaaaauagccugucuuucagaucucaaaggcucuuuucagagccaccaaaaaaaaaaaaaaaaaaaaaaaaaaaaaaaaaaaaaaaaaaaaaaaaaaaaaaaaaaaaaaaaaaaaaaaaaaaaaaaaaaaaaaaaaaaaaaaaaaaaa

SEQ ID NO: 35511 - RNA, 1764 nt, Artificial Sequence
  mRNA product Design a-2 (hSL-A100) comprising derived and/or modified sequence from LASV(LASV237-NIG-2010;Clade II)__AIT17638__GPCmut9 (opt1)
aggagaguccgcucagccagguugcagaagcggcuuagcguguguccuaaucuucucucugcguguagguaggccugugccgcaaacaagcuuaccaugggccagaucaucaccuucuuccaggaggugccccacgucaucgaggaggugaugaacaucgugcugaucgcccucagccugcuggccauccucaaggggaucuacaacgucgcgaccugcggccuguucgggcugguguccuuccuccugcugugcggccgcagcugcuccacgaccuacaaggggguguacgagcuccagacccuggagcuggacauggccagccucaacaugaccaugccgcuguccugcacgaagaacaacagccaccacuacaucauggucggcaacgagaccggccuggagcucacccugaccaacacguccaucaucaaccacaaguucugcaaccugagcgacgcccacaagaaggaccucuacgaccacgcccugauguccaucaucagcaccuuccaccuguccauccccaacuucaaccaguacgaggccaugagcugcgacuucaacgggggcaagaucuccgugcaguacaaccucagccacaccuacgcgguggacgccgccaaccacugcgggaccaucgccaacggcguccugcagacguucaugcggauggcguggggcggguccuacaucgcccuggacagcggcugcggguccugggacugcaucaugaccagcuaccaguaccucaucauccagaacaccaccugggaggaccacugccaguucucccgccccagccccaucggcuaccuggggcugcucagccagcggacgcgcgacaucuacaucucccggcgccugcugggcaccuucaccuggacccucagcgacuccgagggcaacgagacgcccgggggcuacugccugacccgguggaugcugaucgaggccgagcucaagugcuucgggaacaccgccguggccaagugcaacgagaagcacgacgaggaguucugcgacaugcugcgccuguucgacuucaacaagcaggcgauccggcgccucaagaccgaggcccagaugagcauccagcugaucaacaaggccgugaacgcccugaucaacgaccagcucaucaugaagaaccaccuccgggacaucaugugcauccccuacugcaacuacuccaaguacugguaccugaaccacacggucaccgggaagaccagccugccccgcugcuggcugguguccaacggcagcuaccugaacgagacccacuucuccgacgacaucgagcagcaggccgacaacaugaucacggagcuccugcagaaggaguacauggaccggcagggcaagaccccgcuggggcucguggaccuguucgucuucagcaccuccuucuaccugaucagcaucuuccugcaccucaucaagaucccgacccaccgccacaucacgggcaagcccugccccaagccccaccggcugaaccacauggggaucugcuccugcggccuguacaagcacccgggggugcccgugaaguggaagcgcugaggacuagucccuguucccagagcccacuuuuuuuucuuuuuuugaaauaaaauagccugucuuucagaucucaaaggcucuuuucagagccaccaaaaaaaaaaaaaaaaaaaaaaaaaaaaaaaaaaaaaaaaaaaaaaaaaaaaaaaaaaaaaaaaaaaaaaaaaaaaaaaaaaaaaaaaaaaaaaaaaaaaa

SEQ ID NO: 35512 - RNA, 1764 nt, Artificial Sequence
  mRNA product Design a-2 (hSL-A100) comprising derived and/or modified sequence from LASV(LASV253-NIG-2011;Clade II)__AIT17670__GPCmut9 (opt1)
aggagaguccgcucagccagguugcagaagcggcuuagcguguguccuaaucuucucucugcguguagguaggccugugccgcaaacaagcuuaccaugggccagaucaucaccuucuuccaggaggugccccacgucaucgaggaggugaugaacaucgugcugaucgcccucagccugcuggccauccucaaggggaucuacaacgucgcgaccugcggccuguucgggcugguguccuuccuccugcugugcggccgcagcugcuccacgaccuacaaggggguguacgagcuccagacccuggagcuggacauggccagccucaacaugaccaugccgcuguccugcacgaagaacaacagccaccacuacaucauggucggcaacgagaccggccuggagcucacccugaccaacacguccaucaucaaccacaaguucugcaaccugagcgacgcccacaagaagaaccucuacgaccacgcccugauguccaucaucagcaccuuccaccuguccauccccaacuucaaccaguacgaggccaugagcugcgacuucaacgggggcaagaucuccgugcaguacaaccucagccacaccuacgcgguggacgccgccaaccacugcgggaccaucgccaacggcguccugcagacguucaugcggauggcguggggcggguccuacaucgcccuggacagcggcugcggguccugggacugcaucaugaccagcuaccaguaccucaucauccagaacaccaccugggaggaccacugccaguucucccgccccagccccaucggcuaccuggggcugcucagccagcggacgcgcgacaucuacaucucccggcgccugcugggcaccuucaccuggacccucagcgacuccgagggcaacgagacgcccgggggcuacugccugacccgguggaugcugaucgaggccgagcucaagugcuucgggaacaccgccguggccaagugcaacgagaagcacgacgaggaguucugcgacaugcugcgccuguucgacuucaacaagcaggcgauccggcgccucaaggccgaggcccagaugagcauccagcugaucaacaaggccgugaacgcccugaucaacgaccagcucaucaugaagaaccaccuccgggacaucaugugcaucccguacugcaacuacuccaaguacugguaccugaaccacaccgucacggggcgcaccagccugccccggugcuggcugguguccaacggcagcuaccugaacgagacccacuucuccgacgacaucgagcagcaggcggacaacaugaucaccgagcuccugcagaaggaguacaucgaccgccagggcaagacgccccuggggcucguggaccuguucgucuucagcaccuccuucuaccugaucagcaucuuccugcaccucgugaagaucccgacccaccggcacaucaucggcaagcccugccccaagccccaccgccugaaccacauggggaucugcuccugcggccuguacaagcacccgggggugcccgucaaguggaagcggugaggacuagucccuguucccagagcccacuuuuuuuucuuuuuuugaaauaaaauagccugucuuucagaucucaaaggcucuuuucagagccaccaaaaaaaaaaaaaaaaaaaaaaaaaaaaaaaaaaaaaaaaaaaaaaaaaaaaaaaaaaaaaaaaaaaaaaaaaaaaaaaaaaaaaaaaaaaaaaaaaaaaa

SEQ ID NO: 35513 - RNA, 1764 nt, Artificial Sequence
  mRNA product Design a-2 (hSL-A100) comprising derived and/or modified sequence from LASV(LASV254-NIG-2011;Clade II)__AIT17674__GPCmut9 (opt1)
aggagaguccgcucagccagguugcagaagcggcuuagcguguguccuaaucuucucucugcguguagguaggccugugccgcaaacaagcuuaccaugggccagaucaucaccuucuuccaggaggugccccacgucaucgaggaggugaugaacaucgugcugaucgcccucagccugcuggccauccucaaggggaucuacaacgucgcgaccugcggccuguucgggcugguguccuuccuccugcugugcggccgcagcugcuccacgaccuacaaggggguguacgagcuccagacccuggagcuggacaugaccaaccucaacaugacgaugccgcugagcugcaccaagaacaacucccaccacuacaucauggucggcaacgagaccggccuggagcucacccugacgaacaccagcaucaucaaccacaaguucugcaaccuguccgacgcccacaagaagaaccucuacaaccacgcccugaugagcaucaucuccaccuuccaccugagcauccccaacuucaaccaguacgaggccauguccugcgacuucaacgggggcaagaucagcgugcaguacaaccucucccacagcuacgccguggacgcggccaaccacugcgggaccaucgccaacggcguccugcagacguucaugcggauggccuggggcggguccuacaucgcgcuggacagcggcugcgggaacugggacugcaucaugaccuccuaccaguaccucaucauccagaacaccaccugggaggaccacugccaguucagccgccccucccccaucggcuaccuggggcugcucagccagcggacgcgcgacaucuacaucagccggcgccugcugggcaccuucaccuggacccucuccgacagcgagggcaacgagacgcccgggggcuacugccugacccgguggaugcugaucgaggccgagcucaagugcuucgggaacaccgccguggccaagugcaacgagaagcacgacgaggaguucugcgacaugcugcgccuguucgacuucaacaagcaggccauccggcgccucaagaccgaggcgcaggccaacauccagcugaucaacaaggccgugaacgcccugaucaacgaccagcucaucaugaagaaccaccuccgggacaucaugugcauccccuacugcaacuacuccaaguacugguaccugaaccacacggucaccgggaagaccagccugccccgcugcuggcugguguccaacggcagcuaccugaacgagacccacuucuccgacgacaucgagcagcaggccgacaacaugaucacggagcuccugcagaaggaguacauggaccggcagggcaagaccccgcuggggcucguggaccuguucgucuucagcaccuccuucuaccugaucagcaucuuccugcaccucgugaagaucccgacccaccgccacgugaucggcaagcccugccccaagccccaccggcugaaccacauggggaucugcuccugcggccuguacaagcacccggggguccccgugaaguggaagcgcugaggacuagucccuguucccagagcccacuuuuuuuucuuuuuuugaaauaaaauagccugucuuucagaucucaaaggcucuuuucagagccaccaaaaaaaaaaaaaaaaaaaaaaaaaaaaaaaaaaaaaaaaaaaaaaaaaaaaaaaaaaaaaaaaaaaaaaaaaaaaaaaaaaaaaaaaaaaaaaaaaaaaa

SEQ ID NO: 35514 - RNA, 1764 nt, Artificial Sequence
  mRNA product Design a-2 (hSL-A100) comprising derived and/or modified sequence from LASV(Nig08-A19;Clade III)__ADU56618__GPCmut9 (opt1)
aggagaguccgcucagccagguugcagaagcggcuuagcguguguccuaaucuucucucugcguguagguaggccugugccgcaaacaagcuuaccaugggccagaucgugaccuucuuccaggaggucccccacgugaucgaggaggugaugaacaucguccugaucgcccucagcauccuggccauccugaaggggcucuacaacaucgcgaccugcggccugaucgggcuggugacguuccuccugcuguccggccgcagcugcuccaugaccuacaaggggguguacgagcuccagacccuggagcugaacaugaacacccucaacaugacgaugccgcugagcugcaccaagaacaacucccaccacuacaucauggucggcaacgagaccggccuggagcucacccugacgaacaccagccugcuccaccacaaguucugcaaccuguccgacgcccacaagaagaaccuguacgaccacacccucaugagcaucaucuccaccuuccaccugagcauccccaacuucaaccaguacgaggccauguccugcgacuucaacgggggcaagaucacggugcaguacaaccugagccacuccuacgccaucgacgccgcgaaccacugcgggaccguggccaacggcguccuccagaccuucaugcggauggccuggggcgggagcuacaucgcccuggacuccggcugcgggaagugggacugcaucaugaccagcuaccaguaccugaucauccagaacacgaccugggaggaccacugccaguucucccggcccagccccaucggcuaccucgggcugcugucccagcgcacccgggacaucuacaucagccgccggcuccugggcaccuucacguggacccugagcgacuccgagggcaacgagacccccgggggcuacugccucacccgcuggaugcugaucgaggcggagcugaagugcuucgggaacacggccguggccaagugcaacgagaagcacgacgaggaguucugcgacaugcuccggcuguucgacuucaacaagcaggccauccgccggcugaaggccgaggcgcagaugagcauccagcucaucaacaaggccgugaacgcccugaucaacgaccagcugaucaugaagaaccaccuccgcgacaucaugugcauccccuacugcaacuacuccaaguacugguaccugaaccacaccagcaccgggcggaccucccugccccgcugcuggcucgucagcaacggcuccuaccugaacgagacgcacuucagcgacgacaucgagcagcaggccgacaacaugaucaccgagaugcugcagaaggaguaccucgaccggcagggcaagaccccgcuggggcugguggaccuguucguguucuccaccagcuucuaccucaucuccaucuuccugcaccuggucaagaucccgacgcaccgccacaucgugggcaagcccugccccaagccccaccggcucaaccacauggggaucugcagcugcggccuguacaagcagccgggggugcccguccgcuggaagcggugaggacuagucccuguucccagagcccacuuuuuuuucuuuuuuugaaauaaaauagccugucuuucagaucucaaaggcucuuuucagagccaccaaaaaaaaaaaaaaaaaaaaaaaaaaaaaaaaaaaaaaaaaaaaaaaaaaaaaaaaaaaaaaaaaaaaaaaaaaaaaaaaaaaaaaaaaaaaaaaaaaaaa

SEQ ID NO: 35515 - RNA, 1767 nt, Artificial Sequence
  mRNA product Design a-2 (hSL-A100) comprising derived and/or modified sequence from LASV(G1180-SLE-2010;Clade IV)__AIT17168__GPCmut9 (opt1)
aggagaguccgcucagccagguugcagaagcggcuuagcguguguccuaaucuucucucugcguguagguaggccugugccgcaaacaagcuuaccaugggccagaucgugaccuucuuccaggaggucccccacgugaucgaggaggugaugaacaucguccugaucgcccucagcauccuggccgugcugaaggggcucuacaacuucgcgaccugcggccugguggggcugcucaccuuccugcugcucugcggccgcuccugcaccgccagccgguacaagggggucuacgagcugcagacccuggagcucaacauggagacccugaacaugacgaugccgcuguccugcaccaagaacaacagccaccacuacaucauggugggcaacgagaccggccucgagcugacccugacgaacaccuccaucaucaaccacaaguucugcaaccucagcgacgcccacaagaagaaccuguacgaccacgcccugauguccaucaucagcaccuuccaccucuccauccccaacuucaaccaguacgaggccaugagcugcgacuucaacgggggcaagaucuccgugcaguacaaccugagccacuccuacgcgggggacgccgccaaccacugcggcaccgucgccaacggggugcugcagacguucaugcgcauggcguggggcggcagcuacaucgcccucgacuccgggugcggcagcugggacugcaucaugaccuccuaccaguaccugaucauccagaacaccaccugggaggaccacugccaguucagccggcccucccccaucggguaccugggccuccugagccagcgcacgcgggacaucuacaucagccgccggcugcucggcaccuucaccuggacccuguccgacagcgaggggaaggacacgccgggcggguacugccugacccgcuggaugcucaucgaggccgagcugaagugcuucggcaacaccgccguggccaagugcaacgagaagcacgacgaggaguucugcgacaugcugcggcuguucgacuucaacaagcaggcgauccagcgccugaaggccgaggcccagauguccauccagcugaucaacaaggccgucaacgcccucaucaacgaccagcugaucaugaagaaccaccuccgggacaucaugugcauccccuacugcaacuacagcaaguacugguaccucaaccacaccacgaccggcaagaccucccugcccaagugcuggcuggugagcaacggcuccuaccucaacgagacccacuucagcgacgacaucgagcagcaggcggacaacaugaucacggagaugcugcagaaggaguacauggagcgccaggggaagacgccccugggccucguggaccuguucgucuucuccaccagcuucuaccugaucuccaucuuccugcaccucgugaagaucccgacccaccggcacaucgugggcaagagcugccccaagccccaccgccugaaccacauggggaucugcuccugcgggcuguacaagcagcccggcgucccggugaaguggaagcggugaggacuagucccuguucccagagcccacuuuuuuuucuuuuuuugaaauaaaauagccugucuuucagaucucaaaggcucuuuucagagccaccaaaaaaaaaaaaaaaaaaaaaaaaaaaaaaaaaaaaaaaaaaaaaaaaaaaaaaaaaaaaaaaaaaaaaaaaaaaaaaaaaaaaaaaaaaaaaaaaaaaaa

SEQ ID NO: 35516 - RNA, 1767 nt, Artificial Sequence
  mRNA product Design a-2 (hSL-A100) comprising derived and/or modified sequence from LASV(G1442-SLE-2011;Clade IV)__AIT17180__GPCmut9 (opt1)
aggagaguccgcucagccagguugcagaagcggcuuagcguguguccuaaucuucucucugcguguagguaggccugugccgcaaacaagcuuaccaugggccagaucgugaccuucuuccaggaggucccccacgugaucgaggaggugaugaacaucguccugaucgcccucagcauccuggccgugcugaaggggcucuacaacguggcgaccugcggccugaucgggcuggucacguuccuccugcugugcggccgcuccugcaccaccacccucuacaaggggguguacgagcugcagacgcuggagcucaacauggagacccugaacaugaccaugccgcugagcugcaccaagaacaacucccaccacuacauccgggugggcaacgagacgggccucgagcugacccugaccaacaccagcaucaucaaccacaaguucugcaaccucuccgacgcccacaagaagaaccuguacgaccacgcccugaugagcaucaucuccacguuccaccucagcauccccaacuucaaccaguacgaggccauguccugcgacuucaacgggggcaagaucagcguccaguacaaccugucccacagcuacgccggggacgcggccaaccacugcggcaccguggccaacggggugcugcagaccuucaugcgcauggccuggggcggcuccuacaucgcgcucgacagcgggugcggcaacugggacugcaucaugaccuccuaccaguaccugaucauccagaacacgaccugggacgaccacugccaguucagccgccccucccccaucggguaccugggccuccugagccagcggacccgcgacgucuacaucucccggcgccugcucggcaccuucacguggacccugagcgacagcgaggggaaggacaccccgggcggguacugccugacccgguggaugcucaucgaggccgagcugaagugcuucggcaacacggccguggccaagugcaacgagaagcacgacgaggaguucugcgacaugcugcgccucuucgacuucaacaagcaggccauccagcggcugaaggcggaggcccagauguccauccagcugaucaacaaggccgugaacgcccucaucaacgaccagcugaucaugaagaaccaccuccgcgacaucaugugcauccccuacugcaacuacagcaaguacugguaccugaacaacaccgccaccggcaagaccucccugcccaagugcuggcugaucagcaacggcuccuaccucaacgagacgcacuucagcgacgacaucgagcaggaggcggacaacaugaucaccgagaugcugcagaaggaguacauggagcggcaggggaagacgccccugggccucgucgaccuguucguguucuccaccagcuucuaccugaucuccaucuuccugcaccucgugaagaucccgacccaccgccacaucgucggcaagagcugccccaagccccaccggcugaaccacauggggaucugcuccugcgggcuguacaagcagcccggcgugccggugcgcuggaagcggugaggacuagucccuguucccagagcccacuuuuuuuucuuuuuuugaaauaaaauagccugucuuucagaucucaaaggcucuuuucagagccaccaaaaaaaaaaaaaaaaaaaaaaaaaaaaaaaaaaaaaaaaaaaaaaaaaaaaaaaaaaaaaaaaaaaaaaaaaaaaaaaaaaaaaaaaaaaaaaaaaaaaa

SEQ ID NO: 35517 - RNA, 1767 nt, Artificial Sequence
  mRNA product Design a-2 (hSL-A100) comprising derived and/or modified sequence from LASV(G3010-SLE-2013;Clade IV)__AIT17344__GPCmut9 (opt1)
aggagaguccgcucagccagguugcagaagcggcuuagcguguguccuaaucuucucucugcguguagguaggccugugccgcaaacaagcuuaccaugggccagaucgugaccuucuuccaggaggucccccacgugaucgaggaggugaugaacaucguccugaucgcccucagcauccuggccgugcugaaggggcucuacaacuucgcgaccugcggccugguggggcuggucacguuccuccugcugugcggccgcuccugcaccaccagccucuacaaggggguguacgagcugcagacccuggagcucaacauggagacgcugaacaugaccaugccgcuguccugcaccaagaacaacagccaccacuacaucauggugggcaacgagaccggccucgagcugacgcugaccaacaccuccaucaucaaccacaaguucugcaaccucagcgacgcccacaagaagaaccuguacaaccacgcccugauguccaucaucagcaccuuccaccucuccauccccaacuucaaccaguacgaggccaugagcugcgacuucaacgggggcaagaucuccguccaguacaaccugagccacuccuacgccggggacgcggccagccacugcggcacgguggccaacggggugcugcagaccuucaugcggauggccuggggcggcuccuacaucgcgcucgacagcgggugcggcaagugggacugcaucaugaccuccuaccaguaccugaucauccagaacaccacgugggaggaccacugccaguucagccgccccucccccaucggguaccugggccuccugagccagcggacccgcgacaucuacaucagccggcgccugcucggcaccuucaccuggacgcuguccgacagcgaggggaaggacaccccgggcggguacugccugacccgguggaugcucaucgaggccgagcugaagugcuucggcaacaccgccgucgccaagugcaacgagaagcacgacgaggaguucugcgacaugcugcgccucuucgacuucaacaagcaggccauccagcggcugaagacggaggcgcagauguccauccagcugaucaacaaggccgugaacgcccucaucaacgaccagcugaucaugaagaaccaccuccgcgacaucaugugcauccccuacugcaacuacagcaaguacugguaccugaaccacaccaccaccggcaagacgucccugcccaagugcuggcuggugagcaacggcuccuaccucaacgagacccacuucagcgacgacaucgagcagcaggccgacaacaugaucaccgagaugcugcagaaggaguacauggagcggcaggggaagacgccccugggccucgucgaccuguucguguucuccaccagcuucuaccugaucuccaucuuccugcaccucgugaagaucccgacccaccgccacaucgucggcaagagcugccccaagccccaccggcugaaccacauggggaucugcuccugcgggcuguacaagcagcccggcgugccggugcgcuggaagcggugaggacuagucccuguucccagagcccacuuuuuuuucuuuuuuugaaauaaaauagccugucuuucagaucucaaaggcucuuuucagagccaccaaaaaaaaaaaaaaaaaaaaaaaaaaaaaaaaaaaaaaaaaaaaaaaaaaaaaaaaaaaaaaaaaaaaaaaaaaaaaaaaaaaaaaaaaaaaaaaaaaaaa

SEQ ID NO: 35518 - RNA, 1767 nt, Artificial Sequence
  mRNA product Design a-2 (hSL-A100) comprising derived and/or modified sequence from LASV(G502-SLE-2009;Clade IV)__AIT17126__GPCmut9 (opt1)
aggagaguccgcucagccagguugcagaagcggcuuagcguguguccuaaucuucucucugcguguagguaggccugugccgcaaacaagcuuaccaugggccagaucgugaccuucuuccaggaggucccccacgugaucgaggaggugaugaacaucguccugaucgcccucagcauccuggccgugcugaaggggcucuacaacuucgcgaccugcggccugguggggcugcucacguuccugcugcucugcggccgcuccugcaccaccgggcuguacaagggcgucuacgagcugcagacccucgagcugaacauggagacgcugaacaugaccaugccgcucagcugcaccaagaacaacucccaccacuacaucauggugggcaacgagaccgggcuggagcugacgcucaccaacaccagcaucaucaaccacaaguucugcaaccuguccgacgcccacaagaagaaccuguacgaccacgcccucaugagcaucaucuccaccuuccaccugagcauccccaacuucaaccaguacgaggccauguccugcgacuucaacggcgggaagaucagcgugcaguacaaccugucccacagcuacgccggcgacgcggccgaccacugcgggacggucgccaacggcgugcuccagaccuucaugcggauggccuggggcggguccuacaucgcgcuggacagcggcugcgggcggugggacugcaucaugaccuccuaccaguaccugaucauccagaacaccacgugggaggaccacugccaguucagccgccccucccccaucggcuaccucggccugcugagccagcggacccgcgacaucuacaucucccggcgccuccuggggaccuucaccuggacgcugagcgacagcgagggcaaggacacccccgggggcuacugccucacccgguggaugcugaucgaggccgagcugaagugcuucgggaacaccgccguggccaagugcaacgagaagcacgacgaggaguucugcgacaugcuccgccuguucgacuucaacaagcaggccauccagcggcugaaggcggaggcccagauguccauccagcucaucaacaaggccgucaacgcccugaucaacgaccagcuggugaugaagaaccaccuccgcgacaucaugugcauccccuacugcaacuacagccgguacugguaccugaaccacacgaccaccggccgcaccucccugcccaagugcuggcucgugagcaacggguccuaccugaacgagacgcacuucagcgacgacaucgagcagcaggccgacaacaugaucaccgagaugcugcagaaggaguacauggagcggcagggcaagaccccgcucgggcuggucgaccuguucguguucuccaccagcuucuaccugaucuccaucuuccuccaccuggugaagaucccgacgcaccgccacaucgucggcaagagcugccccaagccccaccggcugaaccacauggggaucugcuccugcggccucuacaagcagcccggcgugccggugaaguggaagcgcugaggacuagucccuguucccagagcccacuuuuuuuucuuuuuuugaaauaaaauagccugucuuucagaucucaaaggcucuuuucagagccaccaaaaaaaaaaaaaaaaaaaaaaaaaaaaaaaaaaaaaaaaaaaaaaaaaaaaaaaaaaaaaaaaaaaaaaaaaaaaaaaaaaaaaaaaaaaaaaaaaaaaa

SEQ ID NO: 35519 - RNA, 1767 nt, Artificial Sequence
  mRNA product Design a-2 (hSL-A100) comprising derived and/or modified sequence from LASV(G733-SLE-2010;Clade IV)__AIT17154__GPCmut9 (opt1)
aggagaguccgcucagccagguugcagaagcggcuuagcguguguccuaaucuucucucugcguguagguaggccugugccgcaaacaagcuuaccaugggccagaucgugaccuucuuccaggaggucccccacgugaucgaggaggugaugaacaucguccugaucgcccucagcauccuggccgugcugaaggggcucuacaacuucgcgaccugcggcaucguggggcuggucuccuuccugcuccugugcggccgcagcugcacgaccucccuguacaaggggguguacgagcuccagacccuggagcugaacauggagacccucaacaugacgaugccgcugagcugcaccaagaacaacucccaccacuacaucauggugggcaacgagaccggccuggagcucacccugacgaacaccagcaucaucaaccacaaguucugcaaccuguccgacgcccacaagaagaaccucuacgaccacgcccugaugagcaucaucuccaccuuccaccugagcauccccaacuucaaccaguacgaggccauguccugcgacuucaacgggggcaagaucagcguccaguacaaccucucccacagcuacgccggggacgcggccaaccacugcggcaccaucgccaacggggugcugcagacguucaugcggauggccuggggcggcuccuacaucgcgcuggacagcgggugcgaccggugggacugcaucaugaccuccuaccaguaccucaucauccagaacaccaccugggaggaccacugccaguucagccgccccucccccaucggcuaccuggggcugcucagccagcggacgcgcgacaucuacaucagccggcgccugcugggcaccuucaccuggacccucuccgacagcgagggcaaggacacgcccgggggcuacugccugacccgguggaugcugaucgaggccgagcucaagugcuucgggaacaccgccguggccaagugcaacgagaagcacgacgaggaguucugcgacaugcugcgccuguucgacuucaacaagcaggccauccagcggcucaaggcggaggcccagauguccauccagcugaucaacaaggccgucaacgcccugaucaacgaccagcucaucaugaagaaccaccuccgcgacaucaugugcauccccuacugcaacuacagcaaguacugguaccugaaccacaccacgaccgggaagaccucccugcccaagugcuggcuggugagcaacggcuccuaccugaacgagacccacuucagcgacgacaucgagcagcaggccgacaacaugaucacggagaugcuccagaaggaguacauggagcggcagggcaagaccccgcuggggcugguggaccucuucgucuucuccaccagcuucuaccugaucuccaucuuccugcaccuggugaagaucccgacccaccgccacguggucggcaagagcugccccaagccccaccggcucaaccacauggggaucugcuccugcggccuguacgggcagcccggcgugccggugaaguggaagcgcugaggacuagucccuguucccagagcccacuuuuuuuucuuuuuuugaaauaaaauagccugucuuucagaucucaaaggcucuuuucagagccaccaaaaaaaaaaaaaaaaaaaaaaaaaaaaaaaaaaaaaaaaaaaaaaaaaaaaaaaaaaaaaaaaaaaaaaaaaaaaaaaaaaaaaaaaaaaaaaaaaaaaa

SEQ ID NO: 35520 - RNA, 1767 nt, Artificial Sequence
  mRNA product Design a-2 (hSL-A100) comprising derived and/or modified sequence from MOPV/LASV reassortant(IGS-1;Clade IV)__AFY05576__GPCmut9 (opt1)
aggagaguccgcucagccagguugcagaagcggcuuagcguguguccuaaucuucucucugcguguagguaggccugugccgcaaacaagcuuaccaugggccagaucgugaccuucuuccaggaggucccccacgugaucgaggaggugaugaacaucguccugaucgcccucagcgugcuggccgugcugaaggggcucuacaacuucgcgaccugcggccuggucgggcuggugacguuccuccugcugugcggccgcuccugcaccaccagccucuacaaggggguguacgagcugcagacccuggagcucaacauggagacgcugaacaugaccaugccgcuguccugcaccaagaacaacagccaccacuacaucauggucggcaacgagaccggccucgagcugacgcugaccaacaccuccaucaucaaccacaaguucugcaaccucagcgacgcccacaagaagaaccuguacgaccacgcccugauguccaucaucagcaccuuccaccucuccauccccaacuucaaccaguacgaggccaugagcugcgacuucaacgggggcaagaucuccgugcaguacaaccugagccacuccuacgccggggacgcggccaaccacugcggcacgguggccaacgggguccugcagaccuucaugcggauggccuggggcggcagcuacaucgcgcucgacuccgggugcggcaacugggacugcaucaugaccagcuaccaguaccugaucauccagaacaccacgugggaggaccacugccaguucucccggcccagccccaucggguaccugggccuccugucccagcgcacccgggacaucuacaucagccgccggcugcucggcaccuucaccuggacgcugagcgacuccgagggggaggacaccccgggcggguacugccugacccgcuggaugcucaucgaggccgagcugaagugcuucggcaacaccgccguggccaagugcaacgagaagcacgacgaggaguucugcgacaugcugcggcuguucgacuucaacaagcaggccauccagcgccugaaggcggaggcccagaugagcauccagcugaucaacaaggccgugaacgcccucaucaacgaccagcugaucaugaagaaccaccuccgggacaucaugugcauccccuacugcaacuacuccaaguacugguaccucaaccacacgaccaccggccgcaccagccugcccaagugcuggcuggucuccaacggcagcuaccucaacgagacgcacuucuccgacgacaucgagcagcaggccgacaacaugaucaccgagaugcugcagaaggaguacauggagcggcaggggaagacgccccugggccucguggaccuguucguguucagcaccuccuucuaccugaucagcaucuuccugcaccucgucaagaucccgacccaccgccacaucguggggaaguccugccccaagccccaccggcugaaccacaugggcaucugcagcugcgggcuguacaagcagcccggcgugccggucaaguggaagcgcugaggacuagucccuguucccagagcccacuuuuuuuucuuuuuuugaaauaaaauagccugucuuucagaucucaaaggcucuuuucagagccaccaaaaaaaaaaaaaaaaaaaaaaaaaaaaaaaaaaaaaaaaaaaaaaaaaaaaaaaaaaaaaaaaaaaaaaaaaaaaaaaaaaaaaaaaaaaaaaaaaaaaa

SEQ ID NO: 35521 - RNA, 1767 nt, Artificial Sequence
  mRNA product Design a-2 (hSL-A100) comprising derived and/or modified sequence from LASV(LM765-SLE-2012;Clade IV)__AIT17814__GPCmut9 (opt1)
aggagaguccgcucagccagguugcagaagcggcuuagcguguguccuaaucuucucucugcguguagguaggccugugccgcaaacaagcuuaccaugggccagaucgugaccuucuuccaggaggucccccacgugaucgaggaggugaugaacaucguccugaucgcccucagcauccuggccgugcugaaggggcucuacaacuucgcgaccugcggccugguggggcuggucacguuccuccugcugugcggccgcuccugcaccaccagccucuacaaggggguguacgagcugcagacccuggagcucaacauggagacgcugaacaugaccaugccgcuguccugcaccaagaacaacagccaccacuacaucauggugggcaacgagaccggccucgagcugacgcugaccaacaccuccaucaucgaccacaaguucugcaaccucagcgacgcccaccggaagaaccuguacgaccacgcccugauguccaucaucagcaccuuccaccucuccauccccaacuucaaccaguacgaggccaugagcugcgacuucaacgggggcaagaucuccguccaguacaaccugagccacuccuacgccaaggacgcggccgaccacugcgggacgguggccaacggcgugcugcagaccuucaugcgcauggccuggggcgggagcuacaucgcgcucgacuccggcugcgggcgcugggacugcaucaugaccagcuaccaguaccugaucauccagaacaccacgugggaggaccacugccaguucucccggcccagccccaucggcuaccuggggcuccugucccagcgcacccgggacaucuacaucagccgccggcugcucggcaccuucaccuggacgcugagcgacuccgagggcaaggacacccccgggggcuacugccugacccgcuggaugcucaucgaggccgagcugaagugcuucgggaacaccgccgucgccaagugcaacgagaagcacgacgaggaguucugcgacaugcugcggcuguucgacuucaacaagcaggccauccagcgccugaaggcggaggcccagaugagcauccagcugaucaacaaggccgugaacgcccucaucaacgaccagcugaucaugaagaaccaccuccgggacaucaugugcauccccuacugcaacuacuccaaguacugguaccucaaccacacgaccaccgggaagaccagccugcccaagugcuggcugguguccaacggcagcuaccucaacgagacgcacuucuccgacgacaucgagcagcaggccgacaacaugaucaccgagaugcugcagaaggaguacauggagcgccagggcaagaccccgcuggggcucgucgaccuguucguguucagcaccuccuucuaccugaucagcaucuuccugcaccucgugaagaucccgacgcaccggcacaucgucggcaagcccugccccaagccccaccgccugaaccacauggggaucugcuccugcggccuguacaagcagccgggggugcccgugaaguggaagcggugaggacuagucccuguucccagagcccacuuuuuuuucuuuuuuugaaauaaaauagccugucuuucagaucucaaaggcucuuuucagagccaccaaaaaaaaaaaaaaaaaaaaaaaaaaaaaaaaaaaaaaaaaaaaaaaaaaaaaaaaaaaaaaaaaaaaaaaaaaaaaaaaaaaaaaaaaaaaaaaaaaaaa

SEQ ID NO: 35522 - RNA, 1767 nt, Artificial Sequence
  mRNA product Design a-2 (hSL-A100) comprising derived and/or modified sequence from LASV(LM776-SLE-2012;Clade IV)__AIT17824__GPCmut9 (opt1)
aggagaguccgcucagccagguugcagaagcggcuuagcguguguccuaaucuucucucugcguguagguaggccugugccgcaaacaagcuuaccaugggccagaucgugaccuucuuccaggaggucccccacgugaucgaggaggugaugaacaucguccugaucgcccucagcauccuggccgugcugaaggggcucuacaacuucgcgaccugcggccugguggggcuggucacguuccuccugcugugcggccgcuccugcaccaccagcguguacaaggggguguacgagcuccagacccuggagcugaacauggagacgcucaacaugaccaugccgcuguccugcaccaagaacaacagccaccacuacaucauggucggcaacgagaccggccuggagcucacgcugaccaacaccuccaucaucaaccacaaguucugcaaccugagcgacgcccacaagaagaaccucuacgaccacgcccugauguccaucaucagcaccuuccaccuguccauccccaacuucaaccaguacgaggccaugagcugcgacuucaacgggggcaagaucuccgugcaguacaaccucagccacuccuacgccggggacgcggccaaccacugcggcacgguggccaacgggguccugcagaccuucaugcggauggccuggggcggcagcuacaucgcgcuggacuccgggugcggcaagugggacugcaucaugaccagcuaccaguaccucaucauccagaacaccacgugggaggaccacugccaguucucccgccccagccccaucggguaccugggccugcucucccagcggacccgcgacaucuacaucagccggcgccugcugggcaccuucaccuggacgcucagcgacuccgaggggaaggacaccccgggcggguacugccugacccgguggaugcugaucgaggccgagcucaagugcuucggcaacaccgccguggccaagugcaacgagaagcacgacgaggaguucugcgacaugcugcgccuguucgacuucaacaagcaggccauccagcggcucaaggcggaggcccagaugagcauccagcugaucaacaaggccgugaacgcccugaucaacgaccagcucaucaugaagaaccaccuccgcgacaucaugugcauccccuacugcaacuacuccaaguacugguaccugaaccacacgaccaccggcaagaccagccugcccaagugcuggcuggucuccaacggcagcuaccugaacgagacgcacuucuccgacgacaucgagcagcaggccgacaacaugaucaccgagaugcuccagaaggaguacauggagcggcaggggaagacgccccugggccugguggaccucuucguguucagcaccuccuucuaccugaucagcaucuuccugcaccuggucaagaucccgacccaccgccacaucguggggaaguccugccccaagccccaccggcucaaccacaugggcaucugcagcugcgggcuguacaagcagcccggcgugccgguccgcuggaagcggugaggacuagucccuguucccagagcccacuuuuuuuucuuuuuuugaaauaaaauagccugucuuucagaucucaaaggcucuuuucagagccaccaaaaaaaaaaaaaaaaaaaaaaaaaaaaaaaaaaaaaaaaaaaaaaaaaaaaaaaaaaaaaaaaaaaaaaaaaaaaaaaaaaaaaaaaaaaaaaaaaaaaa

SEQ ID NO: 35523 - RNA, 1767 nt, Artificial Sequence
  mRNA product Design a-2 (hSL-A100) comprising derived and/or modified sequence from LASV(Mad39;Clade IV)__ANH09722__GPCmut9 (opt1)
aggagaguccgcucagccagguugcagaagcggcuuagcguguguccuaaucuucucucugcguguagguaggccugugccgcaaacaagcuuaccaugggccagaucgugaccuucuuccaggaggucccccacgugaucgaggaggugaugaacaucguccugaucgcccucagcauccuggccgugcugaaggggcucuacaacguggcgaccugcggccugaucgggcuggucacguuccuccugcugugcggccgcuccugcaccaccacccucuacaaggggguguacgagcugcaggcccuggagcucaacauggagacgcugaacaugaccaugccgcugagcugcaccaagaacaacucccaccacuacauccgggugggcaacgagaccggccucgagcugacgcugaccaacaccagccucaucaaccacaaguucugcaaccuguccgacgcccacaagaagaaccuguacgaccacgcccucaugagcaucaucuccaccuuccaccugagcauccccaacuucaaccaguacgaggccauguccugcgacuucaacgacgggaagaucagcguccaguacaaccugucccacacguacgcgggcgacaccgccaaccacugcgggaccguggccaacggcgugcuccagaccuucaugcgcauggccuggggcgggagcuacaucgcgcuggacuccggcugcgggggcugggacugcaucaugacgagcuaccaguaccugaucauccagaacaccaccugggaggaccacugccaguucucccggcccagccccaucggguaccucggccugcugucccagcggacccgcgacaucuacaucagccggcgccuccugggcacguucaccuggacccuguccgacagcgaggggaaggacaccccgggcggguacugccucacgcgguggaugcugaucgaggccgagcugaagugcuucggcaacaccgccgucgccaagugcaacgagaagcacgacgaggaguucugcgacaugcuccgccuguucgacuucaacaagcaggccauccagcggcugaaggcggaggcccagaugagcauccagcucaucaacaaggccgugaacgcccugaucaacgaccagcugaucaugaagaaccaccuccgcgacaucaugugcauccccuacugcaacuacuccaaguacugguaccugaaccacaccgugaccggcaagacgagccugcccaagugcuggcucgucuccaacggcagcuaccugaacgagacccacuucuccgacgacaucgagcagcaggccgacaacaugaucaccgagaugcugcagaaggaguacauggagcggcaggggaagacgccccucggccugguggaccuguucguguucagcaccuccuucuaccugaucagcaucuuccuccaccuggucaagaucccgacccaccgccacgugguggggaagcccugccccaagccccaccggcugaaccacaugggcaucugcuccugcggguucuacaagcagccgggcguccccgugcgcuggaagcggugaggacuagucccuguucccagagcccacuuuuuuuucuuuuuuugaaauaaaauagccugucuuucagaucucaaaggcucuuuucagagccaccaaaaaaaaaaaaaaaaaaaaaaaaaaaaaaaaaaaaaaaaaaaaaaaaaaaaaaaaaaaaaaaaaaaaaaaaaaaaaaaaaaaaaaaaaaaaaaaaaaaaa

SEQ ID NO: 35524 - RNA, 1767 nt, Artificial Sequence
  mRNA product Design a-2 (hSL-A100) comprising derived and/or modified sequence from LASV(Z0947-SLE-2011;Clade IV)__AIT17840__GPCmut9 (opt1)
aggagaguccgcucagccagguugcagaagcggcuuagcguguguccuaaucuucucucugcguguagguaggccugugccgcaaacaagcuuaccaugggccagaucgugaccuucuuccaggaggucccccacgugaucgaggaggugaugaacaucguccugaucgcccucagcauccuggccgugcugaaggggcucuacaacuucgcgaccugcggccugguggggcuggucacguuccuccugcugugcggccgcuccugcaccaucagccucuacaaggggguguacgagcugcagacccuggagcucaacauggagacccugaacaugacgaugccgcuguccugcaccaagaacaacagccaccacuacaucauggugggcaacgagaccggccucgagcugacccugacgaacaccuccaucaucaaccacaaguucugcaaccucagcgacgcccacaagaagaaccuguacgaccacgcccugauguccaucaucagcaccuuccaccucuccauccccaacuucaaccaguacgaggccaugagcugcgacuucaacgggggcaagaucuccguccaguacaaccugagccacuccuacgccggggacgcggccaaccacugcggcaccguggccaacggggugcugcagacguucaugcggauggccuggggcggcagcuacaucgcgcucgacuccgggugcgaccggugggacugcaucaugaccagcuaccaguaccugaucauccagaacaccaccugggaggaccacugccaguucucccgccccagccccaucggcuaccuggggcuccugucccagcggacgcgcgacaucuacaucagccggcgccugcucggcaccuucaccuggacccugagcgacuccgagggcaaggacacgcccgggggcuacugccugacccgguggaugcucaucgaggccgagcugaagugcuucgggaacaccgccgucgccaagugcaacgagaagcacgacgaggaguucugcgacaugcugcgccucuucgacuucaacaagcaggccauccagcggcugaaggcggaggcccagaugagcauccagcugaucaacaaggccgugaacgcccucaucaacgaccagcugaucaugaagaaccaccuccgcgacaucaugugcauccccuacugcaacuacuccaaguacugguaccugaaccacaccacgaccgggaagaccagccugcccaagugcuggcugguguccaacggcagcuaccucaacgagacccacuucuccgacgacaucgagcagcaggccgacaacaugaucacggagaugcugcagaaggaguacauggagcggcagggcaagaccccgcuggggcucgucgaccuguucguguucagcaccuccuucuaccugaucagcaucuuccugcaccucgugaagaucccgacccaccgccacaucgucggcaagcccugccccaagccccaccggcugaaccacauggggaucugcuccugcggccuguacaagcagccgggggugcccgugaaguggaagcgcugaggacuagucccuguucccagagcccacuuuuuuuucuuuuuuugaaauaaaauagccugucuuucagaucucaaaggcucuuuucagagccaccaaaaaaaaaaaaaaaaaaaaaaaaaaaaaaaaaaaaaaaaaaaaaaaaaaaaaaaaaaaaaaaaaaaaaaaaaaaaaaaaaaaaaaaaaaaaaaaaaaaaa

SEQ ID NO: 35525 - RNA, 1767 nt, Artificial Sequence
  mRNA product Design a-2 (hSL-A100) comprising derived and/or modified sequence from LASV(Josiah;Clade IV)__NP_694870__GPCmut9 (opt1)
aggagaguccgcucagccagguugcagaagcggcuuagcguguguccuaaucuucucucugcguguagguaggccugugccgcaaacaagcuuaccaugggccagaucgugaccuucuuccaggaggucccccacgugaucgaggaggugaugaacaucguccugaucgcccucagcgugcuggccgugcugaaggggcucuacaacuucgcgaccugcggccuggucgggcuggugacguuccuccugcugugcggccgcuccugcaccaccagccucuacaaggggguguacgagcugcagacccuggagcucaacauggagacgcugaacaugaccaugccgcuguccugcaccaagaacaacagccaccacuacaucauggucggcaacgagaccggccucgagcugacgcugaccaacaccuccaucaucaaccacaaguucugcaaccucagcgacgcccacaagaagaaccuguacgaccacgcccugauguccaucaucagcaccuuccaccucuccauccccaacuucaaccaguacgaggccaugagcugcgacuucaacgggggcaagaucuccgugcaguacaaccugagccacuccuacgccggggacgcggccaaccacugcggcacgguggccaacgggguccugcagaccuucaugcggauggccuggggcggcagcuacaucgcgcucgacuccgggugcggcaacugggacugcaucaugaccagcuaccaguaccugaucauccagaacaccacgugggaggaccacugccaguucucccgccccagccccaucggguaccugggccuccugucccagcggacccgcgacaucuacaucagccggcgccugcucggcaccuucaccuggacgcugagcgacuccgaggggaaggacaccccgggcggguacugccugacccgguggaugcucaucgaggccgagcugaagugcuucggcaacaccgccguggccaagugcaacgagaagcacgacgaggaguucugcgacaugcugcgccucuucgacuucaacaagcaggccauccagcggcugaaggcggaggcccagaugagcauccagcugaucaacaaggccgugaacgcccucaucaacgaccagcugaucaugaagaaccaccuccgcgacaucaugugcauccccuacugcaacuacuccaaguacugguaccugaaccacacgaccaccgggcggaccagccugcccaagugcuggcuggucuccaacggcagcuaccucaacgagacgcacuucuccgacgacaucgagcagcaggccgacaacaugaucaccgagaugcugcagaaggaguacauggagcgccagggcaagacgccccuggggcugguggaccucuucguguucagcaccuccuucuaccugaucagcaucuuccugcaccucgucaagaucccgacccaccggcacaucgugggcaaguccugccccaagccccaccgccugaaccacauggggaucugcagcugcggccuguacaagcagcccggggugccggucaaguggaagcggugaggacuagucccuguucccagagcccacuuuuuuuucuuuuuuugaaauaaaauagccugucuuucagaucucaaaggcucuuuucagagccaccaaaaaaaaaaaaaaaaaaaaaaaaaaaaaaaaaaaaaaaaaaaaaaaaaaaaaaaaaaaaaaaaaaaaaaaaaaaaaaaaaaaaaaaaaaaaaaaaaaaaa

SEQ ID NO: 35526 - RNA, 1764 nt, Artificial Sequence
  mRNA product Design a-2 (hSL-A100) comprising derived and/or modified sequence from LASV(LP;Clade I)__AAF86701__GPCmut9 (opt1)
aggagaguccgcucagccagguugcagaagcggcuuagcguguguccuaaucuucucucugcguguagguaggccugugccgcaaacaagcuuaccaugggccagaucaucaccuucuuccaggaggugccccacgucaucgaggaggugaugaacaucgugcugaucgcccucagccugcuggccauccucaaggggcuguacaacaucgcgaccugcggcaucaucgggcuggucgccuuccucuuccugugcggcaaguccugcagccugacgcucaagggcggguacgagcugcagacccuggagcucaacauggagacccugaacaugaccaugccgcuguccugcacgaagaacagcucccaccacuacauccgcgugggcaacgagaccgggcucgagcugacccugaccaacacgagcaucaucaaccacaaguucugcaaccucuccgacgcccacaagaagaaccuguacgaccacgcccugaugagcaucaucuccaccuuccaccucagcauccccaacuucaaccaguacgaggccauguccugcgacuucaacggcgggaagaucagcgugcaguacaaccugucccacagcuacgcgggcgacgccgccgagcacugcgggaccgucgccaacggcgugcugcagaccuucaugcggauggcguggggcgggcgcuacaucgcccucgacuccggcugcgggaacugggacugcaucaugacgagcuaccaguaccugaucauccagaacaccaccugggaggaccacugccaguucucccggcccagccccaucggcuaccugggccuccugucccagcgcacccgggacaucuacaucagccgccggcugcucgggacguucaccuggacccugagcgacuccgagggcaacgagacccccgggggcuacugccugacgcgcuggaugcucaucgaggccgagcugaagugcuucgggaacaccgccguggccaagugcaacgagaagcacgacgaggaguucugcgacaugcugcggcuguucgacuucaacaagcaggcgauccgccggcugaaggccgaggcccagaugagcauccagcugaucaacaaggccgucaacgcccucaucaacgaccagcugaucaugaagaaccaccuccgcgacaucaugugcauccccuacugcaacuacuccaaguacugguaccucaaccacaccagcuccggccggaccagccugcccaagugcuggcugaucuccaacggcagcuaccucaacgagacgcaguucuccgacgacaucgagcagcaggcggacaacaugaucaccgagaugcugcagaaggaguacaucgagcgccaggggaagaccccgcugggccugguggacaucuucaucuucagcaccuccuucuaccucaucagcaucuuccugcaccugaucaagaucccgacgcaccggcacaucguggggaagcccugccccaagccccaccgccucaaccacaugggcgucugcuccugcgggcuguacaagcacccgggcgugcccaccaaguggaagcggugaggacuagucccuguucccagagcccacuuuuuuuucuuuuuuugaaauaaaauagccugucuuucagaucucaaaggcucuuuucagagccaccaaaaaaaaaaaaaaaaaaaaaaaaaaaaaaaaaaaaaaaaaaaaaaaaaaaaaaaaaaaaaaaaaaaaaaaaaaaaaaaaaaaaaaaaaaaaaaaaaaaaa

SEQ ID NO: 35527 - RNA, 1764 nt, Artificial Sequence
  mRNA product Design a-2 (hSL-A100) comprising derived and/or modified sequence from LASV(803213;Clade II)__AAF86703__GPCmut9 (opt1)
aggagaguccgcucagccagguugcagaagcggcuuagcguguguccuaaucuucucucugcguguagguaggccugugccgcaaacaagcuuaccaugggccagaucaucaccuucuuccaggaggugccccacgucaucgaggaggugaugaacaucgugcugaucgcccucagccugcuggccauccucaaggggaucuacaacgucgcgaccugcggccuguucgggcugaucuccuuccuccugcugugcggccgcagcugcuccgugacguacaaggggguguacgagcuccagacccuggagcugaacauggccaaccucaacaugaccaugccgcugagcugcaccaagaacaacucccaccacuacaucauggucggcaacgagacgggccuggagcucacccugaccaacaccagcaucaucaaccacaaguucugcaaccuguccgacgcccacaagaagaaccucuacgaccacgcccugaugagcaucaucuccacguuccaccugagcauccccaacuucaaccaguacgaggccauguccugcgacuucaacgggggcaagaucagcgugcaguacaaccucucccacagcuucgcgguggacgccgccaaccacugcgggaccaucgccaacggcguccugcagaccuucaugcggauggcguggggcggguccuacaucgcccuggacagcggcugcgggaacugggacugcaucaugaccuccuaccaguaccucaucauccagaacacgaccugggaggaccacugccaguucagccgccccucccccaucggcuaccuggggcugcucagccagcggacccgcgacaucuacaucagccggcgccugcugggcaccuucacguggacccucuccgacagcgagggcaacgaggcccccgggggcuacugccugacccgguggaugcugaucgaggccgagcucaagugcuucgggaacaccgccguggcgaagugcaacgagaagcacgacgaggaguucugcgacaugcugcgccuguucgacuucaacaagcaggccaucaagcggcucaagacggaggcccagauguccauccagcugaucaacaaggccgugaacgcccugaucaacgaccagcucaucaugaagaaccaccuccgcgacaucaugugcauccccuacugcaacuacagccgguacugguaccugaaccacaccgucaccggcaagaccucccugccccgcugcuggcuggugagcaacggguccuaccugaacgagacgcacuucagcgacgacaucgagcagcaggcggacaacaugaucaccgagaugcuccagaaggaguacauggaccggcagggcaagaccccgcugggccugguggaccuguucgucuucuccaccagcuucuaccucaucuccaucuuccugcaccuggugaagaucccgacgcaccgccacaucguggggaagcccugccccaagccccaccggcucaaccacaugggcaucugcagcugcgggcuguacaagcacccgggcguccccgugaaguggaagcgcugaggacuagucccuguucccagagcccacuuuuuuuucuuuuuuugaaauaaaauagccugucuuucagaucucaaaggcucuuuucagagccaccaaaaaaaaaaaaaaaaaaaaaaaaaaaaaaaaaaaaaaaaaaaaaaaaaaaaaaaaaaaaaaaaaaaaaaaaaaaaaaaaaaaaaaaaaaaaaaaaaaaaa

SEQ ID NO: 35528 - RNA, 1764 nt, Artificial Sequence
  mRNA product Design a-2 (hSL-A100) comprising derived and/or modified sequence from LASV(GA391;Clade III)__CAA36645__GPCmut9 (opt1)
aggagaguccgcucagccagguugcagaagcggcuuagcguguguccuaaucuucucucugcguguagguaggccugugccgcaaacaagcuuaccaugggccagaucgugaccuucuuccaggaggucccccacgugaucgaggaggugaugaacaucguccugaucgcccucagcauccuggccauccugaaggggcucuacaacguggcgaccugcggccugaucgggcuggugacguuccuccugcuguccggccgcagcugcucccucaucuacaaggggaccuacgagcugcagacccuggagcucaacauggagacccugaacaugacgaugccgcugagcugcaccaagaacaacucccaccacuacauccgggucggcaacgagaccggccucgagcugacccugacgaacaccagcauccucaaccacaaguucugcaaccuguccgacgcccacaagcgcaaccuguacgaccacagccucauguccaucaucagcaccuuccaccuguccauccccaacuucaaccaguacgaggccaugagcugcgacuucaacgggggcaagaucaccgugcaguacaaccugucccacagcuucgccguggacgccgcggggcacugcggcacgcucgccaacgggguccugcagaccuucaugcggauggccuggggcggcuccuacaucgcccuggacagcgggugcggcaacugggacugcaucaugaccuccuaccaguaccucaucauccagaacaccacgugggacgaccacugccaguucagccgccccucccccaucggguaccugggccugcucagccagcggacccgcgacaucuacaucagccggcgccugcugggcaccuucaccuggacgcucuccgacagcgaggggaacgagaccccgggcggguacugccugacccgguggaugcugaucgaggcggagcucaagugcuucggcaacaccgccguggccaagugcaacgagaagcacgacgaggaguucugcgacaugcugcgccuguucgacuucaacaagcaggccauccggcgccucaagacggaggcccagauguccauccagcugaucaacaaggcggugaacgcccugaucaacgaccagcucaucaugaagaaccaccuccgggacaucaugugcauccccuacugcaacuacagccgcuacugguaccugaaccacaccuccaccgggaagaccagccugccccggugcuggcugaucuccaacggcagcuaccugaacgagacgaaguucuccgacgacaucgagcagcaggccgacaacaugaucaccgagaugcugcagaaggaguacaucgaccgccagggcaagacgccccucgggcuggucgaccuguucguguucagcaccuccuucuaccucaucagcaucuuccugcaccuggugaagaucccgacccaccggcacaucgucggcaagcccugccccaagccccaccgccucaaccacauggggaucugcuccugcggccuguacaagcagccgggggugcccgugcgguggaagcgcugaggacuagucccuguucccagagcccacuuuuuuuucuuuuuuugaaauaaaauagccugucuuucagaucucaaaggcucuuuucagagccaccaaaaaaaaaaaaaaaaaaaaaaaaaaaaaaaaaaaaaaaaaaaaaaaaaaaaaaaaaaaaaaaaaaaaaaaaaaaaaaaaaaaaaaaaaaaaaaaaaaaaa

SEQ ID NO: 35529 - RNA, 1767 nt, Artificial Sequence
  mRNA product Design a-2 (hSL-A100) comprising derived and/or modified sequence from LASV(AV;Clade V)__CCA30314__GPCmut9 (opt1)
aggagaguccgcucagccagguugcagaagcggcuuagcguguguccuaaucuucucucugcguguagguaggccugugccgcaaacaagcuuaccaugggccagaucgugaccuucuuccaggaggucccccacgugaucgaggaggugaugaacaucguccugaucgcccucagcauccuggccgugcugaaggggcucuacaacaucgcgaccugcggccugaucgggcugaucacguuccuccugcugugcggccgcuccugcagcuccaaccucuacaaggggguguacgagcugcagagccuggaccucaacauggagacccugaacaugaccaugccgcuguccugcaccaagaacaacagccaccacuacauccgggucggcaacgacacgggccucgagcugacccugaccaacaccuccauccucaaccacaaguucugcaaccugagcgacgcccacaagaaggaccuguacgaccacgcccucauguccaucaucagcacguuccaccuguccauccccaacuucaaccaguacgaggccaugagcugcgacuucaacgggggcaagaucuccgugcaguacaaccugagccacuccuacgccaucgacgcggccaaccacugcgggaccguggccaacggcauccuccagaccuucaugcgcauggccuggggcgggagcuacaucgcgcuggacuccggcugcgggaacugggacugcaucaugaccagcuaccaguaccugaucauccagaacacgaccugggagaaccacugccaguucucccggcccagccccaucggcuaccucgggcugcugagccagcgcacccgggacaucuacaucucccgccggcuccugggcaccuucacguggacccugagcgacuccgagggcaacgccacccccgggggcuacugccucacccgcuggaugcugaucgaggccgagcugaagugcuucgggaacacggccgucgccaagugcaacgagaagcacgacgaggaguucugcgacaugcuccggcuguucgacuucaacaagcaggcgaucagccgccugaaguccgaggcccagaugagcauccagcucaucaacaaggccgugaacgcccugaucaacgaccagcugaucaugaagaaccaccuccgggacaucaugugcauccccuacugcaacuacuccaaguacugguaccugaaccacaccaucaccggcaagaccagccugcccaagugcuggcucguguccaacgggagcuaccugaacgagacgcacuucuccgacgacaucgagcagcaggccgacaacaugaucaccgagaugcugcagaaggaguacauggagcgccagggcaagaccccgcugggccucgucgaccuguucguguucagcaccuccuucuaccugaucagcaucuuccuccggcuggugaagaucccgacgcaccgccacaucgucgggaagcccugccccaagccccaccggcugaaccacaugggcaucugcuccugcgggcucuacaagcagccgggcgugcccgugcgcuggaagcggugaggacuagucccuguucccagagcccacuuuuuuuucuuuuuuugaaauaaaauagccugucuuucagaucucaaaggcucuuuucagagccaccaaaaaaaaaaaaaaaaaaaaaaaaaaaaaaaaaaaaaaaaaaaaaaaaaaaaaaaaaaaaaaaaaaaaaaaaaaaaaaaaaaaaaaaaaaaaaaaaaaaaa

SEQ ID NO: 35530 - RNA, 1764 nt, Artificial Sequence
  mRNA product Design a-2 (hSL-A100) comprising derived and/or modified sequence from LASV(Togo/2016/7082;Clade VI)__AMR44577__GPCmut9 (opt1)
aggagaguccgcucagccagguugcagaagcggcuuagcguguguccuaaucuucucucugcguguagguaggccugugccgcaaacaagcuuaccaugggccagaucaucaccuucuuccaggaggugccccacgucaucgaggaggugaugaacaucgugcugaucgcccucagccugcuggccauccucaagggggucuacaacguggcgaccugcggcaucaucgggcuggugacguuccuguuccucugcggccgcuccugcagccugaucuacaagggguccuacgagcugcagacccucgagcugaacauggagacccugaacaugaccaugccgcucagcugcacgaagaacuccagccaccacuacauccgggucggcaacgagaccggccuggagcugacccucaccaacacguccaucaucaaccacaaguucugcaaccugagcgacgcccacaagcgcaaccuguacgaccacgcccucauguccauccugagcaccuuccaccuguccauccccaacuucaaccaguacgaggccaugagcugcgacuucaacgggggcaagaucuccgugcaguacaaccucagccacgccuacgcgguggacgccgccgagcacugcgggaccgucgccaacggcgugcugcagaccuucaugcggauggcguggggcggguccuacaucgcccuggacagcggcugcgggaacugggacugcaucaugacguccuaccaguaccucaucauccagaacaccaccugggaggaccacugccaguucagccgccccucccccaucggcuaccuggggcugcucagccagcggacccgcgacaucuacaucagccggcgccugcugggcacguucaccuggacccucuccgacagcgagggcaacgagacccccgggggcuacugccugacgcgguggaugcugaucgaggccgagcucaagugcuucgggaacaccgccguggccaagugcaacgagaagcacgacgaggaguucugcgacaugcugcgccuguucgacuucaacaagcaggcgauccagcggcucaaguccgaggcccagaugagcauccagcugaucaacaaggccgucaacgcccugaucaacgaccagcucaucaugaagaaccaccuccgcgacaugaugugcauccccuacugcaacuacuccaaguacugguaccugaaccacaccagcuccggccggaccagccugcccaagugcuggcugguguccaacgggagcuaccugaacgagacgcacuucuccgacgacaucgagcagcaggccgacaacaugaucaccgagaugcuccagaaggaguacaucgaccgccagggcaagaccccgcugggccugguggaccuguucgucuucagcaccuccuucuaccucaucagcaucuuccugcaccugaucaagaucccgacgcaccggcacaucguggggaagcccugccccaagccccaccgccucaaccacaugggcaucugcuccugcgggcuguacaagcagccgggcgugcccacccgguggaagcgcugaggacuagucccuguucccagagcccacuuuuuuuucuuuuuuugaaauaaaauagccugucuuucagaucucaaaggcucuuuucagagccaccaaaaaaaaaaaaaaaaaaaaaaaaaaaaaaaaaaaaaaaaaaaaaaaaaaaaaaaaaaaaaaaaaaaaaaaaaaaaaaaaaaaaaaaaaaaaaaaaaaaaa

SEQ ID NO: 35531 - RNA, 1764 nt, Artificial Sequence
  mRNA product Design a-2 (hSL-A100) comprising derived and/or modified sequence from LASV(KAK-428;Clade n.d. (VII))__ANH09740__GPCmut9 (opt1)
aggagaguccgcucagccagguugcagaagcggcuuagcguguguccuaaucuucucucugcguguagguaggccugugccgcaaacaagcuuaccaugggccagaucgugaccuucuuccaggaggucccccacgugaucgaggaggugaugaacaucguccugaucgcccucagccugcuggccauccucaaggggcuguacaacuucgcgaccugcggcgugaucgggcugaucacguuccuccugcugugcggccgcuccugcagcgccaccuacaaggggcaguacgagcuccagacccuggagcugaacauggagucccucaacaugaccaugccgcugagcugcacgaagaacaacucccaccacuacauccgggccggcaacaacaccggccuggagcucacccugaccaacacgagcaucaucucccacaaguucugcaaccugagcgacgcccacaagaagaaccucuacgaccacacccugauguccaucaucaccaccuuccaccugagcauccccaacuucaaccaguacgaggccauguccugcgacuucaacgggggcaagaucagcauccaguacaaccucucccacagcuacgcgggggacgccgcccagcacugcggcacgguggccaacgggguccugcagaccuucaugcgcauggcguggggcggcuccuaccuggcccucgacagcgggugccggggcugggacugcaucaucuccagcuaccaguaccugaucauccagaacaccaccugggacgaccacugccaguucucccgccccagccccaucggguaccugggcuucgugagccagaagacgcgggacaucuacaucucccgccggcuccugggcaccuucaccuggacccugagcgacuccgaggggcacgacaugccgggcggguacugccucacgcgcuggaugcugaucgaggccgaccugaagugcuucggcaacaccgccguggccaagugcaacgagaagcacgacgaggaguucugcgacauguggcggcuguucgacuucaacaagcaggcgauccagcgccugaaggccgaggcccagaugaacauccagcugaucaacaaggccgucaacgcccucaucaacgaccagcugaugaugaagaaccaccuccgggacaucaugugcauccccuacugcaacuacagcaaguucugguaccucaacaacaccaccacggggcgcaccucccugccccggugcuggcugaucagcaacggcuccuaccucaacgagacccacuucagcgacgacaucgagcagcaggcggacaacaugaucaccgagaugcugcagaaggaguacauggaccgccagggcaagacgccccuggggcucguggaccuguucguguucuccaccagcuucuaccugaucaccaucuuccugcaccucgucaagaucccgacccaccggcacaucgugggcaagcccugccccaagccccaccgccugaaccacauggggaucugcuccugcggccuguacaagcagccgggggugcccguccgguggaagcgcugaggacuagucccuguucccagagcccacuuuuuuuucuuuuuuugaaauaaaauagccugucuuucagaucucaaaggcucuuuucagagccaccaaaaaaaaaaaaaaaaaaaaaaaaaaaaaaaaaaaaaaaaaaaaaaaaaaaaaaaaaaaaaaaaaaaaaaaaaaaaaaaaaaaaaaaaaaaaaaaaaaaaa

SEQ ID NO: 35532 - RNA, 1764 nt, Artificial Sequence; identical to SEQ ID NO: 35526
  mRNA product Design a-2 (hSL-A100) comprising derived and/or modified sequence from LASV(Pinneo-NIG-1969;Clade I)__AIT17836__GPCmut9 (opt1)

SEQ ID NO: 35533 - RNA, 1764 nt, Artificial Sequence
  mRNA product Design a-2 (hSL-A100) comprising derived and/or modified sequence from LASV(ISTH0009-NIG-2011;Clade II)__AIT17404__GPCmut9 (opt1)
aggagaguccgcucagccagguugcagaagcggcuuagcguguguccuaaucuucucucugcguguagguaggccugugccgcaaacaagcuuaccaugggccagaucaucaccuucuuccaggaggugccccacgucaucgaggaggugaugaacaucgugcugaucgcccucagccugcuggccauccucaaggggaucuacaacgucgcgaccugcggccuguucgggcugguguccuuccuccugcugugcggccgcagcugcuccacgaccuacaaggggguguacgagcuccagacccuggagcuggacauggccagccucaacaugaccaugccgcuguccugcacgaagaacaacagccaccacuacaucauggucggcaacgagaccggccuggagcucacccugaccaacacguccaucaucaaccacaaguucugcaaccugagcgacgcccacaagaagaaccucuacgaccacgcccugauguccaucaucagcaccuuccaccuguccauccccaacuucaaccaguacgaggccaugagcugcgacuucaacgggggcaagaucuccgugcaguacaaccucagccacgcguacgccguggacgccgccaaccacugcgggaccaucgcgaacggcguccugcagaccuucaugcggauggccuggggcggguccuacaucgcccuggacagcggcugcggguccugggacugcaucaugacgagcuaccaguaccucaucauccagaacaccaccugggaggaccacugccaguucucccgccccagccccaucggcuaccuggggcugcucagccagcggacccgcgacaucuacaucucccggcgccugcugggcacguucaccuggacccucagcgacuccgagggcaacgagacccccgggggcuacugccugacgcgguggaugcugaucgaggccgagcucaagugcuucgggaacaccgccguggcgaagugcaacgagaagcacgacgaggaguucugcgacaugcugcgccuguucgacuucaacaagcaggccauccggcgccucaagaccgaggcccagaugagcauccagcugaucaacaaggccgugaacgcccugaucaacgaccagcucaucaugaagaaccaccuccgggacaucaugugcaucccguacugcaacuacuccaaguacugguaccugaaccacaccgucacgggcaagaccagccugccccgcugcuggcugguguccaacgggagcuaccugaacgagacccacuucuccgacgacaucgagcagcaggcggacaacaugaucaccgagcuccugcagaaggaguacauggaccggcagggcaagacgccccugggccugguggaccucuucgucuucagcaccuccuucuaccugaucagcaucuuccugcaccucaucaagaucccgacccaccgccacaucaccgggaagcccugccccaagccccaccggcugaaccacaugggcaucugcuccugcgggcuguacaagcacccgggcgugcccgugaaguggaagcgcugaggacuagucccuguucccagagcccacuuuuuuuucuuuuuuugaaauaaaauagccugucuuucagaucucaaaggcucuuuucagagccaccaaaaaaaaaaaaaaaaaaaaaaaaaaaaaaaaaaaaaaaaaaaaaaaaaaaaaaaaaaaaaaaaaaaaaaaaaaaaaaaaaaaaaaaaaaaaaaaaaaaaa

SEQ ID NO: 35534 - RNA, 1764 nt, Artificial Sequence
  mRNA product Design a-2 (hSL-A100) comprising derived and/or modified sequence from LASV(ISTH2010-NIG-2012;Clade II)__AIT17482__GPCmut9 (opt1)
aggagaguccgcucagccagguugcagaagcggcuuagcguguguccuaaucuucucucugcguguagguaggccugugccgcaaacaagcuuaccaugggccagaucaucaccuucuuccaggaggugccccacgucaucgaggaggugaugaacaucgugcugaucgcccucagccugcuggccauccucaaggggaucuacaacgucgcgaccugcggccuguucgggcugguguccuuccuccugcugugcggccgcagcugcuccacgaccuacaaggggguguacgagcuccagacccuggagcuggacauggccagccucaacaugaccaugccgcuguccugcacgaagaacaacagccaccacuacaucauggucggcaacgagaccggccuggagcucacccugaccaacacguccaucaucaaccacaaguucugcaaccugagcgacgcccacaagaagaaccucuacgaccacgcccugauguccaucaucagcaccuuccaccuguccauccccaacuucaaccaguacgaggccaugagcugcgacuucaacgggggcaagaucuccgugcaguacaaccucagccacgcguacgccguggacgccgccaaccacugcgggaccaucgcgaacggcguccugcagaccuucaugcggauggccuggggcggguccuacaucgcccuggacagcggcugcggguccugggacugcaucaugacgagcuaccaguaccucaucauccagaacaucaccugggaggaccacugccaguucucccgccccagccccaucggcuaccuggggcugcucagccagcggacccgcgacaucuacaucucccggcgccugcugggcaccuucacguggacccucagcgacuccgagggcaacgagacccccgggggcuacugccugacccgguggaugcugaucgaggccgagcucaagugcuucgggaacacggccguggcgaagugcaacgagaagcacgacgaggaguucugcgacaugcugcgccuguucgacuucaacaagcaggccauccggcgccucaagaccgaggcccagaugagcauccagcugaucaacaaggccgugaacgcccugaucaacgaccagcucaucaugaagaaccaccuccgggacaucaugugcauccccuacugcaacuacuccaaguacugguaccugaaccacaccgucaccggcaagacgagccugccccgcugcuggcugguguccaacgggagcuaccugaacgagacccacuucuccgacgacaucgagcagcaggcggacaacaugaucaccgagcuccugcagaaggaguacaucgaccggcagggcaagaccccgcugggccugguggaccucuucgucuucagcacguccuucuaccugaucagcaucuuccugcaccucgugaagaucccgacccaccgccacguggucgggaagcccugccccaagccccaccggcugaaccacaugggcaucugcuccugcgggcuguacaagcacccgggcgugcccgugaaguggaagcgcugaggacuagucccuguucccagagcccacuuuuuuuucuuuuuuugaaauaaaauagccugucuuucagaucucaaaggcucuuuucagagccaccaaaaaaaaaaaaaaaaaaaaaaaaaaaaaaaaaaaaaaaaaaaaaaaaaaaaaaaaaaaaaaaaaaaaaaaaaaaaaaaaaaaaaaaaaaaaaaaaaaaaa

SEQ ID NO: 35535 - RNA, 1764 nt, Artificial Sequence
  mRNA product Design a-2 (hSL-A100) comprising derived and/or modified sequence from LASV(Lassa virus/H.sapiens-wt/NGA/2015/ISTH_0543;Clade II)__AVO03639__GPCmut9 (opt1)
aggagaguccgcucagccagguugcagaagcggcuuagcguguguccuaaucuucucucugcguguagguaggccugugccgcaaacaagcuuaccaugggccagaucaucaccuucuuccaggaggugccccacgucaucgaggaggugaugaacaucgugcugaucgcccucagccugcuggccauccucaaggggaucuacaacgucgcgaccugcggccuguucgggcugguguccuuccuccugcugugcggccgcagcugcuccacgaccuacaaggggguguacgagcuccagacccuggagcuggacauggccaaccucaacaugaccaugccgcugagcugcacgaagaacaacucccaccacuacaucauggucggcaacgagaccggccuggagcucacccugaccaacacgagcaucaucaaccacaaguucugcaaccuguccgacgcccacaagaagaaccucuacgaccacgcccugaugagcaucaucuccaccuuccaccugagcauccccaacuucaaccaguacgaggccauguccugcgacuucaacgggggcaagaucagcgugcaguacaaccucucccacaccuacgcgguggacgccgccaaccacugcgggaccaucgccaacggcguccugcagacguucaugcggauggcguggggcgggagcuacaucgcccuggacuccggcugcgggagcugggacugcaucaugaccuccuaccaguaccucgugauccagaacaccaccugggaggaccacugccaguucagccgccccucccccaucggcuaccuggggcugcucagccagcggacgcgcgacaucuacaucagccggcgccugcugggcaccuucaccuggacccucuccgacagcgagggcaacgagacgcccgggggcuacugccugacccgguggaugcugaucgaggccgagcucaagugcuucgggaacaccgccguggccaagugcaacgagaagcacgacgaggaguucugcgacaugcugcgccuguucgacuucaacaagcaggcgauccggcgccucaagaccgaggcccagauguccauccagcugaucaacaaggccgucaacgcccugaucaacgaccagcucaucaugaagaaccaccuccgggacaucaugugcauccccuacugcaacuacagcaaguacugguaccugaaccacacggugaccggcaagaccucccugccccgcugcuggcuggugagcaacggguccuaccugaacgagacccacuucagcgacgacaucgagcagcaggccgacaacaugaucacggagcuccugcagaaggaguacaucgaccggcagggcaagaccccgcugggccuggucgaccucuucguguucuccaccagcuucuaccugaucuccaucuuccugcaccucgugaagaucccgacccaccgccacaucacggggaagcccugccccaagccccaccggcugaaccacaugggcaucugcagcugcgggcuguacaagcacccgggcguccccgugaaguggaagcgcugaggacuagucccuguucccagagcccacuuuuuuuucuuuuuuugaaauaaaauagccugucuuucagaucucaaaggcucuuuucagagccaccaaaaaaaaaaaaaaaaaaaaaaaaaaaaaaaaaaaaaaaaaaaaaaaaaaaaaaaaaaaaaaaaaaaaaaaaaaaaaaaaaaaaaaaaaaaaaaaaaaaaa

SEQ ID NO: 35536 - RNA, 1764 nt, Artificial Sequence
  mRNA product Design a-2 (hSL-A100) comprising derived and/or modified sequence from LASV(Lassa virus/H.sapiens-wt/NGA/2016/ISTH_0009;Clade II)__AVO03571__GPCmut9 (opt1)
aggagaguccgcucagccagguugcagaagcggcuuagcguguguccuaaucuucucucugcguguagguaggccugugccgcaaacaagcuuaccaugggccagaucaucaccuucuuccaggaggugccccacgucaucgaggaggugaugaacaucgugcugaucgcccucagccugcuggccauccucaaggggaucuacaacgucgcgaccugcggccugcuggggcucguguccuuccugcugcucugcggccgcagcugcuccacgaccuacaaggggguguacgagcugcagacccuggagcucgacauggccagccugaacaugaccaugccgcuguccugcacgaagaacaacagccaccacuacaucauggucggcaacgagaccggccucgagcugacccugaccaacacguccaucaucaaccacaaguucugcaaccucagcgacgcccacaagaagaaccuguacgaccacgcccugauguccaucaucagcaccuuccaccucuccauccccaacuucaaccaguacgaggccaugagcugcgacuucaacgggggccggaucuccgugcaguacaaccugagccacuccuacgcgguggacgccgccaaccacugcgggaccaucgccaacggcguccugcagaccuucaugcgcauggcguggggcgggagcuacaucgcccucgacuccggcugcgggagcugggacugcaucaugacguccuaccaguaccugaucauccagaacaccaccugggaggaccacugccaguucagccggcccagccccaucggcuaccuggggcuccugucccagcgcacccgggacaucuacaucagccgccggcugcucggcacguucaccuggacccuguccgacagcgagggcaacgagacccccgggggcuacugccugacgcgcuggaugcucaucgaggccgagcugaagugcuucgggaacaccgccguggccaagugcaacgagaagcacgacgaggaguucugcgacaugcugcggcuguucgacuucaacaagcaggcgauccgccggcugaagaccgaggcccagauguccauccagcugaucaacaaggccgugaacgcccucaucaacgaccagcugaucaugaagaaccaccuccgcgacaucaugugcaucccguacugcaacuacagcaaguacugguaccucaaccacaccgucacgggcaagaccucccugccccggugcuggcuggugagcaacggguccuaccucaacgagacccacuucagcgacgacaucgagcagcaggccgacaacaugaucaccgagcugcugcagaaggaguacaucgaccgccagggcaagacgccccugggccucguggaccuguucgucuucuccaccagcuucuaccugaucuccaucuuccuccaccuggugaagaucccgacccaccggcacaucaccgggaagcccugccccaagccccaccgccugaaccacaugggcaucugcagcugcgggcucuacaaccacccgggcgugcccgucaaguggaagcggugaggacuagucccuguucccagagcccacuuuuuuuucuuuuuuugaaauaaaauagccugucuuucagaucucaaaggcucuuuucagagccaccaaaaaaaaaaaaaaaaaaaaaaaaaaaaaaaaaaaaaaaaaaaaaaaaaaaaaaaaaaaaaaaaaaaaaaaaaaaaaaaaaaaaaaaaaaaaaaaaaaaaa

SEQ ID NO: 35537 - RNA, 1764 nt, Artificial Sequence
  mRNA product Design a-2 (hSL-A100) comprising derived and/or modified sequence from LASV(Lassa virus/H.sapiens-wt/NGA/2016/ISTH_0017;Clade II)__AVO03567__GPCmut9 (opt1)
aggagaguccgcucagccagguugcagaagcggcuuagcguguguccuaaucuucucucugcguguagguaggccugugccgcaaacaagcuuaccaugggccagaucaucaccuucuuccaggaggugccccacgucaucgaggaggugaugaacaucgugcugaucgcccucagccugcuggccauccucaaggggaucuacaacgucgcgaccugcggccuguucgggcugguguccuuccuccugcugugcggccgcagcugcuccacgaccuacaaggggguguacgagcuccagacccuggagcuggacauggccagccucaacaugaccaugccgcuguccugcacgaagaacaacagccaccacuacaucauggucggcaacgagaccggccuggagcucacccugaccaacacguccaucaucaaccacaaguucugcaaccugagcgacgcccacaagaagaaccucuacgaccacgcccugauguccaucaucagcaccuuccaccuguccauccccaacuucaaccaguacgaggccaugagcugcgacuucaacgggggcaagaucuccgugcaguacaaccucagccacaccuacgcgaucgacgccgccaaccacugcgggaccaucgccaacggcgugcugcagacguucaugcggauggcguggggcggguccuacaucgcccuggacagcggcugcggguccugggacugcaucaugaccagcuaccaguaccucaucauccagaacaccaccugggaggaccacugccaguucucccgccccagccccaucggcuaccuggggcugcucagccagcggacgcgcgacaucuacaucucccggcgccugcugggcaccuucaccuggacccucagcgacuccgagggcaacgagacgcccgggggcuacugccugacccgguggaugcugaucgaggccgagcucaagugcuucgggaacaccgccgucgccaagugcaacgagaagcacgacgaggaguucugcgacaugcugcgccuguucgacuucaacaagcaggcgauccggcgccucaagaccgaggcccagaugagcauccagcugaucaacaaggccgugaacgcccugaucaacgaccagcucaucaugaagaaccaccuccgggacaucaugugcauccccuacugcaacuacuccaaguacugguaccugaaccacacggugaccggcaagaccagccugccccgcugcuggcuggucuccaacgggagcuaccugaacgagacccacuucuccgacgacaucgagcagcaggccgacaacaugaucacggagcuccugcagaaggaguacauggaccggcagggcaagaccccgcugggccugguggaccucuucguguucagcaccuccuucuaccugaucagcaucuuccugcaccucguccgcaucccgacccaccggcacgugaucgggaagcccugccccaagccccaccgccugaaccacaugggcaucugcuccugcgggcuguacaagcacccgggcgugcccgucaaguggaagcggugaggacuagucccuguucccagagcccacuuuuuuuucuuuuuuugaaauaaaauagccugucuuucagaucucaaaggcucuuuucagagccaccaaaaaaaaaaaaaaaaaaaaaaaaaaaaaaaaaaaaaaaaaaaaaaaaaaaaaaaaaaaaaaaaaaaaaaaaaaaaaaaaaaaaaaaaaaaaaaaaaaaaa

SEQ ID NO: 35538 - RNA, 1764 nt, Artificial Sequence
  mRNA product Design a-2 (hSL-A100) comprising derived and/or modified sequence from LASV(Lassa virus/H.sapiens-wt/NGA/2018/ISTH_0959;Clade II)__AVV65099__GPCmut9 (opt1)
aggagaguccgcucagccagguugcagaagcggcuuagcguguguccuaaucuucucucugcguguagguaggccugugccgcaaacaagcuuaccaugggccagaucaucaccuucuuccaggaggugccccacgucaucgaggaggugaugaacaucgugcugaucgcccucagccugcuggccauccucaaggggaucuacaacgucgugaccugcggccuguucgggcugguguccuuccuccugcugugcggccgcagcugcuccacgaccuacaagggggucuacgagcuccagacccuggagcuggacauggcgagccucaacaugaccaugccgcuguccugcacgaagaacaacagccaccacuacaucauggugggcaacgagaccggccuggagcucacccugaccaacacguccaucaucaaccacaaguucugcaaccugagcgacgcccacaagaagaaccucuacgaccacgcccugauguccaucaucagcaccuuccaccuguccauccccaacuucaaccaguacgaggccaugagcugcgacuucaacgggggcaagaucuccgugcaguacaaccucagccacgccuacgcgaucgacgccgccaaccacugcgggaccaucgccaacggcguccugcagaccuucaugcggauggcguggggcggguccuacaucgcccuggacagcggcugcggguccugggacugcaucaugacgagcuaccaguaccucaucauccagaacaccaccugggaggaccacugccaguucucccgccccagccccaucggcuaccuggggcugcucagccagcggacccgcgacaucuacaucucccggcgccugcugggcacguucaccuggacccucagcgacuccgagggcaacgagacccccgggggcuacugccugacgcgguggaugcugaucgaggccgagcucaagugcuucgggaacaccgccguggccaagugcaacgagaagcacgacgaggaguucugcgacaugcugcgccuguucgacuucaacaagcaggcgauccggcgccucaagaccgaggcccagaugagcauccagcugaucaacaaggccgugaacgcccugaucaacgaccagcucaucaugaagaaccaccuccgggacaucaugugcaucccguacugcaacuacuccaaguacugguaccugaaccacaccgucacgggcaagaccagccugccccgcugcuggcugguguccaacgggagcuaccugaacgagacccacuucuccgacgacaucgagcagcaggccgacaacaugaucaccgagcuccugcagaaggaguacaucgaccggcagggcaagacgccccugggccugguggaccucuucgucuucagcaccuccuucuaccugaucagcaucuuccugcaccucgugaagaucccgacccaccgccacgugaucgggaagcccugccccaagccccaccggcugaaccacaugggcaucugcuccugcgggcuguacaagcacccgggcguccccgugaaguggaagcgcugaggacuagucccuguucccagagcccacuuuuuuuucuuuuuuugaaauaaaauagccugucuuucagaucucaaaggcucuuuucagagccaccaaaaaaaaaaaaaaaaaaaaaaaaaaaaaaaaaaaaaaaaaaaaaaaaaaaaaaaaaaaaaaaaaaaaaaaaaaaaaaaaaaaaaaaaaaaaaaaaaaaaa

SEQ ID NO: 35539 - RNA, 1764 nt, Artificial Sequence
  mRNA product Design a-2 (hSL-A100) comprising derived and/or modified sequence from LASV(LASV003-NIG-2008;Clade II)__AIT17580__GPCmut9 (opt1)
aggagaguccgcucagccagguugcagaagcggcuuagcguguguccuaaucuucucucugcguguagguaggccugugccgcaaacaagcuuaccaugggccagaucaucaccuucuuccaggaggugccccacgucaucgaggaggugaugaacaucgugcugaucgcccucagccugcuggccauccucaaggggaucuacaacgucgcgaccugcggccuguucgggcugguguccuuccuccugcugugcggccgcagcugcuccacgaccuacaaggggguguacgagcuccagacccuggagcuggacauggccagccucaacaugaccaugccgcuguccugcacgaagaacaacagccaccacuacaucauggucggcaacgagaccggccuggagcucacccugaccaacacguccaucaucaaccacaaguucugcaaccugagcgacgcccacaagaagaaccucuacgaccacgcccugauguccaucaucagcaccuuccaccuguccauccccaacuucaaccaguacgaggccaugagcugcgacuucaacgggggcaagaucuccgugcaguacaaccucagccacaccuacgcgguggacgccgccaaccacugcgggaccaucgccaacggcguccugcagacguucaugcggauggcguggggcggguccuacaucgcccuggacagcggcugcggguccugggacugcaucaugaccagcuaccaguaccucaucauccagaacaccaccugggaggaccacugccaguucucccgccccagccccaucggcuaccuggggcugcucagccagcggacgcgcgacaucuacaucucccggcgccugcugggcaccuucaccuggacccucagcgacuccgagagcaacgagacgccgggcggguacugccugacccgguggaugcugaucgaggccgagcucaagugcuucggcaacaccgccguggccaagugcaacgagaagcacgacgaggaguucugcgacaugcugcgccuguucgacuucaacaagcaggcgauccggcgccucaaggccgaggcccagauguccauccagcugaucaacaaggccgugaacgcccugaucaacgaccagcucaucaugaagaaccaccuccgggacaucaugugcauccccuacugcaacuacagcaaguacugguaccugaaccacaccgucacggggcgcaccucccugccccggugcuggcuggugagcaacggcuccuaccugaacgagacccacuucagcgacgacaucgagcagcaggcggacaacaugaucaccgagcuccugcagaaggaguacauggaccgccaggggaagacgccccugggccugguggaccucuucgucuucuccaccagcuucuaccugaucuccaucuuccugcaccucgugaagaucccgacccaccggcacgugaucggcaagcccugccccaagccccaccgccugaaccacauggggaucugcagcugcggccuguacaagcacccggggguccccgugaaguggaagcggugaggacuagucccuguucccagagcccacuuuuuuuucuuuuuuugaaauaaaauagccugucuuucagaucucaaaggcucuuuucagagccaccaaaaaaaaaaaaaaaaaaaaaaaaaaaaaaaaaaaaaaaaaaaaaaaaaaaaaaaaaaaaaaaaaaaaaaaaaaaaaaaaaaaaaaaaaaaaaaaaaaaaa

SEQ ID NO: 35540 - RNA, 1764 nt, Artificial Sequence
  mRNA product Design a-2 (hSL-A100) comprising derived and/or modified sequence from LASV(LASV035-NIG-2009;Clade II)__AIT17588__GPCmut9 (opt1)
aggagaguccgcucagccagguugcagaagcggcuuagcguguguccuaaucuucucucugcguguagguaggccugugccgcaaacaagcuuaccaugggccagaucaucaccuucuuccaggaggugccccacgucaucgaggaggugaugaacaucgugcugaucgcccucagccugcuggccauccucaaggggaucuacaacgucgcgaccugcggccuguucgggcugguguccuuccuccugcugugcggccgcagcugcuccacgaccuacaaggggguguacgagcuccagacccuggagcuggacauggccagccucaacaugaccaugccgcuguccugcacgaagaacaacagccaccacuacaucauggucggcaacgagaccggccuggagcucacccugaccaacacguccaucaucaaccacaaguucugcaaccugagcgacgcccacaagaagaaccucuacgaccacgcccugauguccaucaucagcaccuuccaccuguccauccccaacuucaaccaguacgaggccaugagcugcgacuucaacgggggcaagaucuccgugcaguacaaccucagccacgcguacgccguggacgccgccaaccacugcgggaccaucgcgaacggcguccugcagaccuucaugcggauggccuggggcggguccuacaucgcccuggacagcggcugcggguccugggacugcaucaugacgagcuaccaguaccucaucauccagaacaccaccugggaggaccacugccaguucucccgccccagccccaucggcuaccuggggcugcucagccagcggacccgcgacaucuacaucucccggcgccugcugggcacguucaccuggacccucagcgacuccgagggcaacgagacccccgggggcuacugccugacgcgguggaugcugaucgaggccgagcucaagugcuucgggaacaccgccguggcgaagugcaacgagaagcacgacgaggaguucugcgacaugcugcgccuguucgacuucaacaagcaggccauccggcgccucaaggccgaggcccagaugagcauccagcugaucaacaaggccgugaacgcgcugaucaacgaccagcucaucaugaagaaccaccuccgggacaucaugugcauccccuacugcaacuacuccaaguacugguaccugaaccacaccgucaccggcaagacgagccugccccgcugcuggcugguguccaacgggagcuaccugaacgagacccacuucuccgacgacaucgagcagcaggccgacaacaugaucaccgagcuccugcagaaggaguacaucgaccggcagggcaagaccccgcugggccugguggaccucuucgucuucagcacguccuucuaccugaucagcaucuuccugcaccucgugaagaucccgacccaccgccacgugaucgggaagcccugccccaagccccaccggcugaaccacaugggcaucugcuccugcgggcuguacaagcacccgggcguccccgugaaguggaagcgcugaggacuagucccuguucccagagcccacuuuuuuuucuuuuuuugaaauaaaauagccugucuuucagaucucaaaggcucuuuucagagccaccaaaaaaaaaaaaaaaaaaaaaaaaaaaaaaaaaaaaaaaaaaaaaaaaaaaaaaaaaaaaaaaaaaaaaaaaaaaaaaaaaaaaaaaaaaaaaaaaaaaaa

SEQ ID NO: 35541 - RNA, 1764 nt, Artificial Sequence
  mRNA product Design a-2 (hSL-A100) comprising derived and/or modified sequence from LASV(LASV1000-NIG-2009;Clade II)__AIT17782__GPCmut9 (opt1)
aggagaguccgcucagccagguugcagaagcggcuuagcguguguccuaaucuucucucugcguguagguaggccugugccgcaaacaagcuuaccaugggccagaucaucaccuucuuccaggaggugccccacgucaucgaggaggugaugaacaucgugcugaucgcccucagccugcuggccauccucaaggggaucuacaacgucgcgaccugcggccuguucgggcugguguccuuccuccugcugugcggccgcagcugcuccacgaccuacaaggggguguacgagcuccagacccuggagcuggacauggccagccucaacaugaccaugccgcuguccugcacgaagaacaacagccaccacuacaucauggucggcaacgagaccggccuggagcucacccugaccaacacguccaucaucaaccacaaguucugcaaccugagcgacgcccacaagaagaaccucuacgaccacgcccugauguccaucaucagcaccuuccaccuguccauccccaacuucaaccaguacgaggccaugagcugcgacuucaacgggggcaagaucuccgugcaguacaaccucagccacaccuacgcgguggacgccgccaaccacugcgggaccaucgccaacggcguccugcagacguucaugcggauggcguggggcggguccuacaucgcccuggacagcggcugcggguccugggacugcaucaugaccagcuaccaguaccucaucauccagaacaccaccugggaggaccacugccaguucucccgccccagccccaucggcuaccuggggcugcucagccagcggacgcgcgacaucuacaucucccggcgccugcugggcaccuucaccuggacccucagcgacuccgagggcaacgagacgcccgggggcuacugccugacccgguggaugcugaucgaggccgagcucaagugcuucgggaacaccgccguggccaagugcaacgagaagcacgacgaggaguucugcgacaugcugcgccuguucgacuucaacaagcaggcgaucaagcggcucaagaccgaggcccagaugagcauccagcugaucaacaaggccgugaacgcccugaucaacgaccagcucaucaugaagaaccaccuccgcgacaucaugugcauccccuacugcaacuacuccaaguacugguaccugaaccacacggucaccggcaagaccagccugccccggugcuggcugguguccaacgggagcuaccugaacgagacccacuucuccgacgacaucgagcagcaggccgacaacaugaucacggagcuccugcagaaggaguacaucgaccgccagggcaagaccccgcugggccugguggaccucuucgucuucagcaccuccuucuaccugaucagcaucuuccugcaccucgugaagaucccgacccaccggcacguggucgggaagcccugccccaagccccaccgccugaaccacaugggcaucugcuccugcgggcuguacaagcacccgggcgugcccgugaaguggaagcggugaggacuagucccuguucccagagcccacuuuuuuuucuuuuuuugaaauaaaauagccugucuuucagaucucaaaggcucuuuucagagccaccaaaaaaaaaaaaaaaaaaaaaaaaaaaaaaaaaaaaaaaaaaaaaaaaaaaaaaaaaaaaaaaaaaaaaaaaaaaaaaaaaaaaaaaaaaaaaaaaaaaaa

SEQ ID NO: 35542 - RNA, 1764 nt, Artificial Sequence
  mRNA product Design a-2 (hSL-A100) comprising derived and/or modified sequence from LASV(LASV221-NIG-2010;Clade II)__AIT17624__GPCmut9 (opt1)
aggagaguccgcucagccagguugcagaagcggcuuagcguguguccuaaucuucucucugcguguagguaggccugugccgcaaacaagcuuaccaugggccagaucaucaccuucuuccaggaggugccccacgucaucgaggaggugaugaacaucgugcugaucgcccucagccugcuggccauccucaaggggaucuacaacgucgcgaccugcggccuguucgggcugguguccuuccuccugcugugcggccgcagcugcuccacgaccuacaaggggguguacgagcuccagacccuggagcuggacauggccagccucaacaugaccaugccgcuguccugcacgaagaacaacagccaccacuacaucauggucggcaacgagaccggccuggagcucacccugaccaacacguccaucaucaaccacaaguucugcaaccugagcgacgcccacaagaagaaccucuacgaccacgcccugauguccaucaucagcaccuuccaccuguccauccccaacuucaaccaguacgaggccaugagcugcgacuucaacgggggcaagaucuccgugcaguacaaccucagccacaccuacgcgaucgacgccgccaaccacugcgggaccaucgccaacggcgugcugcagacguucaugcggauggcguggggcggguccuacaucgcccuggacagcggcugcggguccugggacugcaucaugaccagcuaccaguaccucaucauccagaacaccaccugggaggaccacugccaguucucccgccccagccccaucggcuaccuggggcugcucagccagcggacgcgcgacaucuacaucucccggcgccugcugggcaccuucaccuggacccucagcgacuccgagggcaacgagacgcccgggggcuacugccugacccgguggaugcugaucgaggccgagcucaagugcuucgggaacaccgccgucgccaagugcaacgagaagcacgacgaggaguucugcgacaugcugcgccuguucgacuucaacaagcaggcgauccggcgccucaagaccgaggcccagaugagcauccagcugaucaacaaggccgugaacgcccugaucaacgaccagcucaucaugaagaaccaccuccgggacaucaugugcauccccuacugcaacuacuccaaguacugguaccugaaccacacggugaccggcaagaccagccugccccgcugcuggcuggucuccaacgggagcuaccugaacgagacccacuucuccgacgacaucgagcagcaggccgacaacaugaucacggagaugcuccagaaggaguacauggaccggcagggcaagaccccgcugggccugguggaccuguucguguucagcaccuccuucuaccucaucagcaucuuccugcaccuggucaagaucccgacccaccgccacgugaucgggaagcccugccccaagccccaccggcucaaccacaugggcaucugcuccugcgggcuguacaagcacccgggcgugcccgucaaguggaagcgcugaggacuagucccuguucccagagcccacuuuuuuuucuuuuuuugaaauaaaauagccugucuuucagaucucaaaggcucuuuucagagccaccaaaaaaaaaaaaaaaaaaaaaaaaaaaaaaaaaaaaaaaaaaaaaaaaaaaaaaaaaaaaaaaaaaaaaaaaaaaaaaaaaaaaaaaaaaaaaaaaaaaaa

SEQ ID NO: 35543 - RNA, 1764 nt, Artificial Sequence
  mRNA product Design a-2 (hSL-A100) comprising derived and/or modified sequence from LASV(LASV237-NIG-2010;Clade II)__AIT17638__GPCmut9 (opt1)
aggagaguccgcucagccagguugcagaagcggcuuagcguguguccuaaucuucucucugcguguagguaggccugugccgcaaacaagcuuaccaugggccagaucaucaccuucuuccaggaggugccccacgucaucgaggaggugaugaacaucgugcugaucgcccucagccugcuggccauccucaaggggaucuacaacgucgcgaccugcggccuguucgggcugguguccuuccuccugcugugcggccgcagcugcuccacgaccuacaaggggguguacgagcuccagacccuggagcuggacauggccagccucaacaugaccaugccgcuguccugcacgaagaacaacagccaccacuacaucauggucggcaacgagaccggccuggagcucacccugaccaacacguccaucaucaaccacaaguucugcaaccugagcgacgcccacaagaaggaccucuacgaccacgcccugauguccaucaucagcaccuuccaccuguccauccccaacuucaaccaguacgaggccaugagcugcgacuucaacgggggcaagaucuccgugcaguacaaccucagccacaccuacgcgguggacgccgccaaccacugcgggaccaucgccaacggcguccugcagacguucaugcggauggcguggggcggguccuacaucgcccuggacagcggcugcggguccugggacugcaucaugaccagcuaccaguaccucaucauccagaacaccaccugggaggaccacugccaguucucccgccccagccccaucggcuaccuggggcugcucagccagcggacgcgcgacaucuacaucucccggcgccugcugggcaccuucaccuggacccucagcgacuccgagggcaacgagacgcccgggggcuacugccugacccgguggaugcugaucgaggccgagcucaagugcuucgggaacaccgccguggccaagugcaacgagaagcacgacgaggaguucugcgacaugcugcgccuguucgacuucaacaagcaggcgauccggcgccucaagaccgaggcccagaugagcauccagcugaucaacaaggccgugaacgcccugaucaacgaccagcucaucaugaagaaccaccuccgggacaucaugugcauccccuacugcaacuacuccaaguacugguaccugaaccacacggucaccggcaagaccagccugccccgcugcuggcugguguccaacgggagcuaccugaacgagacccacuucuccgacgacaucgagcagcaggccgacaacaugaucacggagcuccugcagaaggaguacauggaccggcagggcaagaccccgcugggccugguggaccucuucgucuucagcaccuccuucuaccugaucagcaucuuccugcaccucaucaagaucccgacccaccgccacaucacggggaagcccugccccaagccccaccggcugaaccacaugggcaucugcuccugcgggcuguacaagcacccgggcgugcccgugaaguggaagcgcugaggacuagucccuguucccagagcccacuuuuuuuucuuuuuuugaaauaaaauagccugucuuucagaucucaaaggcucuuuucagagccaccaaaaaaaaaaaaaaaaaaaaaaaaaaaaaaaaaaaaaaaaaaaaaaaaaaaaaaaaaaaaaaaaaaaaaaaaaaaaaaaaaaaaaaaaaaaaaaaaaaaaa

SEQ ID NO: 35544 - RNA, 1764 nt, Artificial Sequence
  mRNA product Design a-2 (hSL-A100) comprising derived and/or modified sequence from LASV(LASV253-NIG-2011;Clade II)__AIT17670__GPCmut9 (opt1)
aggagaguccgcucagccagguugcagaagcggcuuagcguguguccuaaucuucucucugcguguagguaggccugugccgcaaacaagcuuaccaugggccagaucaucaccuucuuccaggaggugccccacgucaucgaggaggugaugaacaucgugcugaucgcccucagccugcuggccauccucaaggggaucuacaacgucgcgaccugcggccuguucgggcugguguccuuccuccugcugugcggccgcagcugcuccacgaccuacaaggggguguacgagcuccagacccuggagcuggacauggccagccucaacaugaccaugccgcuguccugcacgaagaacaacagccaccacuacaucauggucggcaacgagaccggccuggagcucacccugaccaacacguccaucaucaaccacaaguucugcaaccugagcgacgcccacaagaagaaccucuacgaccacgcccugauguccaucaucagcaccuuccaccuguccauccccaacuucaaccaguacgaggccaugagcugcgacuucaacgggggcaagaucuccgugcaguacaaccucagccacaccuacgcgguggacgccgccaaccacugcgggaccaucgccaacggcguccugcagacguucaugcggauggcguggggcggguccuacaucgcccuggacagcggcugcggguccugggacugcaucaugaccagcuaccaguaccucaucauccagaacaccaccugggaggaccacugccaguucucccgccccagccccaucggcuaccuggggcugcucagccagcggacgcgcgacaucuacaucucccggcgccugcugggcaccuucaccuggacccucagcgacuccgagggcaacgagacgcccgggggcuacugccugacccgguggaugcugaucgaggccgagcucaagugcuucgggaacaccgccguggccaagugcaacgagaagcacgacgaggaguucugcgacaugcugcgccuguucgacuucaacaagcaggcgauccggcgccucaaggccgaggcccagaugagcauccagcugaucaacaaggccgugaacgcccugaucaacgaccagcucaucaugaagaaccaccuccgggacaucaugugcaucccguacugcaacuacuccaaguacugguaccugaaccacaccgucacgggccgcaccagccugccccggugcuggcugguguccaacgggagcuaccugaacgagacccacuucuccgacgacaucgagcagcaggcggacaacaugaucaccgagcuccugcagaaggaguacaucgaccgccagggcaagacgccccugggccugguggaccucuucgucuucagcaccuccuucuaccugaucagcaucuuccugcaccucgugaagaucccgacccaccggcacaucaucgggaagcccugccccaagccccaccgccugaaccacaugggcaucugcuccugcgggcuguacaagcacccgggcgugcccgucaaguggaagcggugaggacuagucccuguucccagagcccacuuuuuuuucuuuuuuugaaauaaaauagccugucuuucagaucucaaaggcucuuuucagagccaccaaaaaaaaaaaaaaaaaaaaaaaaaaaaaaaaaaaaaaaaaaaaaaaaaaaaaaaaaaaaaaaaaaaaaaaaaaaaaaaaaaaaaaaaaaaaaaaaaaaaa

SEQ ID NO: 35545 - RNA, 1764 nt, Artificial Sequence
  mRNA product Design a-2 (hSL-A100) comprising derived and/or modified sequence from LASV(LASV254-NIG-2011;Clade II)__AIT17674__GPCmut9 (opt1)
aggagaguccgcucagccagguugcagaagcggcuuagcguguguccuaaucuucucucugcguguagguaggccugugccgcaaacaagcuuaccaugggccagaucaucaccuucuuccaggaggugccccacgucaucgaggaggugaugaacaucgugcugaucgcccucagccugcuggccauccucaaggggaucuacaacgucgcgaccugcggccuguucgggcugguguccuuccuccugcugugcggccgcagcugcuccacgaccuacaaggggguguacgagcuccagacccuggagcuggacaugaccaaccucaacaugacgaugccgcugagcugcaccaagaacaacucccaccacuacaucauggucggcaacgagaccggccuggagcucacccugacgaacaccagcaucaucaaccacaaguucugcaaccuguccgacgcccacaagaagaaccucuacaaccacgcccugaugagcaucaucuccaccuuccaccugagcauccccaacuucaaccaguacgaggccauguccugcgacuucaacgggggcaagaucagcgugcaguacaaccucucccacagcuacgccguggacgcggccaaccacugcgggaccaucgccaacggcguccugcagacguucaugcggauggccuggggcggguccuacaucgcgcuggacagcggcugcgggaacugggacugcaucaugaccuccuaccaguaccucaucauccagaacaccaccugggaggaccacugccaguucagccgccccucccccaucggcuaccuggggcugcucagccagcggacgcgcgacaucuacaucagccggcgccugcugggcaccuucaccuggacccucuccgacagcgagggcaacgagacgcccgggggcuacugccugacccgguggaugcugaucgaggccgagcucaagugcuucgggaacaccgccguggccaagugcaacgagaagcacgacgaggaguucugcgacaugcugcgccuguucgacuucaacaagcaggccauccggcgccucaagaccgaggcgcaggccaacauccagcugaucaacaaggccgugaacgcccugaucaacgaccagcucaucaugaagaaccaccuccgggacaucaugugcauccccuacugcaacuacuccaaguacugguaccugaaccacacggucaccggcaagaccagccugccccgcugcuggcugguguccaacgggagcuaccugaacgagacccacuucuccgacgacaucgagcagcaggccgacaacaugaucacggagcuccugcagaaggaguacauggaccggcagggcaagaccccgcugggccugguggaccucuucgucuucagcaccuccuucuaccugaucagcaucuuccugcaccucgugaagaucccgacccaccgccacgugaucgggaagcccugccccaagccccaccggcugaaccacaugggcaucugcuccugcgggcuguacaagcacccgggcguccccgugaaguggaagcgcugaggacuagucccuguucccagagcccacuuuuuuuucuuuuuuugaaauaaaauagccugucuuucagaucucaaaggcucuuuucagagccaccaaaaaaaaaaaaaaaaaaaaaaaaaaaaaaaaaaaaaaaaaaaaaaaaaaaaaaaaaaaaaaaaaaaaaaaaaaaaaaaaaaaaaaaaaaaaaaaaaaaaa

SEQ ID NO: 35546 - RNA, 1764 nt, Artificial Sequence
  mRNA product Design a-2 (hSL-A100) comprising derived and/or modified sequence from LASV(Nig08-A19;Clade III)__ADU56618__GPCmut9 (opt1)
aggagaguccgcucagccagguugcagaagcggcuuagcguguguccuaaucuucucucugcguguagguaggccugugccgcaaacaagcuuaccaugggccagaucgugaccuucuuccaggaggucccccacgugaucgaggaggugaugaacaucguccugaucgcccucagcauccuggccauccugaaggggcucuacaacaucgcgaccugcggccugaucgggcuggugacguuccuccugcuguccggccgcagcugcuccaugaccuacaaggggguguacgagcuccagacccuggagcugaacaugaacacccucaacaugacgaugccgcugagcugcaccaagaacaacucccaccacuacaucauggucggcaacgagaccggccuggagcucacccugacgaacaccagccugcuccaccacaaguucugcaaccuguccgacgcccacaagaagaaccuguacgaccacacccucaugagcaucaucuccaccuuccaccugagcauccccaacuucaaccaguacgaggccauguccugcgacuucaacgggggcaagaucacggugcaguacaaccugagccacuccuacgccaucgacgccgcgaaccacugcgggaccguggccaacggcguccuccagaccuucaugcggauggccuggggcgggagcuacaucgcccuggacuccggcugcgggaagugggacugcaucaugaccagcuaccaguaccugaucauccagaacacgaccugggaggaccacugccaguucucccgccccagccccaucggcuaccucgggcugcugucccagcggacccgcgacaucuacaucagccggcgccuccugggcaccuucacguggacccugagcgacuccgagggcaacgagacccccgggggcuacugccucacccgguggaugcugaucgaggcggagcugaagugcuucgggaacacggccguggccaagugcaacgagaagcacgacgaggaguucugcgacaugcuccgccuguucgacuucaacaagcaggccauccggcgccugaaggccgaggcgcagaugagcauccagcucaucaacaaggccgugaacgcccugaucaacgaccagcugaucaugaagaaccaccuccgggacaucaugugcauccccuacugcaacuacuccaaguacugguaccugaaccacaccagcaccggccgcaccucccugccccggugcuggcucgucagcaacggguccuaccugaacgagacgcacuucagcgacgacaucgagcagcaggccgacaacaugaucaccgagaugcugcagaaggaguaccuggaccgccagggcaagaccccgcucggccugguggaccuguucguguucuccaccagcuucuaccucaucuccaucuuccugcaccuggucaagaucccgacgcaccggcacaucguggggaagcccugccccaagccccaccgccucaaccacaugggcaucugcagcugcgggcuguacaagcagccgggcgugcccguccgguggaagcgcugaggacuagucccuguucccagagcccacuuuuuuuucuuuuuuugaaauaaaauagccugucuuucagaucucaaaggcucuuuucagagccaccaaaaaaaaaaaaaaaaaaaaaaaaaaaaaaaaaaaaaaaaaaaaaaaaaaaaaaaaaaaaaaaaaaaaaaaaaaaaaaaaaaaaaaaaaaaaaaaaaaaaa

SEQ ID NO: 35547 - RNA, 1767 nt, Artificial Sequence
  mRNA product Design a-2 (hSL-A100) comprising derived and/or modified sequence from LASV(G1180-SLE-2010;Clade IV)__AIT17168__GPCmut9 (opt1)
aggagaguccgcucagccagguugcagaagcggcuuagcguguguccuaaucuucucucugcguguagguaggccugugccgcaaacaagcuuaccaugggccagaucgugaccuucuuccaggaggucccccacgugaucgaggaggugaugaacaucguccugaucgcccucagcauccuggccgugcugaaggggcucuacaacuucgcgaccugcggccugguggggcugcucaccuuccugcugcucugcggccgcuccugcaccgccagccgguacaagggggucuacgagcugcagacccuggagcucaacauggagacccugaacaugacgaugccgcuguccugcaccaagaacaacagccaccacuacaucauggugggcaacgagaccggccucgagcugacccugacgaacaccuccaucaucaaccacaaguucugcaaccucagcgacgcccacaagaagaaccuguacgaccacgcccugauguccaucaucagcaccuuccaccucuccauccccaacuucaaccaguacgaggccaugagcugcgacuucaacgggggcaagaucuccgugcaguacaaccugagccacuccuacgcgggggacgccgccaaccacugcggcaccgucgccaacggggugcugcagacguucaugcgcauggcguggggcggcagcuacaucgcccucgacuccgggugcggcagcugggacugcaucaugaccuccuaccaguaccugaucauccagaacaccaccugggaggaccacugccaguucagccggcccucccccaucggguaccugggccuccugagccagcgcacgcgggacaucuacaucagccgccggcugcucggcaccuucaccuggacccuguccgacagcgaggggaaggacacgccgggcggguacugccugacccgcuggaugcucaucgaggccgagcugaagugcuucggcaacaccgccguggccaagugcaacgagaagcacgacgaggaguucugcgacaugcugcggcuguucgacuucaacaagcaggcgauccagcgccugaaggccgaggcccagauguccauccagcugaucaacaaggccgucaacgcccucaucaacgaccagcugaucaugaagaaccaccuccgggacaucaugugcauccccuacugcaacuacagcaaguacugguaccucaaccacaccacgaccgggaagaccucccugcccaagugcuggcuggugagcaacggcuccuaccucaacgagacccacuucagcgacgacaucgagcagcaggcggacaacaugaucacggagaugcugcagaaggaguacauggagcgccagggcaagacgccccuggggcugguggaccucuucgucuucuccaccagcuucuaccugaucuccaucuuccugcaccucgugaagaucccgacccaccggcacaucgugggcaagagcugccccaagccccaccgccugaaccacauggggaucugcuccugcggccuguacaagcagcccggggucccggugaaguggaagcggugaggacuagucccuguucccagagcccacuuuuuuuucuuuuuuugaaauaaaauagccugucuuucagaucucaaaggcucuuuucagagccaccaaaaaaaaaaaaaaaaaaaaaaaaaaaaaaaaaaaaaaaaaaaaaaaaaaaaaaaaaaaaaaaaaaaaaaaaaaaaaaaaaaaaaaaaaaaaaaaaaaaaa

SEQ ID NO: 35548 - RNA, 1767 nt, Artificial Sequence
  mRNA product Design a-2 (hSL-A100) comprising derived and/or modified sequence from LASV(G1442-SLE-2011;Clade IV)__AIT17180__GPCmut9 (opt1)
aggagaguccgcucagccagguugcagaagcggcuuagcguguguccuaaucuucucucugcguguagguaggccugugccgcaaacaagcuuaccaugggccagaucgugaccuucuuccaggaggucccccacgugaucgaggaggugaugaacaucguccugaucgcccucagcauccuggccgugcugaaggggcucuacaacguggcgaccugcggccugaucgggcuggucacguuccuccugcugugcggccgcuccugcaccaccacccucuacaaggggguguacgagcugcagacgcuggagcucaacauggagacccugaacaugaccaugccgcugagcugcaccaagaacaacucccaccacuacauccgggugggcaacgagacgggccucgagcugacccugaccaacaccagcaucaucaaccacaaguucugcaaccucuccgacgcccacaagaagaaccuguacgaccacgcccugaugagcaucaucuccacguuccaccucagcauccccaacuucaaccaguacgaggccauguccugcgacuucaacgggggcaagaucagcguccaguacaaccugucccacagcuacgccggggacgcggccaaccacugcggcaccguggccaacggggugcugcagaccuucaugcgcauggccuggggcggcuccuacaucgcgcucgacagcgggugcggcaacugggacugcaucaugaccuccuaccaguaccugaucauccagaacacgaccugggacgaccacugccaguucagccggcccucccccaucggguaccugggccuccugagccagcgcacccgggacgucuacaucucccgccggcugcucggcaccuucacguggacccugagcgacagcgaggggaaggacaccccgggcggguacugccugacccgcuggaugcucaucgaggccgagcugaagugcuucggcaacacggccguggccaagugcaacgagaagcacgacgaggaguucugcgacaugcugcggcuguucgacuucaacaagcaggccauccagcgccugaaggcggaggcccagauguccauccagcugaucaacaaggccgugaacgcccucaucaacgaccagcugaucaugaagaaccaccuccgggacaucaugugcauccccuacugcaacuacagcaaguacugguaccucaacaacaccgccaccgggaagaccucccugcccaagugcuggcugaucagcaacggcuccuaccucaacgagacgcacuucagcgacgacaucgagcaggaggcggacaacaugaucaccgagaugcugcagaaggaguacauggagcgccagggcaagacgccccuggggcuggucgaccucuucguguucuccaccagcuucuaccugaucuccaucuuccugcaccucgugaagaucccgacccaccggcacaucgucggcaagagcugccccaagccccaccgccugaaccacauggggaucugcuccugcggccuguacaagcagcccggggugccggugcgguggaagcgcugaggacuagucccuguucccagagcccacuuuuuuuucuuuuuuugaaauaaaauagccugucuuucagaucucaaaggcucuuuucagagccaccaaaaaaaaaaaaaaaaaaaaaaaaaaaaaaaaaaaaaaaaaaaaaaaaaaaaaaaaaaaaaaaaaaaaaaaaaaaaaaaaaaaaaaaaaaaaaaaaaaaaa

SEQ ID NO: 35549 - RNA, 1767 nt, Artificial Sequence
  mRNA product Design a-2 (hSL-A100) comprising derived and/or modified sequence from LASV(G3010-SLE-2013;Clade IV)__AIT17344__GPCmut9 (opt1)
aggagaguccgcucagccagguugcagaagcggcuuagcguguguccuaaucuucucucugcguguagguaggccugugccgcaaacaagcuuaccaugggccagaucgugaccuucuuccaggaggucccccacgugaucgaggaggugaugaacaucguccugaucgcccucagcauccuggccgugcugaaggggcucuacaacuucgcgaccugcggccugguggggcuggucacguuccuccugcugugcggccgcuccugcaccaccagccucuacaaggggguguacgagcugcagacccuggagcucaacauggagacgcugaacaugaccaugccgcuguccugcaccaagaacaacagccaccacuacaucauggugggcaacgagaccggccucgagcugacgcugaccaacaccuccaucaucaaccacaaguucugcaaccucagcgacgcccacaagaagaaccuguacaaccacgcccugauguccaucaucagcaccuuccaccucuccauccccaacuucaaccaguacgaggccaugagcugcgacuucaacgggggcaagaucuccguccaguacaaccugagccacuccuacgccggggacgcggccagccacugcggcacgguggccaacggggugcugcagaccuucaugcggauggccuggggcggcuccuacaucgcgcucgacagcgggugcggcaagugggacugcaucaugaccuccuaccaguaccugaucauccagaacaccacgugggaggaccacugccaguucagccgccccucccccaucggguaccugggccuccugagccagcggacccgcgacaucuacaucagccggcgccugcucggcaccuucaccuggacgcuguccgacagcgaggggaaggacaccccgggcggguacugccugacccgguggaugcucaucgaggccgagcugaagugcuucggcaacaccgccgucgccaagugcaacgagaagcacgacgaggaguucugcgacaugcugcgccucuucgacuucaacaagcaggccauccagcggcugaagacggaggcgcagauguccauccagcugaucaacaaggccgugaacgcccucaucaacgaccagcugaucaugaagaaccaccuccgcgacaucaugugcauccccuacugcaacuacagcaaguacugguaccugaaccacaccaccaccgggaagacgucccugcccaagugcuggcuggugagcaacggcuccuaccucaacgagacccacuucagcgacgacaucgagcagcaggccgacaacaugaucaccgagaugcugcagaaggaguacauggagcggcagggcaagacgccccuggggcuggucgaccucuucguguucuccaccagcuucuaccugaucuccaucuuccugcaccucgugaagaucccgacccaccgccacaucgucggcaagagcugccccaagccccaccggcugaaccacauggggaucugcuccugcggccuguacaagcagcccggggugccggugcgcuggaagcggugaggacuagucccuguucccagagcccacuuuuuuuucuuuuuuugaaauaaaauagccugucuuucagaucucaaaggcucuuuucagagccaccaaaaaaaaaaaaaaaaaaaaaaaaaaaaaaaaaaaaaaaaaaaaaaaaaaaaaaaaaaaaaaaaaaaaaaaaaaaaaaaaaaaaaaaaaaaaaaaaaaaaa

SEQ ID NO: 35550 - RNA, 1767 nt, Artificial Sequence
  mRNA product Design a-2 (hSL-A100) comprising derived and/or modified sequence from LASV(G502-SLE-2009;Clade IV)__AIT17126__GPCmut9 (opt1)
aggagaguccgcucagccagguugcagaagcggcuuagcguguguccuaaucuucucucugcguguagguaggccugugccgcaaacaagcuuaccaugggccagaucgugaccuucuuccaggaggucccccacgugaucgaggaggugaugaacaucguccugaucgcccucagcauccuggccgugcugaaggggcucuacaacuucgcgaccugcggccugguggggcugcucacguuccugcugcucugcggccgcuccugcaccaccgggcuguacaagggcgucuacgagcugcagacccucgagcugaacauggagacgcugaacaugaccaugccgcucagcugcaccaagaacaacucccaccacuacaucauggugggcaacgagaccgggcuggagcugacgcucaccaacaccagcaucaucaaccacaaguucugcaaccuguccgacgcccacaagaagaaccuguacgaccacgcccucaugagcaucaucuccaccuuccaccugagcauccccaacuucaaccaguacgaggccauguccugcgacuucaacggcgggaagaucagcgugcaguacaaccugucccacagcuacgccggcgacgcggccgaccacugcgggacggucgccaacggcgugcuccagaccuucaugcggauggccuggggcggguccuacaucgcgcuggacagcggcugcgggcgcugggacugcaucaugaccuccuaccaguaccugaucauccagaacaccacgugggaggaccacugccaguucagccggcccucccccaucggcuaccucggccugcugagccagcgcacccgggacaucuacaucucccgccggcuccuggggaccuucaccuggacgcugagcgacagcgagggcaaggacacccccgggggcuacugccucacccgcuggaugcugaucgaggccgagcugaagugcuucgggaacaccgccguggccaagugcaacgagaagcacgacgaggaguucugcgacaugcuccggcuguucgacuucaacaagcaggccauccagcgccugaaggcggaggcccagauguccauccagcucaucaacaaggccgucaacgcccugaucaacgaccagcuggugaugaagaaccaccuccgggacaucaugugcauccccuacugcaacuacagccgcuacugguaccugaaccacacgaccaccggccggaccucccugcccaagugcuggcucgugagcaacggcuccuaccugaacgagacgcacuucagcgacgacaucgagcagcaggccgacaacaugaucaccgagaugcugcagaaggaguacauggagcgccaggggaagaccccgcugggccucgucgaccuguucguguucuccaccagcuucuaccugaucuccaucuuccuccaccuggugaagaucccgacgcaccggcacaucgucggcaagagcugccccaagccccaccgccugaaccacauggggaucugcuccugcgggcucuacaagcagcccggcgugccggugaaguggaagcggugaggacuagucccuguucccagagcccacuuuuuuuucuuuuuuugaaauaaaauagccugucuuucagaucucaaaggcucuuuucagagccaccaaaaaaaaaaaaaaaaaaaaaaaaaaaaaaaaaaaaaaaaaaaaaaaaaaaaaaaaaaaaaaaaaaaaaaaaaaaaaaaaaaaaaaaaaaaaaaaaaaaaa

SEQ ID NO: 35551 - RNA, 1767 nt, Artificial Sequence
  mRNA product Design a-2 (hSL-A100) comprising derived and/or modified sequence from LASV(G733-SLE-2010;Clade IV)__AIT17154__GPCmut9 (opt1)
aggagaguccgcucagccagguugcagaagcggcuuagcguguguccuaaucuucucucugcguguagguaggccugugccgcaaacaagcuuaccaugggccagaucgugaccuucuuccaggaggucccccacgugaucgaggaggugaugaacaucguccugaucgcccucagcauccuggccgugcugaaggggcucuacaacuucgcgaccugcggcaucguggggcuggucuccuuccugcuccugugcggccgcagcugcacgaccucccuguacaaggggguguacgagcuccagacccuggagcugaacauggagacccucaacaugacgaugccgcugagcugcaccaagaacaacucccaccacuacaucauggugggcaacgagaccggccuggagcucacccugacgaacaccagcaucaucaaccacaaguucugcaaccuguccgacgcccacaagaagaaccucuacgaccacgcccugaugagcaucaucuccaccuuccaccugagcauccccaacuucaaccaguacgaggccauguccugcgacuucaacgggggcaagaucagcguccaguacaaccucucccacagcuacgccggggacgcggccaaccacugcggcaccaucgccaacggggugcugcagacguucaugcggauggccuggggcggcuccuacaucgcgcuggacagcgggugcgaccgcugggacugcaucaugaccuccuaccaguaccucaucauccagaacaccaccugggaggaccacugccaguucagccggcccucccccaucggcuaccuggggcugcucagccagcgcacgcgggacaucuacaucagccgccggcugcugggcaccuucaccuggacccucuccgacagcgagggcaaggacacgcccgggggcuacugccugacccgcuggaugcugaucgaggccgagcucaagugcuucgggaacaccgccguggccaagugcaacgagaagcacgacgaggaguucugcgacaugcugcggcuguucgacuucaacaagcaggccauccagcgccucaaggcggaggcccagauguccauccagcugaucaacaaggccgucaacgcccugaucaacgaccagcucaucaugaagaaccaccuccgggacaucaugugcauccccuacugcaacuacagcaaguacugguaccugaaccacaccacgaccggcaagaccucccugcccaagugcuggcuggugagcaacggguccuaccugaacgagacccacuucagcgacgacaucgagcagcaggccgacaacaugaucacggagaugcuccagaaggaguacauggagcgccagggcaagaccccgcugggccugguggaccuguucgucuucuccaccagcuucuaccucaucuccaucuuccugcaccuggugaagaucccgacccaccggcacguggucggcaagagcugccccaagccccaccgccucaaccacauggggaucugcuccugcgggcuguacggccagcccggggugccggugaaguggaagcggugaggacuagucccuguucccagagcccacuuuuuuuucuuuuuuugaaauaaaauagccugucuuucagaucucaaaggcucuuuucagagccaccaaaaaaaaaaaaaaaaaaaaaaaaaaaaaaaaaaaaaaaaaaaaaaaaaaaaaaaaaaaaaaaaaaaaaaaaaaaaaaaaaaaaaaaaaaaaaaaaaaaaa

SEQ ID NO: 35552 - RNA, 1767 nt, Artificial Sequence
  mRNA product Design a-2 (hSL-A100) comprising derived and/or modified sequence from MOPV/LASV reassortant(IGS-1;Clade IV)__AFY05576__GPCmut9 (opt1)
aggagaguccgcucagccagguugcagaagcggcuuagcguguguccuaaucuucucucugcguguagguaggccugugccgcaaacaagcuuaccaugggccagaucgugaccuucuuccaggaggucccccacgugaucgaggaggugaugaacaucguccugaucgcccucagcgugcuggccgugcugaaggggcucuacaacuucgcgaccugcggccuggucgggcuggugacguuccuccugcugugcggccgcuccugcaccaccagccucuacaaggggguguacgagcugcagacccuggagcucaacauggagacgcugaacaugaccaugccgcuguccugcaccaagaacaacagccaccacuacaucauggucggcaacgagaccggccucgagcugacgcugaccaacaccuccaucaucaaccacaaguucugcaaccucagcgacgcccacaagaagaaccuguacgaccacgcccugauguccaucaucagcaccuuccaccucuccauccccaacuucaaccaguacgaggccaugagcugcgacuucaacgggggcaagaucuccgugcaguacaaccugagccacuccuacgccggggacgcggccaaccacugcggcacgguggccaacgggguccugcagaccuucaugcggauggccuggggcggcagcuacaucgcgcucgacuccgggugcggcaacugggacugcaucaugaccagcuaccaguaccugaucauccagaacaccacgugggaggaccacugccaguucucccgccccagccccaucggguaccugggccuccugucccagcggacccgcgacaucuacaucagccggcgccugcucggcaccuucaccuggacgcugagcgacuccgagggggaggacaccccgggcggguacugccugacccgguggaugcucaucgaggccgagcugaagugcuucggcaacaccgccguggccaagugcaacgagaagcacgacgaggaguucugcgacaugcugcgccucuucgacuucaacaagcaggccauccagcggcugaaggcggaggcccagaugagcauccagcugaucaacaaggccgugaacgcccucaucaacgaccagcugaucaugaagaaccaccuccgcgacaucaugugcauccccuacugcaacuacuccaaguacugguaccugaaccacacgaccaccgggcggaccagccugcccaagugcuggcuggucuccaacggcagcuaccucaacgagacgcacuucuccgacgacaucgagcagcaggccgacaacaugaucaccgagaugcugcagaaggaguacauggagcgccagggcaagacgccccuggggcugguggaccucuucguguucagcaccuccuucuaccugaucagcaucuuccugcaccucgucaagaucccgacccaccggcacaucgugggcaaguccugccccaagccccaccgccugaaccacauggggaucugcagcugcggccuguacaagcagcccggggugccggucaaguggaagcggugaggacuagucccuguucccagagcccacuuuuuuuucuuuuuuugaaauaaaauagccugucuuucagaucucaaaggcucuuuucagagccaccaaaaaaaaaaaaaaaaaaaaaaaaaaaaaaaaaaaaaaaaaaaaaaaaaaaaaaaaaaaaaaaaaaaaaaaaaaaaaaaaaaaaaaaaaaaaaaaaaaaaa

SEQ ID NO: 35553 - RNA, 1767 nt, Artificial Sequence
  mRNA product Design a-2 (hSL-A100) comprising derived and/or modified sequence from LASV(LM765-SLE-2012;Clade IV)__AIT17814__GPCmut9 (opt1)
aggagaguccgcucagccagguugcagaagcggcuuagcguguguccuaaucuucucucugcguguagguaggccugugccgcaaacaagcuuaccaugggccagaucgugaccuucuuccaggaggucccccacgugaucgaggaggugaugaacaucguccugaucgcccucagcauccuggccgugcugaaggggcucuacaacuucgcgaccugcggccugguggggcuggucacguuccuccugcugugcggccgcuccugcaccaccagccucuacaaggggguguacgagcugcagacccuggagcucaacauggagacgcugaacaugaccaugccgcuguccugcaccaagaacaacagccaccacuacaucauggugggcaacgagaccggccucgagcugacgcugaccaacaccuccaucaucgaccacaaguucugcaaccucagcgacgcccaccggaagaaccuguacgaccacgcccugauguccaucaucagcaccuuccaccucuccauccccaacuucaaccaguacgaggccaugagcugcgacuucaacgggggcaagaucuccguccaguacaaccugagccacuccuacgccaaggacgcggccgaccacugcgggacgguggccaacggcgugcugcagaccuucaugcgcauggccuggggcgggagcuacaucgcgcucgacuccggcugcgggcggugggacugcaucaugaccagcuaccaguaccugaucauccagaacaccacgugggaggaccacugccaguucucccgccccagccccaucggcuaccuggggcuccugucccagcggacccgcgacaucuacaucagccggcgccugcucggcaccuucaccuggacgcugagcgacuccgagggcaaggacacccccgggggcuacugccugacccgguggaugcucaucgaggccgagcugaagugcuucgggaacaccgccgucgccaagugcaacgagaagcacgacgaggaguucugcgacaugcugcgccucuucgacuucaacaagcaggccauccagcggcugaaggcggaggcccagaugagcauccagcugaucaacaaggccgugaacgcccucaucaacgaccagcugaucaugaagaaccaccuccgcgacaucaugugcauccccuacugcaacuacuccaaguacugguaccugaaccacacgaccaccggcaagaccagccugcccaagugcuggcugguguccaacgggagcuaccucaacgagacgcacuucuccgacgacaucgagcagcaggccgacaacaugaucaccgagaugcugcagaaggaguacauggagcggcagggcaagaccccgcugggccuggucgaccucuucguguucagcaccuccuucuaccugaucagcaucuuccugcaccucgugaagaucccgacgcaccgccacaucgucgggaagcccugccccaagccccaccggcugaaccacaugggcaucugcuccugcgggcuguacaagcagccgggcgugcccgugaaguggaagcgcugaggacuagucccuguucccagagcccacuuuuuuuucuuuuuuugaaauaaaauagccugucuuucagaucucaaaggcucuuuucagagccaccaaaaaaaaaaaaaaaaaaaaaaaaaaaaaaaaaaaaaaaaaaaaaaaaaaaaaaaaaaaaaaaaaaaaaaaaaaaaaaaaaaaaaaaaaaaaaaaaaaaaa

SEQ ID NO: 35554 - RNA, 1767 nt, Artificial Sequence
  mRNA product Design a-2 (hSL-A100) comprising derived and/or modified sequence from LASV(LM776-SLE-2012;Clade IV)__AIT17824__GPCmut9 (opt1)
aggagaguccgcucagccagguugcagaagcggcuuagcguguguccuaaucuucucucugcguguagguaggccugugccgcaaacaagcuuaccaugggccagaucgugaccuucuuccaggaggucccccacgugaucgaggaggugaugaacaucguccugaucgcccucagcauccuggccgugcugaaggggcucuacaacuucgcgaccugcggccugguggggcuggucacguuccuccugcugugcggccgcuccugcaccaccagcguguacaaggggguguacgagcuccagacccuggagcugaacauggagacgcucaacaugaccaugccgcuguccugcaccaagaacaacagccaccacuacaucauggucggcaacgagaccggccuggagcucacgcugaccaacaccuccaucaucaaccacaaguucugcaaccugagcgacgcccacaagaagaaccucuacgaccacgcccugauguccaucaucagcaccuuccaccuguccauccccaacuucaaccaguacgaggccaugagcugcgacuucaacgggggcaagaucuccgugcaguacaaccucagccacuccuacgccggggacgcggccaaccacugcggcacgguggccaacgggguccugcagaccuucaugcggauggccuggggcggcagcuacaucgcgcuggacuccgggugcggcaagugggacugcaucaugaccagcuaccaguaccucaucauccagaacaccacgugggaggaccacugccaguucucccgccccagccccaucggguaccugggccugcucucccagcggacccgcgacaucuacaucagccggcgccugcugggcaccuucaccuggacgcucagcgacuccgaggggaaggacaccccgggcggguacugccugacccgguggaugcugaucgaggccgagcucaagugcuucggcaacaccgccguggccaagugcaacgagaagcacgacgaggaguucugcgacaugcugcgccuguucgacuucaacaagcaggccauccagcggcucaaggcggaggcccagaugagcauccagcugaucaacaaggccgugaacgcccugaucaacgaccagcucaucaugaagaaccaccuccgcgacaucaugugcauccccuacugcaacuacuccaaguacugguaccugaaccacacgaccaccgggaagaccagccugcccaagugcuggcuggucuccaacggcagcuaccugaacgagacgcacuucuccgacgacaucgagcagcaggccgacaacaugaucaccgagaugcuccagaaggaguacauggagcggcagggcaagacgccccuggggcugguggaccuguucguguucagcaccuccuucuaccucaucagcaucuuccugcaccuggucaagaucccgacccaccgccacaucgugggcaaguccugccccaagccccaccggcucaaccacauggggaucugcagcugcggccuguacaagcagcccggggugccgguccgcuggaagcggugaggacuagucccuguucccagagcccacuuuuuuuucuuuuuuugaaauaaaauagccugucuuucagaucucaaaggcucuuuucagagccaccaaaaaaaaaaaaaaaaaaaaaaaaaaaaaaaaaaaaaaaaaaaaaaaaaaaaaaaaaaaaaaaaaaaaaaaaaaaaaaaaaaaaaaaaaaaaaaaaaaaaa

SEQ ID NO: 35555 - RNA, 1767 nt, Artificial Sequence
  mRNA product Design a-2 (hSL-A100) comprising derived and/or modified sequence from LASV(Mad39;Clade IV)__ANH09722__GPCmut9 (opt1)
aggagaguccgcucagccagguugcagaagcggcuuagcguguguccuaaucuucucucugcguguagguaggccugugccgcaaacaagcuuaccaugggccagaucgugaccuucuuccaggaggucccccacgugaucgaggaggugaugaacaucguccugaucgcccucagcauccuggccgugcugaaggggcucuacaacguggcgaccugcggccugaucgggcuggucacguuccuccugcugugcggccgcuccugcaccaccacccucuacaaggggguguacgagcugcaggcccuggagcucaacauggagacgcugaacaugaccaugccgcugagcugcaccaagaacaacucccaccacuacauccgggugggcaacgagaccggccucgagcugacgcugaccaacaccagccucaucaaccacaaguucugcaaccuguccgacgcccacaagaagaaccuguacgaccacgcccucaugagcaucaucuccaccuuccaccugagcauccccaacuucaaccaguacgaggccauguccugcgacuucaacgacgggaagaucagcguccaguacaaccugucccacacguacgcgggcgacaccgccaaccacugcgggaccguggccaacggcgugcuccagaccuucaugcgcauggccuggggcgggagcuacaucgcgcuggacuccggcugcgggggcugggacugcaucaugacgagcuaccaguaccugaucauccagaacaccaccugggaggaccacugccaguucucccggcccagccccaucggguaccucggccugcugucccagcgcacccgggacaucuacaucagccgccggcuccugggcacguucaccuggacccuguccgacagcgaggggaaggacaccccgggcggguacugccucacgcgcuggaugcugaucgaggccgagcugaagugcuucggcaacaccgccgucgccaagugcaacgagaagcacgacgaggaguucugcgacaugcuccggcuguucgacuucaacaagcaggccauccagcgccugaaggcggaggcccagaugagcauccagcucaucaacaaggccgugaacgcccugaucaacgaccagcugaucaugaagaaccaccuccgggacaucaugugcauccccuacugcaacuacuccaaguacugguaccugaaccacaccgugaccgggaagacgagccugcccaagugcuggcucgucuccaacggcagcuaccugaacgagacccacuucuccgacgacaucgagcagcaggccgacaacaugaucaccgagaugcugcagaaggaguacauggagcgccagggcaagacgccccuggggcucguggaccuguucguguucagcaccuccuucuaccugaucagcaucuuccuccaccuggucaagaucccgacccaccggcacguggugggcaagcccugccccaagccccaccgccugaaccacauggggaucugcuccugcggcuucuacaagcagccggggguccccgugcgguggaagcgcugaggacuagucccuguucccagagcccacuuuuuuuucuuuuuuugaaauaaaauagccugucuuucagaucucaaaggcucuuuucagagccaccaaaaaaaaaaaaaaaaaaaaaaaaaaaaaaaaaaaaaaaaaaaaaaaaaaaaaaaaaaaaaaaaaaaaaaaaaaaaaaaaaaaaaaaaaaaaaaaaaaaaa

SEQ ID NO: 35556 - RNA, 1767 nt, Artificial Sequence
  mRNA product Design a-2 (hSL-A100) comprising derived and/or modified sequence from LASV(Z0947-SLE-2011;Clade IV)__AIT17840__GPCmut9 (opt1)
aggagaguccgcucagccagguugcagaagcggcuuagcguguguccuaaucuucucucugcguguagguaggccugugccgcaaacaagcuuaccaugggccagaucgugaccuucuuccaggaggucccccacgugaucgaggaggugaugaacaucguccugaucgcccucagcauccuggccgugcugaaggggcucuacaacuucgcgaccugcggccugguggggcuggucacguuccuccugcugugcggccgcuccugcaccaucagccucuacaaggggguguacgagcugcagacccuggagcucaacauggagacccugaacaugacgaugccgcuguccugcaccaagaacaacagccaccacuacaucauggugggcaacgagaccggccucgagcugacccugacgaacaccuccaucaucaaccacaaguucugcaaccucagcgacgcccacaagaagaaccuguacgaccacgcccugauguccaucaucagcaccuuccaccucuccauccccaacuucaaccaguacgaggccaugagcugcgacuucaacgggggcaagaucuccguccaguacaaccugagccacuccuacgccggggacgcggccaaccacugcggcaccguggccaacggggugcugcagacguucaugcggauggccuggggcggcagcuacaucgcgcucgacuccgggugcgaccgcugggacugcaucaugaccagcuaccaguaccugaucauccagaacaccaccugggaggaccacugccaguucucccggcccagccccaucggcuaccuggggcuccugucccagcgcacgcgggacaucuacaucagccgccggcugcucggcaccuucaccuggacccugagcgacuccgagggcaaggacacgcccgggggcuacugccugacccgcuggaugcucaucgaggccgagcugaagugcuucgggaacaccgccgucgccaagugcaacgagaagcacgacgaggaguucugcgacaugcugcggcuguucgacuucaacaagcaggccauccagcgccugaaggcggaggcccagaugagcauccagcugaucaacaaggccgugaacgcccucaucaacgaccagcugaucaugaagaaccaccuccgggacaucaugugcauccccuacugcaacuacuccaaguacugguaccucaaccacaccacgaccggcaagaccagccugcccaagugcuggcugguguccaacgggagcuaccucaacgagacccacuucuccgacgacaucgagcagcaggccgacaacaugaucacggagaugcugcagaaggaguacauggagcgccagggcaagaccccgcugggccuggucgaccucuucguguucagcaccuccuucuaccugaucagcaucuuccugcaccucgugaagaucccgacccaccggcacaucgucgggaagcccugccccaagccccaccgccugaaccacaugggcaucugcuccugcgggcuguacaagcagccgggcgugcccgugaaguggaagcggugaggacuagucccuguucccagagcccacuuuuuuuucuuuuuuugaaauaaaauagccugucuuucagaucucaaaggcucuuuucagagccaccaaaaaaaaaaaaaaaaaaaaaaaaaaaaaaaaaaaaaaaaaaaaaaaaaaaaaaaaaaaaaaaaaaaaaaaaaaaaaaaaaaaaaaaaaaaaaaaaaaaaa

SEQ ID NO: 35557 - RNA, 1767 nt, Artificial Sequence
  mRNA product Design a-2 (hSL-A100) comprising derived and/or modified sequence from LASV(Josiah;Clade IV)__NP_694870__GPCmut9 (opt4)
aggagaguccgcucagccagguugcagaagcggcuuagcguguguccuaaucuucucucugcguguagguaggccugugccgcaaacaagcuuaccaugggccagaucgugaccuucuuccaggaggugccccacgugaucgaggaggugaugaacaucgugcugaucgcccugagcgugcuggccgugcugaagggccuguacaacuucgccaccugcggccuggugggccuggugaccuuccugcugcugugcggcagaagcugcaccaccagccuguacaagggcguguacgagcugcagacccuggagcugaacauggagacccugaacaugaccaugccccugagcugcaccaagaacaacagccaccacuacaucauggugggcaacgagaccggccuggagcugacccugaccaacaccagcaucaucaaccacaaguucugcaaccugagcgacgcccacaagaagaaccuguacgaccacgcccugaugagcaucaucagcaccuuccaccugagcauccccaacuucaaccaguacgaggccaugagcugcgacuucaacggcggcaagaucagcgugcaguacaaccugagccacagcuacgccggcgacgccgccaaccacugcggcaccguggccaacggcgugcugcagaccuucaugagaauggccuggggcggcagcuacaucgcccuggacagcggcugcggcaacugggacugcaucaugaccagcuaccaguaccugaucauccagaacaccaccugggaggaccacugccaguucagcagacccagccccaucggcuaccugggccugcugagccagagaaccagagacaucuacaucagcagaagacugcugggcaccuucaccuggacccugagcgacagcgagggcaaggacacccccggcggcuacugccugaccagauggaugcugaucgaggccgagcugaagugcuucggcaacaccgccguggccaagugcaacgagaagcacgacgaggaguucugcgacaugcugagacuguucgacuucaacaagcaggccauccagagacugaaggccgaggcccagaugagcauccagcugaucaacaaggccgugaacgcccugaucaacgaccagcugaucaugaagaaccaccugagagacaucaugugcauccccuacugcaacuacagcaaguacugguaccugaaccacaccaccaccggcagaaccagccugcccaagugcuggcuggugagcaacggcagcuaccugaacgagacccacuucagcgacgacaucgagcagcaggccgacaacaugaucaccgagaugcugcagaaggaguacauggagagacagggcaagaccccccugggccugguggaccuguucguguucagcaccagcuucuaccugaucagcaucuuccugcaccuggugaagauccccacccacagacacaucgugggcaagagcugccccaagccccacagacugaaccacaugggcaucugcagcugcggccuguacaagcagcccggcgugcccgugaaguggaagagaugaggacuagucccuguucccagagcccacuuuuuuuucuuuuuuugaaauaaaauagccugucuuucagaucucaaaggcucuuuucagagccaccaaaaaaaaaaaaaaaaaaaaaaaaaaaaaaaaaaaaaaaaaaaaaaaaaaaaaaaaaaaaaaaaaaaaaaaaaaaaaaaaaaaaaaaaaaaaaaaaaaaaa

SEQ ID NO: 35558 - RNA, 1764 nt, Artificial Sequence
  mRNA product Design a-2 (hSL-A100) comprising derived and/or modified sequence from LASV(LP;Clade I)__AAF86701__GPCmut9 (opt4)
aggagaguccgcucagccagguugcagaagcggcuuagcguguguccuaaucuucucucugcguguagguaggccugugccgcaaacaagcuuaccaugggccagaucaucaccuucuuccaggaggugccccacgugaucgaggaggugaugaacaucgugcugaucgcccugagccugcuggccauccugaagggccuguacaacaucgccaccugcggcaucaucggccugguggccuuccuguuccugugcggcaagagcugcagccugacccugaagggcggcuacgagcugcagacccuggagcugaacauggagacccugaacaugaccaugccccugagcugcaccaagaacagcagccaccacuacaucagagugggcaacgagaccggccuggagcugacccugaccaacaccagcaucaucaaccacaaguucugcaaccugagcgacgcccacaagaagaaccuguacgaccacgcccugaugagcaucaucagcaccuuccaccugagcauccccaacuucaaccaguacgaggccaugagcugcgacuucaacggcggcaagaucagcgugcaguacaaccugagccacagcuacgccggcgacgccgccgagcacugcggcaccguggccaacggcgugcugcagaccuucaugagaauggccuggggcggcagauacaucgcccuggacagcggcugcggcaacugggacugcaucaugaccagcuaccaguaccugaucauccagaacaccaccugggaggaccacugccaguucagcagacccagccccaucggcuaccugggccugcugagccagagaaccagagacaucuacaucagcagaagacugcugggcaccuucaccuggacccugagcgacagcgagggcaacgagacccccggcggcuacugccugaccagauggaugcugaucgaggccgagcugaagugcuucggcaacaccgccguggccaagugcaacgagaagcacgacgaggaguucugcgacaugcugagacuguucgacuucaacaagcaggccaucagaagacugaaggccgaggcccagaugagcauccagcugaucaacaaggccgugaacgcccugaucaacgaccagcugaucaugaagaaccaccugagagacaucaugugcauccccuacugcaacuacagcaaguacugguaccugaaccacaccagcagcggcagaaccagccugcccaagugcuggcugaucagcaacggcagcuaccugaacgagacccaguucagcgacgacaucgagcagcaggccgacaacaugaucaccgagaugcugcagaaggaguacaucgagagacagggcaagaccccccugggccugguggacaucuucaucuucagcaccagcuucuaccugaucagcaucuuccugcaccugaucaagauccccacccacagacacaucgugggcaagcccugccccaagccccacagacugaaccacaugggcgugugcagcugcggccuguacaagcaccccggcgugcccaccaaguggaagagaugaggacuagucccuguucccagagcccacuuuuuuuucuuuuuuugaaauaaaauagccugucuuucagaucucaaaggcucuuuucagagccaccaaaaaaaaaaaaaaaaaaaaaaaaaaaaaaaaaaaaaaaaaaaaaaaaaaaaaaaaaaaaaaaaaaaaaaaaaaaaaaaaaaaaaaaaaaaaaaaaaaaaa

SEQ ID NO: 35559 - RNA, 1764 nt, Artificial Sequence
  mRNA product Design a-2 (hSL-A100) comprising derived and/or modified sequence from LASV(803213;Clade II)__AAF86703__GPCmut9 (opt4)
aggagaguccgcucagccagguugcagaagcggcuuagcguguguccuaaucuucucucugcguguagguaggccugugccgcaaacaagcuuaccaugggccagaucaucaccuucuuccaggaggugccccacgugaucgaggaggugaugaacaucgugcugaucgcccugagccugcuggccauccugaagggcaucuacaacguggccaccugcggccuguucggccugaucagcuuccugcugcugugcggcagaagcugcagcgugaccuacaagggcguguacgagcugcagacccuggagcugaacauggccaaccugaacaugaccaugccccugagcugcaccaagaacaacagccaccacuacaucauggugggcaacgagaccggccuggagcugacccugaccaacaccagcaucaucaaccacaaguucugcaaccugagcgacgcccacaagaagaaccuguacgaccacgcccugaugagcaucaucagcaccuuccaccugagcauccccaacuucaaccaguacgaggccaugagcugcgacuucaacggcggcaagaucagcgugcaguacaaccugagccacagcuucgccguggacgccgccaaccacugcggcaccaucgccaacggcgugcugcagaccuucaugagaauggccuggggcggcagcuacaucgcccuggacagcggcugcggcaacugggacugcaucaugaccagcuaccaguaccugaucauccagaacaccaccugggaggaccacugccaguucagcagacccagccccaucggcuaccugggccugcugagccagagaaccagagacaucuacaucagcagaagacugcugggcaccuucaccuggacccugagcgacagcgagggcaacgaggcccccggcggcuacugccugaccagauggaugcugaucgaggccgagcugaagugcuucggcaacaccgccguggccaagugcaacgagaagcacgacgaggaguucugcgacaugcugagacuguucgacuucaacaagcaggccaucaagagacugaagaccgaggcccagaugagcauccagcugaucaacaaggccgugaacgcccugaucaacgaccagcugaucaugaagaaccaccugagagacaucaugugcauccccuacugcaacuacagcagauacugguaccugaaccacaccgugaccggcaagaccagccugcccagaugcuggcuggugagcaacggcagcuaccugaacgagacccacuucagcgacgacaucgagcagcaggccgacaacaugaucaccgagaugcugcagaaggaguacauggacagacagggcaagaccccccugggccugguggaccuguucguguucagcaccagcuucuaccugaucagcaucuuccugcaccuggugaagauccccacccacagacacaucgugggcaagcccugccccaagccccacagacugaaccacaugggcaucugcagcugcggccuguacaagcaccccggcgugcccgugaaguggaagagaugaggacuagucccuguucccagagcccacuuuuuuuucuuuuuuugaaauaaaauagccugucuuucagaucucaaaggcucuuuucagagccaccaaaaaaaaaaaaaaaaaaaaaaaaaaaaaaaaaaaaaaaaaaaaaaaaaaaaaaaaaaaaaaaaaaaaaaaaaaaaaaaaaaaaaaaaaaaaaaaaaaaaa

SEQ ID NO: 35560 - RNA, 1764 nt, Artificial Sequence
  mRNA product Design a-2 (hSL-A100) comprising derived and/or modified sequence from LASV(GA391;Clade III)__CAA36645__GPCmut9 (opt4)
aggagaguccgcucagccagguugcagaagcggcuuagcguguguccuaaucuucucucugcguguagguaggccugugccgcaaacaagcuuaccaugggccagaucgugaccuucuuccaggaggugccccacgugaucgaggaggugaugaacaucgugcugaucgcccugagcauccuggccauccugaagggccuguacaacguggccaccugcggccugaucggccuggugaccuuccugcugcugagcggcagaagcugcagccugaucuacaagggcaccuacgagcugcagacccuggagcugaacauggagacccugaacaugaccaugccccugagcugcaccaagaacaacagccaccacuacaucagagugggcaacgagaccggccuggagcugacccugaccaacaccagcauccugaaccacaaguucugcaaccugagcgacgcccacaagagaaaccuguacgaccacagccugaugagcaucaucagcaccuuccaccugagcauccccaacuucaaccaguacgaggccaugagcugcgacuucaacggcggcaagaucaccgugcaguacaaccugagccacagcuucgccguggacgccgccggccacugcggcacccuggccaacggcgugcugcagaccuucaugagaauggccuggggcggcagcuacaucgcccuggacagcggcugcggcaacugggacugcaucaugaccagcuaccaguaccugaucauccagaacaccaccugggacgaccacugccaguucagcagacccagccccaucggcuaccugggccugcugagccagagaaccagagacaucuacaucagcagaagacugcugggcaccuucaccuggacccugagcgacagcgagggcaacgagacccccggcggcuacugccugaccagauggaugcugaucgaggccgagcugaagugcuucggcaacaccgccguggccaagugcaacgagaagcacgacgaggaguucugcgacaugcugagacuguucgacuucaacaagcaggccaucagaagacugaagaccgaggcccagaugagcauccagcugaucaacaaggccgugaacgcccugaucaacgaccagcugaucaugaagaaccaccugagagacaucaugugcauccccuacugcaacuacagcagauacugguaccugaaccacaccagcaccggcaagaccagccugcccagaugcuggcugaucagcaacggcagcuaccugaacgagaccaaguucagcgacgacaucgagcagcaggccgacaacaugaucaccgagaugcugcagaaggaguacaucgacagacagggcaagaccccccugggccugguggaccuguucguguucagcaccagcuucuaccugaucagcaucuuccugcaccuggugaagauccccacccacagacacaucgugggcaagcccugccccaagccccacagacugaaccacaugggcaucugcagcugcggccuguacaagcagcccggcgugcccgugagauggaagagaugaggacuagucccuguucccagagcccacuuuuuuuucuuuuuuugaaauaaaauagccugucuuucagaucucaaaggcucuuuucagagccaccaaaaaaaaaaaaaaaaaaaaaaaaaaaaaaaaaaaaaaaaaaaaaaaaaaaaaaaaaaaaaaaaaaaaaaaaaaaaaaaaaaaaaaaaaaaaaaaaaaaaa

SEQ ID NO: 35561 - RNA, 1767 nt, Artificial Sequence
  mRNA product Design a-2 (hSL-A100) comprising derived and/or modified sequence from LASV(AV;Clade V)__CCA30314__GPCmut9 (opt4)
aggagaguccgcucagccagguugcagaagcggcuuagcguguguccuaaucuucucucugcguguagguaggccugugccgcaaacaagcuuaccaugggccagaucgugaccuucuuccaggaggugccccacgugaucgaggaggugaugaacaucgugcugaucgcccugagcauccuggccgugcugaagggccuguacaacaucgccaccugcggccugaucggccugaucaccuuccugcugcugugcggcagaagcugcagcagcaaccuguacaagggcguguacgagcugcagagccuggaccugaacauggagacccugaacaugaccaugccccugagcugcaccaagaacaacagccaccacuacaucagagugggcaacgacaccggccuggagcugacccugaccaacaccagcauccugaaccacaaguucugcaaccugagcgacgcccacaagaaggaccuguacgaccacgcccugaugagcaucaucagcaccuuccaccugagcauccccaacuucaaccaguacgaggccaugagcugcgacuucaacggcggcaagaucagcgugcaguacaaccugagccacagcuacgccaucgacgccgccaaccacugcggcaccguggccaacggcauccugcagaccuucaugagaauggccuggggcggcagcuacaucgcccuggacagcggcugcggcaacugggacugcaucaugaccagcuaccaguaccugaucauccagaacaccaccugggagaaccacugccaguucagcagacccagccccaucggcuaccugggccugcugagccagagaaccagagacaucuacaucagcagaagacugcugggcaccuucaccuggacccugagcgacagcgagggcaacgccacccccggcggcuacugccugaccagauggaugcugaucgaggccgagcugaagugcuucggcaacaccgccguggccaagugcaacgagaagcacgacgaggaguucugcgacaugcugagacuguucgacuucaacaagcaggccaucagcagacugaagagcgaggcccagaugagcauccagcugaucaacaaggccgugaacgcccugaucaacgaccagcugaucaugaagaaccaccugagagacaucaugugcauccccuacugcaacuacagcaaguacugguaccugaaccacaccaucaccggcaagaccagccugcccaagugcuggcuggugagcaacggcagcuaccugaacgagacccacuucagcgacgacaucgagcagcaggccgacaacaugaucaccgagaugcugcagaaggaguacauggagagacagggcaagaccccccugggccugguggaccuguucguguucagcaccagcuucuaccugaucagcaucuuccugagacuggugaagauccccacccacagacacaucgugggcaagcccugccccaagccccacagacugaaccacaugggcaucugcagcugcggccuguacaagcagcccggcgugcccgugagauggaagagaugaggacuagucccuguucccagagcccacuuuuuuuucuuuuuuugaaauaaaauagccugucuuucagaucucaaaggcucuuuucagagccaccaaaaaaaaaaaaaaaaaaaaaaaaaaaaaaaaaaaaaaaaaaaaaaaaaaaaaaaaaaaaaaaaaaaaaaaaaaaaaaaaaaaaaaaaaaaaaaaaaaaaa

SEQ ID NO: 35562 - RNA, 1764 nt, Artificial Sequence
  mRNA product Design a-2 (hSL-A100) comprising derived and/or modified sequence from LASV(Togo/2016/7082;Clade VI)__AMR44577__GPCmut9 (opt4)
aggagaguccgcucagccagguugcagaagcggcuuagcguguguccuaaucuucucucugcguguagguaggccugugccgcaaacaagcuuaccaugggccagaucaucaccuucuuccaggaggugccccacgugaucgaggaggugaugaacaucgugcugaucgcccugagccugcuggccauccugaagggcguguacaacguggccaccugcggcaucaucggccuggugaccuuccuguuccugugcggcagaagcugcagccugaucuacaagggcagcuacgagcugcagacccuggagcugaacauggagacccugaacaugaccaugccccugagcugcaccaagaacagcagccaccacuacaucagagugggcaacgagaccggccuggagcugacccugaccaacaccagcaucaucaaccacaaguucugcaaccugagcgacgcccacaagagaaaccuguacgaccacgcccugaugagcauccugagcaccuuccaccugagcauccccaacuucaaccaguacgaggccaugagcugcgacuucaacggcggcaagaucagcgugcaguacaaccugagccacgccuacgccguggacgccgccgagcacugcggcaccguggccaacggcgugcugcagaccuucaugagaauggccuggggcggcagcuacaucgcccuggacagcggcugcggcaacugggacugcaucaugaccagcuaccaguaccugaucauccagaacaccaccugggaggaccacugccaguucagcagacccagccccaucggcuaccugggccugcugagccagagaaccagagacaucuacaucagcagaagacugcugggcaccuucaccuggacccugagcgacagcgagggcaacgagacccccggcggcuacugccugaccagauggaugcugaucgaggccgagcugaagugcuucggcaacaccgccguggccaagugcaacgagaagcacgacgaggaguucugcgacaugcugagacuguucgacuucaacaagcaggccauccagagacugaagagcgaggcccagaugagcauccagcugaucaacaaggccgugaacgcccugaucaacgaccagcugaucaugaagaaccaccugagagacaugaugugcauccccuacugcaacuacagcaaguacugguaccugaaccacaccagcagcggcagaaccagccugcccaagugcuggcuggugagcaacggcagcuaccugaacgagacccacuucagcgacgacaucgagcagcaggccgacaacaugaucaccgagaugcugcagaaggaguacaucgacagacagggcaagaccccccugggccugguggaccuguucguguucagcaccagcuucuaccugaucagcaucuuccugcaccugaucaagauccccacccacagacacaucgugggcaagcccugccccaagccccacagacugaaccacaugggcaucugcagcugcggccuguacaagcagcccggcgugcccaccagauggaagagaugaggacuagucccuguucccagagcccacuuuuuuuucuuuuuuugaaauaaaauagccugucuuucagaucucaaaggcucuuuucagagccaccaaaaaaaaaaaaaaaaaaaaaaaaaaaaaaaaaaaaaaaaaaaaaaaaaaaaaaaaaaaaaaaaaaaaaaaaaaaaaaaaaaaaaaaaaaaaaaaaaaaaa

SEQ ID NO: 35563 - RNA, 1764 nt, Artificial Sequence
  mRNA product Design a-2 (hSL-A100) comprising derived and/or modified sequence from LASV(KAK-428;Clade n.d. (VII))__ANH09740__GPCmut9 (opt4)
aggagaguccgcucagccagguugcagaagcggcuuagcguguguccuaaucuucucucugcguguagguaggccugugccgcaaacaagcuuaccaugggccagaucgugaccuucuuccaggaggugccccacgugaucgaggaggugaugaacaucgugcugaucgcccugagccugcuggccauccugaagggccuguacaacuucgccaccugcggcgugaucggccugaucaccuuccugcugcugugcggcagaagcugcagcgccaccuacaagggccaguacgagcugcagacccuggagcugaacauggagagccugaacaugaccaugccccugagcugcaccaagaacaacagccaccacuacaucagagccggcaacaacaccggccuggagcugacccugaccaacaccagcaucaucagccacaaguucugcaaccugagcgacgcccacaagaagaaccuguacgaccacacccugaugagcaucaucaccaccuuccaccugagcauccccaacuucaaccaguacgaggccaugagcugcgacuucaacggcggcaagaucagcauccaguacaaccugagccacagcuacgccggcgacgccgcccagcacugcggcaccguggccaacggcgugcugcagaccuucaugagaauggccuggggcggcagcuaccuggcccuggacagcggcugcagaggcugggacugcaucaucagcagcuaccaguaccugaucauccagaacaccaccugggacgaccacugccaguucagcagacccagccccaucggcuaccugggcuucgugagccagaagaccagagacaucuacaucagcagaagacugcugggcaccuucaccuggacccugagcgacagcgagggccacgacaugcccggcggcuacugccugaccagauggaugcugaucgaggccgaccugaagugcuucggcaacaccgccguggccaagugcaacgagaagcacgacgaggaguucugcgacauguggagacuguucgacuucaacaagcaggccauccagagacugaaggccgaggcccagaugaacauccagcugaucaacaaggccgugaacgcccugaucaacgaccagcugaugaugaagaaccaccugagagacaucaugugcauccccuacugcaacuacagcaaguucugguaccugaacaacaccaccaccggcagaaccagccugcccagaugcuggcugaucagcaacggcagcuaccugaacgagacccacuucagcgacgacaucgagcagcaggccgacaacaugaucaccgagaugcugcagaaggaguacauggacagacagggcaagaccccccugggccugguggaccuguucguguucagcaccagcuucuaccugaucaccaucuuccugcaccuggugaagauccccacccacagacacaucgugggcaagcccugccccaagccccacagacugaaccacaugggcaucugcagcugcggccuguacaagcagcccggcgugcccgugagauggaagagaugaggacuagucccuguucccagagcccacuuuuuuuucuuuuuuugaaauaaaauagccugucuuucagaucucaaaggcucuuuucagagccaccaaaaaaaaaaaaaaaaaaaaaaaaaaaaaaaaaaaaaaaaaaaaaaaaaaaaaaaaaaaaaaaaaaaaaaaaaaaaaaaaaaaaaaaaaaaaaaaaaaaaa

SEQ ID NO: 35564 - RNA, 1764 nt, Artificial Sequence; identical to SEQ ID NO: 35558
  mRNA product Design a-2 (hSL-A100) comprising derived and/or modified sequence from LASV(Pinneo-NIG-1969;Clade I)__AIT17836__GPCmut9 (opt4)

SEQ ID NO: 35565 - RNA, 1764 nt, Artificial Sequence
  mRNA product Design a-2 (hSL-A100) comprising derived and/or modified sequence from LASV(ISTH0009-NIG-2011;Clade II)__AIT17404__GPCmut9 (opt4)
aggagaguccgcucagccagguugcagaagcggcuuagcguguguccuaaucuucucucugcguguagguaggccugugccgcaaacaagcuuaccaugggccagaucaucaccuucuuccaggaggugccccacgugaucgaggaggugaugaacaucgugcugaucgcccugagccugcuggccauccugaagggcaucuacaacguggccaccugcggccuguucggccuggugagcuuccugcugcugugcggcagaagcugcagcaccaccuacaagggcguguacgagcugcagacccuggagcuggacauggccagccugaacaugaccaugccccugagcugcaccaagaacaacagccaccacuacaucauggugggcaacgagaccggccuggagcugacccugaccaacaccagcaucaucaaccacaaguucugcaaccugagcgacgcccacaagaagaaccuguacgaccacgcccugaugagcaucaucagcaccuuccaccugagcauccccaacuucaaccaguacgaggccaugagcugcgacuucaacggcggcaagaucagcgugcaguacaaccugagccacgccuacgccguggacgccgccaaccacugcggcaccaucgccaacggcgugcugcagaccuucaugagaauggccuggggcggcagcuacaucgcccuggacagcggcugcggcagcugggacugcaucaugaccagcuaccaguaccugaucauccagaacaccaccugggaggaccacugccaguucagcagacccagccccaucggcuaccugggccugcugagccagagaaccagagacaucuacaucagcagaagacugcugggcaccuucaccuggacccugagcgacagcgagggcaacgagacccccggcggcuacugccugaccagauggaugcugaucgaggccgagcugaagugcuucggcaacaccgccguggccaagugcaacgagaagcacgacgaggaguucugcgacaugcugagacuguucgacuucaacaagcaggccaucagaagacugaagaccgaggcccagaugagcauccagcugaucaacaaggccgugaacgcccugaucaacgaccagcugaucaugaagaaccaccugagagacaucaugugcauccccuacugcaacuacagcaaguacugguaccugaaccacaccgugaccggcaagaccagccugcccagaugcuggcuggugagcaacggcagcuaccugaacgagacccacuucagcgacgacaucgagcagcaggccgacaacaugaucaccgagcugcugcagaaggaguacauggacagacagggcaagaccccccugggccugguggaccuguucguguucagcaccagcuucuaccugaucagcaucuuccugcaccugaucaagauccccacccacagacacaucaccggcaagcccugccccaagccccacagacugaaccacaugggcaucugcagcugcggccuguacaagcaccccggcgugcccgugaaguggaagagaugaggacuagucccuguucccagagcccacuuuuuuuucuuuuuuugaaauaaaauagccugucuuucagaucucaaaggcucuuuucagagccaccaaaaaaaaaaaaaaaaaaaaaaaaaaaaaaaaaaaaaaaaaaaaaaaaaaaaaaaaaaaaaaaaaaaaaaaaaaaaaaaaaaaaaaaaaaaaaaaaaaaaa

SEQ ID NO: 35566 - RNA, 1764 nt, Artificial Sequence
  mRNA product Design a-2 (hSL-A100) comprising derived and/or modified sequence from LASV(ISTH2010-NIG-2012;Clade II)__AIT17482__GPCmut9 (opt4)
aggagaguccgcucagccagguugcagaagcggcuuagcguguguccuaaucuucucucugcguguagguaggccugugccgcaaacaagcuuaccaugggccagaucaucaccuucuuccaggaggugccccacgugaucgaggaggugaugaacaucgugcugaucgcccugagccugcuggccauccugaagggcaucuacaacguggccaccugcggccuguucggccuggugagcuuccugcugcugugcggcagaagcugcagcaccaccuacaagggcguguacgagcugcagacccuggagcuggacauggccagccugaacaugaccaugccccugagcugcaccaagaacaacagccaccacuacaucauggugggcaacgagaccggccuggagcugacccugaccaacaccagcaucaucaaccacaaguucugcaaccugagcgacgcccacaagaagaaccuguacgaccacgcccugaugagcaucaucagcaccuuccaccugagcauccccaacuucaaccaguacgaggccaugagcugcgacuucaacggcggcaagaucagcgugcaguacaaccugagccacgccuacgccguggacgccgccaaccacugcggcaccaucgccaacggcgugcugcagaccuucaugagaauggccuggggcggcagcuacaucgcccuggacagcggcugcggcagcugggacugcaucaugaccagcuaccaguaccugaucauccagaacaucaccugggaggaccacugccaguucagcagacccagccccaucggcuaccugggccugcugagccagagaaccagagacaucuacaucagcagaagacugcugggcaccuucaccuggacccugagcgacagcgagggcaacgagacccccggcggcuacugccugaccagauggaugcugaucgaggccgagcugaagugcuucggcaacaccgccguggccaagugcaacgagaagcacgacgaggaguucugcgacaugcugagacuguucgacuucaacaagcaggccaucagaagacugaagaccgaggcccagaugagcauccagcugaucaacaaggccgugaacgcccugaucaacgaccagcugaucaugaagaaccaccugagagacaucaugugcauccccuacugcaacuacagcaaguacugguaccugaaccacaccgugaccggcaagaccagccugcccagaugcuggcuggugagcaacggcagcuaccugaacgagacccacuucagcgacgacaucgagcagcaggccgacaacaugaucaccgagcugcugcagaaggaguacaucgacagacagggcaagaccccccugggccugguggaccuguucguguucagcaccagcuucuaccugaucagcaucuuccugcaccuggugaagauccccacccacagacacguggugggcaagcccugccccaagccccacagacugaaccacaugggcaucugcagcugcggccuguacaagcaccccggcgugcccgugaaguggaagagaugaggacuagucccuguucccagagcccacuuuuuuuucuuuuuuugaaauaaaauagccugucuuucagaucucaaaggcucuuuucagagccaccaaaaaaaaaaaaaaaaaaaaaaaaaaaaaaaaaaaaaaaaaaaaaaaaaaaaaaaaaaaaaaaaaaaaaaaaaaaaaaaaaaaaaaaaaaaaaaaaaaaaa

SEQ ID NO: 35567 - RNA, 1764 nt, Artificial Sequence
  mRNA product Design a-2 (hSL-A100) comprising derived and/or modified sequence from LASV(Lassa virus/H.sapiens-wt/NGA/2015/ISTH_0543;Clade II)__AVO03639__GPCmut9 (opt4)
aggagaguccgcucagccagguugcagaagcggcuuagcguguguccuaaucuucucucugcguguagguaggccugugccgcaaacaagcuuaccaugggccagaucaucaccuucuuccaggaggugccccacgugaucgaggaggugaugaacaucgugcugaucgcccugagccugcuggccauccugaagggcaucuacaacguggccaccugcggccuguucggccuggugagcuuccugcugcugugcggcagaagcugcagcaccaccuacaagggcguguacgagcugcagacccuggagcuggacauggccaaccugaacaugaccaugccccugagcugcaccaagaacaacagccaccacuacaucauggugggcaacgagaccggccuggagcugacccugaccaacaccagcaucaucaaccacaaguucugcaaccugagcgacgcccacaagaagaaccuguacgaccacgcccugaugagcaucaucagcaccuuccaccugagcauccccaacuucaaccaguacgaggccaugagcugcgacuucaacggcggcaagaucagcgugcaguacaaccugagccacaccuacgccguggacgccgccaaccacugcggcaccaucgccaacggcgugcugcagaccuucaugagaauggccuggggcggcagcuacaucgcccuggacagcggcugcggcagcugggacugcaucaugaccagcuaccaguaccuggugauccagaacaccaccugggaggaccacugccaguucagcagacccagccccaucggcuaccugggccugcugagccagagaaccagagacaucuacaucagcagaagacugcugggcaccuucaccuggacccugagcgacagcgagggcaacgagacccccggcggcuacugccugaccagauggaugcugaucgaggccgagcugaagugcuucggcaacaccgccguggccaagugcaacgagaagcacgacgaggaguucugcgacaugcugagacuguucgacuucaacaagcaggccaucagaagacugaagaccgaggcccagaugagcauccagcugaucaacaaggccgugaacgcccugaucaacgaccagcugaucaugaagaaccaccugagagacaucaugugcauccccuacugcaacuacagcaaguacugguaccugaaccacaccgugaccggcaagaccagccugcccagaugcuggcuggugagcaacggcagcuaccugaacgagacccacuucagcgacgacaucgagcagcaggccgacaacaugaucaccgagcugcugcagaaggaguacaucgacagacagggcaagaccccccugggccugguggaccuguucguguucagcaccagcuucuaccugaucagcaucuuccugcaccuggugaagauccccacccacagacacaucaccggcaagcccugccccaagccccacagacugaaccacaugggcaucugcagcugcggccuguacaagcaccccggcgugcccgugaaguggaagagaugaggacuagucccuguucccagagcccacuuuuuuuucuuuuuuugaaauaaaauagccugucuuucagaucucaaaggcucuuuucagagccaccaaaaaaaaaaaaaaaaaaaaaaaaaaaaaaaaaaaaaaaaaaaaaaaaaaaaaaaaaaaaaaaaaaaaaaaaaaaaaaaaaaaaaaaaaaaaaaaaaaaaa

SEQ ID NO: 35568 - RNA, 1764 nt, Artificial Sequence
  mRNA product Design a-2 (hSL-A100) comprising derived and/or modified sequence from LASV(Lassa virus/H.sapiens-wt/NGA/2016/ISTH_0009;Clade II)__AVO03571__GPCmut9 (opt4)
aggagaguccgcucagccagguugcagaagcggcuuagcguguguccuaaucuucucucugcguguagguaggccugugccgcaaacaagcuuaccaugggccagaucaucaccuucuuccaggaggugccccacgugaucgaggaggugaugaacaucgugcugaucgcccugagccugcuggccauccugaagggcaucuacaacguggccaccugcggccugcugggccuggugagcuuccugcugcugugcggcagaagcugcagcaccaccuacaagggcguguacgagcugcagacccuggagcuggacauggccagccugaacaugaccaugccccugagcugcaccaagaacaacagccaccacuacaucauggugggcaacgagaccggccuggagcugacccugaccaacaccagcaucaucaaccacaaguucugcaaccugagcgacgcccacaagaagaaccuguacgaccacgcccugaugagcaucaucagcaccuuccaccugagcauccccaacuucaaccaguacgaggccaugagcugcgacuucaacggcggcagaaucagcgugcaguacaaccugagccacagcuacgccguggacgccgccaaccacugcggcaccaucgccaacggcgugcugcagaccuucaugagaauggccuggggcggcagcuacaucgcccuggacagcggcugcggcagcugggacugcaucaugaccagcuaccaguaccugaucauccagaacaccaccugggaggaccacugccaguucagcagacccagccccaucggcuaccugggccugcugagccagagaaccagagacaucuacaucagcagaagacugcugggcaccuucaccuggacccugagcgacagcgagggcaacgagacccccggcggcuacugccugaccagauggaugcugaucgaggccgagcugaagugcuucggcaacaccgccguggccaagugcaacgagaagcacgacgaggaguucugcgacaugcugagacuguucgacuucaacaagcaggccaucagaagacugaagaccgaggcccagaugagcauccagcugaucaacaaggccgugaacgcccugaucaacgaccagcugaucaugaagaaccaccugagagacaucaugugcauccccuacugcaacuacagcaaguacugguaccugaaccacaccgugaccggcaagaccagccugcccagaugcuggcuggugagcaacggcagcuaccugaacgagacccacuucagcgacgacaucgagcagcaggccgacaacaugaucaccgagcugcugcagaaggaguacaucgacagacagggcaagaccccccugggccugguggaccuguucguguucagcaccagcuucuaccugaucagcaucuuccugcaccuggugaagauccccacccacagacacaucaccggcaagcccugccccaagccccacagacugaaccacaugggcaucugcagcugcggccuguacaaccaccccggcgugcccgugaaguggaagagaugaggacuagucccuguucccagagcccacuuuuuuuucuuuuuuugaaauaaaauagccugucuuucagaucucaaaggcucuuuucagagccaccaaaaaaaaaaaaaaaaaaaaaaaaaaaaaaaaaaaaaaaaaaaaaaaaaaaaaaaaaaaaaaaaaaaaaaaaaaaaaaaaaaaaaaaaaaaaaaaaaaaaa

SEQ ID NO: 35569 - RNA, 1764 nt, Artificial Sequence
  mRNA product Design a-2 (hSL-A100) comprising derived and/or modified sequence from LASV(Lassa virus/H.sapiens-wt/NGA/2016/ISTH_0017;Clade II)__AVO03567__GPCmut9 (opt4)
aggagaguccgcucagccagguugcagaagcggcuuagcguguguccuaaucuucucucugcguguagguaggccugugccgcaaacaagcuuaccaugggccagaucaucaccuucuuccaggaggugccccacgugaucgaggaggugaugaacaucgugcugaucgcccugagccugcuggccauccugaagggcaucuacaacguggccaccugcggccuguucggccuggugagcuuccugcugcugugcggcagaagcugcagcaccaccuacaagggcguguacgagcugcagacccuggagcuggacauggccagccugaacaugaccaugccccugagcugcaccaagaacaacagccaccacuacaucauggugggcaacgagaccggccuggagcugacccugaccaacaccagcaucaucaaccacaaguucugcaaccugagcgacgcccacaagaagaaccuguacgaccacgcccugaugagcaucaucagcaccuuccaccugagcauccccaacuucaaccaguacgaggccaugagcugcgacuucaacggcggcaagaucagcgugcaguacaaccugagccacaccuacgccaucgacgccgccaaccacugcggcaccaucgccaacggcgugcugcagaccuucaugagaauggccuggggcggcagcuacaucgcccuggacagcggcugcggcagcugggacugcaucaugaccagcuaccaguaccugaucauccagaacaccaccugggaggaccacugccaguucagcagacccagccccaucggcuaccugggccugcugagccagagaaccagagacaucuacaucagcagaagacugcugggcaccuucaccuggacccugagcgacagcgagggcaacgagacccccggcggcuacugccugaccagauggaugcugaucgaggccgagcugaagugcuucggcaacaccgccguggccaagugcaacgagaagcacgacgaggaguucugcgacaugcugagacuguucgacuucaacaagcaggccaucagaagacugaagaccgaggcccagaugagcauccagcugaucaacaaggccgugaacgcccugaucaacgaccagcugaucaugaagaaccaccugagagacaucaugugcauccccuacugcaacuacagcaaguacugguaccugaaccacaccgugaccggcaagaccagccugcccagaugcuggcuggugagcaacggcagcuaccugaacgagacccacuucagcgacgacaucgagcagcaggccgacaacaugaucaccgagcugcugcagaaggaguacauggacagacagggcaagaccccccugggccugguggaccuguucguguucagcaccagcuucuaccugaucagcaucuuccugcaccuggugagaauccccacccacagacacgugaucggcaagcccugccccaagccccacagacugaaccacaugggcaucugcagcugcggccuguacaagcaccccggcgugcccgugaaguggaagagaugaggacuagucccuguucccagagcccacuuuuuuuucuuuuuuugaaauaaaauagccugucuuucagaucucaaaggcucuuuucagagccaccaaaaaaaaaaaaaaaaaaaaaaaaaaaaaaaaaaaaaaaaaaaaaaaaaaaaaaaaaaaaaaaaaaaaaaaaaaaaaaaaaaaaaaaaaaaaaaaaaaaaa

SEQ ID NO: 35570 - RNA, 1764 nt, Artificial Sequence
  mRNA product Design a-2 (hSL-A100) comprising derived and/or modified sequence from LASV(Lassa virus/H.sapiens-wt/NGA/2018/ISTH_0959;Clade II)__AVV65099__GPCmut9 (opt4)
aggagaguccgcucagccagguugcagaagcggcuuagcguguguccuaaucuucucucugcguguagguaggccugugccgcaaacaagcuuaccaugggccagaucaucaccuucuuccaggaggugccccacgugaucgaggaggugaugaacaucgugcugaucgcccugagccugcuggccauccugaagggcaucuacaacguggugaccugcggccuguucggccuggugagcuuccugcugcugugcggcagaagcugcagcaccaccuacaagggcguguacgagcugcagacccuggagcuggacauggccagccugaacaugaccaugccccugagcugcaccaagaacaacagccaccacuacaucauggugggcaacgagaccggccuggagcugacccugaccaacaccagcaucaucaaccacaaguucugcaaccugagcgacgcccacaagaagaaccuguacgaccacgcccugaugagcaucaucagcaccuuccaccugagcauccccaacuucaaccaguacgaggccaugagcugcgacuucaacggcggcaagaucagcgugcaguacaaccugagccacgccuacgccaucgacgccgccaaccacugcggcaccaucgccaacggcgugcugcagaccuucaugagaauggccuggggcggcagcuacaucgcccuggacagcggcugcggcagcugggacugcaucaugaccagcuaccaguaccugaucauccagaacaccaccugggaggaccacugccaguucagcagacccagccccaucggcuaccugggccugcugagccagagaaccagagacaucuacaucagcagaagacugcugggcaccuucaccuggacccugagcgacagcgagggcaacgagacccccggcggcuacugccugaccagauggaugcugaucgaggccgagcugaagugcuucggcaacaccgccguggccaagugcaacgagaagcacgacgaggaguucugcgacaugcugagacuguucgacuucaacaagcaggccaucagaagacugaagaccgaggcccagaugagcauccagcugaucaacaaggccgugaacgcccugaucaacgaccagcugaucaugaagaaccaccugagagacaucaugugcauccccuacugcaacuacagcaaguacugguaccugaaccacaccgugaccggcaagaccagccugcccagaugcuggcuggugagcaacggcagcuaccugaacgagacccacuucagcgacgacaucgagcagcaggccgacaacaugaucaccgagcugcugcagaaggaguacaucgacagacagggcaagaccccccugggccugguggaccuguucguguucagcaccagcuucuaccugaucagcaucuuccugcaccuggugaagauccccacccacagacacgugaucggcaagcccugccccaagccccacagacugaaccacaugggcaucugcagcugcggccuguacaagcaccccggcgugcccgugaaguggaagagaugaggacuagucccuguucccagagcccacuuuuuuuucuuuuuuugaaauaaaauagccugucuuucagaucucaaaggcucuuuucagagccaccaaaaaaaaaaaaaaaaaaaaaaaaaaaaaaaaaaaaaaaaaaaaaaaaaaaaaaaaaaaaaaaaaaaaaaaaaaaaaaaaaaaaaaaaaaaaaaaaaaaaa

SEQ ID NO: 35571 - RNA, 1764 nt, Artificial Sequence
  mRNA product Design a-2 (hSL-A100) comprising derived and/or modified sequence from LASV(LASV003-NIG-2008;Clade II)__AIT17580__GPCmut9 (opt4)
aggagaguccgcucagccagguugcagaagcggcuuagcguguguccuaaucuucucucugcguguagguaggccugugccgcaaacaagcuuaccaugggccagaucaucaccuucuuccaggaggugccccacgugaucgaggaggugaugaacaucgugcugaucgcccugagccugcuggccauccugaagggcaucuacaacguggccaccugcggccuguucggccuggugagcuuccugcugcugugcggcagaagcugcagcaccaccuacaagggcguguacgagcugcagacccuggagcuggacauggccagccugaacaugaccaugccccugagcugcaccaagaacaacagccaccacuacaucauggugggcaacgagaccggccuggagcugacccugaccaacaccagcaucaucaaccacaaguucugcaaccugagcgacgcccacaagaagaaccuguacgaccacgcccugaugagcaucaucagcaccuuccaccugagcauccccaacuucaaccaguacgaggccaugagcugcgacuucaacggcggcaagaucagcgugcaguacaaccugagccacaccuacgccguggacgccgccaaccacugcggcaccaucgccaacggcgugcugcagaccuucaugagaauggccuggggcggcagcuacaucgcccuggacagcggcugcggcagcugggacugcaucaugaccagcuaccaguaccugaucauccagaacaccaccugggaggaccacugccaguucagcagacccagccccaucggcuaccugggccugcugagccagagaaccagagacaucuacaucagcagaagacugcugggcaccuucaccuggacccugagcgacagcgagagcaacgagacccccggcggcuacugccugaccagauggaugcugaucgaggccgagcugaagugcuucggcaacaccgccguggccaagugcaacgagaagcacgacgaggaguucugcgacaugcugagacuguucgacuucaacaagcaggccaucagaagacugaaggccgaggcccagaugagcauccagcugaucaacaaggccgugaacgcccugaucaacgaccagcugaucaugaagaaccaccugagagacaucaugugcauccccuacugcaacuacagcaaguacugguaccugaaccacaccgugaccggcagaaccagccugcccagaugcuggcuggugagcaacggcagcuaccugaacgagacccacuucagcgacgacaucgagcagcaggccgacaacaugaucaccgagcugcugcagaaggaguacauggacagacagggcaagaccccccugggccugguggaccuguucguguucagcaccagcuucuaccugaucagcaucuuccugcaccuggugaagauccccacccacagacacgugaucggcaagcccugccccaagccccacagacugaaccacaugggcaucugcagcugcggccuguacaagcaccccggcgugcccgugaaguggaagagaugaggacuagucccuguucccagagcccacuuuuuuuucuuuuuuugaaauaaaauagccugucuuucagaucucaaaggcucuuuucagagccaccaaaaaaaaaaaaaaaaaaaaaaaaaaaaaaaaaaaaaaaaaaaaaaaaaaaaaaaaaaaaaaaaaaaaaaaaaaaaaaaaaaaaaaaaaaaaaaaaaaaaa

SEQ ID NO: 35572 - RNA, 1764 nt, Artificial Sequence
  mRNA product Design a-2 (hSL-A100) comprising derived and/or modified sequence from LASV(LASV035-NIG-2009;Clade II)__AIT17588__GPCmut9 (opt4)
aggagaguccgcucagccagguugcagaagcggcuuagcguguguccuaaucuucucucugcguguagguaggccugugccgcaaacaagcuuaccaugggccagaucaucaccuucuuccaggaggugccccacgugaucgaggaggugaugaacaucgugcugaucgcccugagccugcuggccauccugaagggcaucuacaacguggccaccugcggccuguucggccuggugagcuuccugcugcugugcggcagaagcugcagcaccaccuacaagggcguguacgagcugcagacccuggagcuggacauggccagccugaacaugaccaugccccugagcugcaccaagaacaacagccaccacuacaucauggugggcaacgagaccggccuggagcugacccugaccaacaccagcaucaucaaccacaaguucugcaaccugagcgacgcccacaagaagaaccuguacgaccacgcccugaugagcaucaucagcaccuuccaccugagcauccccaacuucaaccaguacgaggccaugagcugcgacuucaacggcggcaagaucagcgugcaguacaaccugagccacgccuacgccguggacgccgccaaccacugcggcaccaucgccaacggcgugcugcagaccuucaugagaauggccuggggcggcagcuacaucgcccuggacagcggcugcggcagcugggacugcaucaugaccagcuaccaguaccugaucauccagaacaccaccugggaggaccacugccaguucagcagacccagccccaucggcuaccugggccugcugagccagagaaccagagacaucuacaucagcagaagacugcugggcaccuucaccuggacccugagcgacagcgagggcaacgagacccccggcggcuacugccugaccagauggaugcugaucgaggccgagcugaagugcuucggcaacaccgccguggccaagugcaacgagaagcacgacgaggaguucugcgacaugcugagacuguucgacuucaacaagcaggccaucagaagacugaaggccgaggcccagaugagcauccagcugaucaacaaggccgugaacgcccugaucaacgaccagcugaucaugaagaaccaccugagagacaucaugugcauccccuacugcaacuacagcaaguacugguaccugaaccacaccgugaccggcaagaccagccugcccagaugcuggcuggugagcaacggcagcuaccugaacgagacccacuucagcgacgacaucgagcagcaggccgacaacaugaucaccgagcugcugcagaaggaguacaucgacagacagggcaagaccccccugggccugguggaccuguucguguucagcaccagcuucuaccugaucagcaucuuccugcaccuggugaagauccccacccacagacacgugaucggcaagcccugccccaagccccacagacugaaccacaugggcaucugcagcugcggccuguacaagcaccccggcgugcccgugaaguggaagagaugaggacuagucccuguucccagagcccacuuuuuuuucuuuuuuugaaauaaaauagccugucuuucagaucucaaaggcucuuuucagagccaccaaaaaaaaaaaaaaaaaaaaaaaaaaaaaaaaaaaaaaaaaaaaaaaaaaaaaaaaaaaaaaaaaaaaaaaaaaaaaaaaaaaaaaaaaaaaaaaaaaaaa

SEQ ID NO: 35573 - RNA, 1764 nt, Artificial Sequence
  mRNA product Design a-2 (hSL-A100) comprising derived and/or modified sequence from LASV(LASV1000-NIG-2009;Clade II)__AIT17782__GPCmut9 (opt4)
aggagaguccgcucagccagguugcagaagcggcuuagcguguguccuaaucuucucucugcguguagguaggccugugccgcaaacaagcuuaccaugggccagaucaucaccuucuuccaggaggugccccacgugaucgaggaggugaugaacaucgugcugaucgcccugagccugcuggccauccugaagggcaucuacaacguggccaccugcggccuguucggccuggugagcuuccugcugcugugcggcagaagcugcagcaccaccuacaagggcguguacgagcugcagacccuggagcuggacauggccagccugaacaugaccaugccccugagcugcaccaagaacaacagccaccacuacaucauggugggcaacgagaccggccuggagcugacccugaccaacaccagcaucaucaaccacaaguucugcaaccugagcgacgcccacaagaagaaccuguacgaccacgcccugaugagcaucaucagcaccuuccaccugagcauccccaacuucaaccaguacgaggccaugagcugcgacuucaacggcggcaagaucagcgugcaguacaaccugagccacaccuacgccguggacgccgccaaccacugcggcaccaucgccaacggcgugcugcagaccuucaugagaauggccuggggcggcagcuacaucgcccuggacagcggcugcggcagcugggacugcaucaugaccagcuaccaguaccugaucauccagaacaccaccugggaggaccacugccaguucagcagacccagccccaucggcuaccugggccugcugagccagagaaccagagacaucuacaucagcagaagacugcugggcaccuucaccuggacccugagcgacagcgagggcaacgagacccccggcggcuacugccugaccagauggaugcugaucgaggccgagcugaagugcuucggcaacaccgccguggccaagugcaacgagaagcacgacgaggaguucugcgacaugcugagacuguucgacuucaacaagcaggccaucaagagacugaagaccgaggcccagaugagcauccagcugaucaacaaggccgugaacgcccugaucaacgaccagcugaucaugaagaaccaccugagagacaucaugugcauccccuacugcaacuacagcaaguacugguaccugaaccacaccgugaccggcaagaccagccugcccagaugcuggcuggugagcaacggcagcuaccugaacgagacccacuucagcgacgacaucgagcagcaggccgacaacaugaucaccgagcugcugcagaaggaguacaucgacagacagggcaagaccccccugggccugguggaccuguucguguucagcaccagcuucuaccugaucagcaucuuccugcaccuggugaagauccccacccacagacacguggugggcaagcccugccccaagccccacagacugaaccacaugggcaucugcagcugcggccuguacaagcaccccggcgugcccgugaaguggaagagaugaggacuagucccuguucccagagcccacuuuuuuuucuuuuuuugaaauaaaauagccugucuuucagaucucaaaggcucuuuucagagccaccaaaaaaaaaaaaaaaaaaaaaaaaaaaaaaaaaaaaaaaaaaaaaaaaaaaaaaaaaaaaaaaaaaaaaaaaaaaaaaaaaaaaaaaaaaaaaaaaaaaaa

SEQ ID NO: 35574 - RNA, 1764 nt, Artificial Sequence
  mRNA product Design a-2 (hSL-A100) comprising derived and/or modified sequence from LASV(LASV221-NIG-2010;Clade II)__AIT17624__GPCmut9 (opt4)
aggagaguccgcucagccagguugcagaagcggcuuagcguguguccuaaucuucucucugcguguagguaggccugugccgcaaacaagcuuaccaugggccagaucaucaccuucuuccaggaggugccccacgugaucgaggaggugaugaacaucgugcugaucgcccugagccugcuggccauccugaagggcaucuacaacguggccaccugcggccuguucggccuggugagcuuccugcugcugugcggcagaagcugcagcaccaccuacaagggcguguacgagcugcagacccuggagcuggacauggccagccugaacaugaccaugccccugagcugcaccaagaacaacagccaccacuacaucauggugggcaacgagaccggccuggagcugacccugaccaacaccagcaucaucaaccacaaguucugcaaccugagcgacgcccacaagaagaaccuguacgaccacgcccugaugagcaucaucagcaccuuccaccugagcauccccaacuucaaccaguacgaggccaugagcugcgacuucaacggcggcaagaucagcgugcaguacaaccugagccacaccuacgccaucgacgccgccaaccacugcggcaccaucgccaacggcgugcugcagaccuucaugagaauggccuggggcggcagcuacaucgcccuggacagcggcugcggcagcugggacugcaucaugaccagcuaccaguaccugaucauccagaacaccaccugggaggaccacugccaguucagcagacccagccccaucggcuaccugggccugcugagccagagaaccagagacaucuacaucagcagaagacugcugggcaccuucaccuggacccugagcgacagcgagggcaacgagacccccggcggcuacugccugaccagauggaugcugaucgaggccgagcugaagugcuucggcaacaccgccguggccaagugcaacgagaagcacgacgaggaguucugcgacaugcugagacuguucgacuucaacaagcaggccaucagaagacugaagaccgaggcccagaugagcauccagcugaucaacaaggccgugaacgcccugaucaacgaccagcugaucaugaagaaccaccugagagacaucaugugcauccccuacugcaacuacagcaaguacugguaccugaaccacaccgugaccggcaagaccagccugcccagaugcuggcuggugagcaacggcagcuaccugaacgagacccacuucagcgacgacaucgagcagcaggccgacaacaugaucaccgagaugcugcagaaggaguacauggacagacagggcaagaccccccugggccugguggaccuguucguguucagcaccagcuucuaccugaucagcaucuuccugcaccuggugaagauccccacccacagacacgugaucggcaagcccugccccaagccccacagacugaaccacaugggcaucugcagcugcggccuguacaagcaccccggcgugcccgugaaguggaagagaugaggacuagucccuguucccagagcccacuuuuuuuucuuuuuuugaaauaaaauagccugucuuucagaucucaaaggcucuuuucagagccaccaaaaaaaaaaaaaaaaaaaaaaaaaaaaaaaaaaaaaaaaaaaaaaaaaaaaaaaaaaaaaaaaaaaaaaaaaaaaaaaaaaaaaaaaaaaaaaaaaaaaa

SEQ ID NO: 35575 - RNA, 1764 nt, Artificial Sequence
  mRNA product Design a-2 (hSL-A100) comprising derived and/or modified sequence from LASV(LASV237-NIG-2010;Clade II)__AIT17638__GPCmut9 (opt4)
aggagaguccgcucagccagguugcagaagcggcuuagcguguguccuaaucuucucucugcguguagguaggccugugccgcaaacaagcuuaccaugggccagaucaucaccuucuuccaggaggugccccacgugaucgaggaggugaugaacaucgugcugaucgcccugagccugcuggccauccugaagggcaucuacaacguggccaccugcggccuguucggccuggugagcuuccugcugcugugcggcagaagcugcagcaccaccuacaagggcguguacgagcugcagacccuggagcuggacauggccagccugaacaugaccaugccccugagcugcaccaagaacaacagccaccacuacaucauggugggcaacgagaccggccuggagcugacccugaccaacaccagcaucaucaaccacaaguucugcaaccugagcgacgcccacaagaaggaccuguacgaccacgcccugaugagcaucaucagcaccuuccaccugagcauccccaacuucaaccaguacgaggccaugagcugcgacuucaacggcggcaagaucagcgugcaguacaaccugagccacaccuacgccguggacgccgccaaccacugcggcaccaucgccaacggcgugcugcagaccuucaugagaauggccuggggcggcagcuacaucgcccuggacagcggcugcggcagcugggacugcaucaugaccagcuaccaguaccugaucauccagaacaccaccugggaggaccacugccaguucagcagacccagccccaucggcuaccugggccugcugagccagagaaccagagacaucuacaucagcagaagacugcugggcaccuucaccuggacccugagcgacagcgagggcaacgagacccccggcggcuacugccugaccagauggaugcugaucgaggccgagcugaagugcuucggcaacaccgccguggccaagugcaacgagaagcacgacgaggaguucugcgacaugcugagacuguucgacuucaacaagcaggccaucagaagacugaagaccgaggcccagaugagcauccagcugaucaacaaggccgugaacgcccugaucaacgaccagcugaucaugaagaaccaccugagagacaucaugugcauccccuacugcaacuacagcaaguacugguaccugaaccacaccgugaccggcaagaccagccugcccagaugcuggcuggugagcaacggcagcuaccugaacgagacccacuucagcgacgacaucgagcagcaggccgacaacaugaucaccgagcugcugcagaaggaguacauggacagacagggcaagaccccccugggccugguggaccuguucguguucagcaccagcuucuaccugaucagcaucuuccugcaccugaucaagauccccacccacagacacaucaccggcaagcccugccccaagccccacagacugaaccacaugggcaucugcagcugcggccuguacaagcaccccggcgugcccgugaaguggaagagaugaggacuagucccuguucccagagcccacuuuuuuuucuuuuuuugaaauaaaauagccugucuuucagaucucaaaggcucuuuucagagccaccaaaaaaaaaaaaaaaaaaaaaaaaaaaaaaaaaaaaaaaaaaaaaaaaaaaaaaaaaaaaaaaaaaaaaaaaaaaaaaaaaaaaaaaaaaaaaaaaaaaaa

SEQ ID NO: 35576 - RNA, 1764 nt, Artificial Sequence
  mRNA product Design a-2 (hSL-A100) comprising derived and/or modified sequence from LASV(LASV253-NIG-2011;Clade II)__AIT17670__GPCmut9 (opt4)
aggagaguccgcucagccagguugcagaagcggcuuagcguguguccuaaucuucucucugcguguagguaggccugugccgcaaacaagcuuaccaugggccagaucaucaccuucuuccaggaggugccccacgugaucgaggaggugaugaacaucgugcugaucgcccugagccugcuggccauccugaagggcaucuacaacguggccaccugcggccuguucggccuggugagcuuccugcugcugugcggcagaagcugcagcaccaccuacaagggcguguacgagcugcagacccuggagcuggacauggccagccugaacaugaccaugccccugagcugcaccaagaacaacagccaccacuacaucauggugggcaacgagaccggccuggagcugacccugaccaacaccagcaucaucaaccacaaguucugcaaccugagcgacgcccacaagaagaaccuguacgaccacgcccugaugagcaucaucagcaccuuccaccugagcauccccaacuucaaccaguacgaggccaugagcugcgacuucaacggcggcaagaucagcgugcaguacaaccugagccacaccuacgccguggacgccgccaaccacugcggcaccaucgccaacggcgugcugcagaccuucaugagaauggccuggggcggcagcuacaucgcccuggacagcggcugcggcagcugggacugcaucaugaccagcuaccaguaccugaucauccagaacaccaccugggaggaccacugccaguucagcagacccagccccaucggcuaccugggccugcugagccagagaaccagagacaucuacaucagcagaagacugcugggcaccuucaccuggacccugagcgacagcgagggcaacgagacccccggcggcuacugccugaccagauggaugcugaucgaggccgagcugaagugcuucggcaacaccgccguggccaagugcaacgagaagcacgacgaggaguucugcgacaugcugagacuguucgacuucaacaagcaggccaucagaagacugaaggccgaggcccagaugagcauccagcugaucaacaaggccgugaacgcccugaucaacgaccagcugaucaugaagaaccaccugagagacaucaugugcauccccuacugcaacuacagcaaguacugguaccugaaccacaccgugaccggcagaaccagccugcccagaugcuggcuggugagcaacggcagcuaccugaacgagacccacuucagcgacgacaucgagcagcaggccgacaacaugaucaccgagcugcugcagaaggaguacaucgacagacagggcaagaccccccugggccugguggaccuguucguguucagcaccagcuucuaccugaucagcaucuuccugcaccuggugaagauccccacccacagacacaucaucggcaagcccugccccaagccccacagacugaaccacaugggcaucugcagcugcggccuguacaagcaccccggcgugcccgugaaguggaagagaugaggacuagucccuguucccagagcccacuuuuuuuucuuuuuuugaaauaaaauagccugucuuucagaucucaaaggcucuuuucagagccaccaaaaaaaaaaaaaaaaaaaaaaaaaaaaaaaaaaaaaaaaaaaaaaaaaaaaaaaaaaaaaaaaaaaaaaaaaaaaaaaaaaaaaaaaaaaaaaaaaaaaa

SEQ ID NO: 35577 - RNA, 1764 nt, Artificial Sequence
  mRNA product Design a-2 (hSL-A100) comprising derived and/or modified sequence from LASV(LASV254-NIG-2011;Clade II)__AIT17674__GPCmut9 (opt4)
aggagaguccgcucagccagguugcagaagcggcuuagcguguguccuaaucuucucucugcguguagguaggccugugccgcaaacaagcuuaccaugggccagaucaucaccuucuuccaggaggugccccacgugaucgaggaggugaugaacaucgugcugaucgcccugagccugcuggccauccugaagggcaucuacaacguggccaccugcggccuguucggccuggugagcuuccugcugcugugcggcagaagcugcagcaccaccuacaagggcguguacgagcugcagacccuggagcuggacaugaccaaccugaacaugaccaugccccugagcugcaccaagaacaacagccaccacuacaucauggugggcaacgagaccggccuggagcugacccugaccaacaccagcaucaucaaccacaaguucugcaaccugagcgacgcccacaagaagaaccuguacaaccacgcccugaugagcaucaucagcaccuuccaccugagcauccccaacuucaaccaguacgaggccaugagcugcgacuucaacggcggcaagaucagcgugcaguacaaccugagccacagcuacgccguggacgccgccaaccacugcggcaccaucgccaacggcgugcugcagaccuucaugagaauggccuggggcggcagcuacaucgcccuggacagcggcugcggcaacugggacugcaucaugaccagcuaccaguaccugaucauccagaacaccaccugggaggaccacugccaguucagcagacccagccccaucggcuaccugggccugcugagccagagaaccagagacaucuacaucagcagaagacugcugggcaccuucaccuggacccugagcgacagcgagggcaacgagacccccggcggcuacugccugaccagauggaugcugaucgaggccgagcugaagugcuucggcaacaccgccguggccaagugcaacgagaagcacgacgaggaguucugcgacaugcugagacuguucgacuucaacaagcaggccaucagaagacugaagaccgaggcccaggccaacauccagcugaucaacaaggccgugaacgcccugaucaacgaccagcugaucaugaagaaccaccugagagacaucaugugcauccccuacugcaacuacagcaaguacugguaccugaaccacaccgugaccggcaagaccagccugcccagaugcuggcuggugagcaacggcagcuaccugaacgagacccacuucagcgacgacaucgagcagcaggccgacaacaugaucaccgagcugcugcagaaggaguacauggacagacagggcaagaccccccugggccugguggaccuguucguguucagcaccagcuucuaccugaucagcaucuuccugcaccuggugaagauccccacccacagacacgugaucggcaagcccugccccaagccccacagacugaaccacaugggcaucugcagcugcggccuguacaagcaccccggcgugcccgugaaguggaagagaugaggacuagucccuguucccagagcccacuuuuuuuucuuuuuuugaaauaaaauagccugucuuucagaucucaaaggcucuuuucagagccaccaaaaaaaaaaaaaaaaaaaaaaaaaaaaaaaaaaaaaaaaaaaaaaaaaaaaaaaaaaaaaaaaaaaaaaaaaaaaaaaaaaaaaaaaaaaaaaaaaaaaa

SEQ ID NO: 35578 - RNA, 1764 nt, Artificial Sequence
  mRNA product Design a-2 (hSL-A100) comprising derived and/or modified sequence from LASV(Nig08-A19;Clade III)__ADU56618__GPCmut9 (opt4)
aggagaguccgcucagccagguugcagaagcggcuuagcguguguccuaaucuucucucugcguguagguaggccugugccgcaaacaagcuuaccaugggccagaucgugaccuucuuccaggaggugccccacgugaucgaggaggugaugaacaucgugcugaucgcccugagcauccuggccauccugaagggccuguacaacaucgccaccugcggccugaucggccuggugaccuuccugcugcugagcggcagaagcugcagcaugaccuacaagggcguguacgagcugcagacccuggagcugaacaugaacacccugaacaugaccaugccccugagcugcaccaagaacaacagccaccacuacaucauggugggcaacgagaccggccuggagcugacccugaccaacaccagccugcugcaccacaaguucugcaaccugagcgacgcccacaagaagaaccuguacgaccacacccugaugagcaucaucagcaccuuccaccugagcauccccaacuucaaccaguacgaggccaugagcugcgacuucaacggcggcaagaucaccgugcaguacaaccugagccacagcuacgccaucgacgccgccaaccacugcggcaccguggccaacggcgugcugcagaccuucaugagaauggccuggggcggcagcuacaucgcccuggacagcggcugcggcaagugggacugcaucaugaccagcuaccaguaccugaucauccagaacaccaccugggaggaccacugccaguucagcagacccagccccaucggcuaccugggccugcugagccagagaaccagagacaucuacaucagcagaagacugcugggcaccuucaccuggacccugagcgacagcgagggcaacgagacccccggcggcuacugccugaccagauggaugcugaucgaggccgagcugaagugcuucggcaacaccgccguggccaagugcaacgagaagcacgacgaggaguucugcgacaugcugagacuguucgacuucaacaagcaggccaucagaagacugaaggccgaggcccagaugagcauccagcugaucaacaaggccgugaacgcccugaucaacgaccagcugaucaugaagaaccaccugagagacaucaugugcauccccuacugcaacuacagcaaguacugguaccugaaccacaccagcaccggcagaaccagccugcccagaugcuggcuggugagcaacggcagcuaccugaacgagacccacuucagcgacgacaucgagcagcaggccgacaacaugaucaccgagaugcugcagaaggaguaccuggacagacagggcaagaccccccugggccugguggaccuguucguguucagcaccagcuucuaccugaucagcaucuuccugcaccuggugaagauccccacccacagacacaucgugggcaagcccugccccaagccccacagacugaaccacaugggcaucugcagcugcggccuguacaagcagcccggcgugcccgugagauggaagagaugaggacuagucccuguucccagagcccacuuuuuuuucuuuuuuugaaauaaaauagccugucuuucagaucucaaaggcucuuuucagagccaccaaaaaaaaaaaaaaaaaaaaaaaaaaaaaaaaaaaaaaaaaaaaaaaaaaaaaaaaaaaaaaaaaaaaaaaaaaaaaaaaaaaaaaaaaaaaaaaaaaaaa

SEQ ID NO: 35579 - RNA, 1767 nt, Artificial Sequence
  mRNA product Design a-2 (hSL-A100) comprising derived and/or modified sequence from LASV(G1180-SLE-2010;Clade IV)__AIT17168__GPCmut9 (opt4)
aggagaguccgcucagccagguugcagaagcggcuuagcguguguccuaaucuucucucugcguguagguaggccugugccgcaaacaagcuuaccaugggccagaucgugaccuucuuccaggaggugccccacgugaucgaggaggugaugaacaucgugcugaucgcccugagcauccuggccgugcugaagggccuguacaacuucgccaccugcggccuggugggccugcugaccuuccugcugcugugcggcagaagcugcaccgccagcagauacaagggcguguacgagcugcagacccuggagcugaacauggagacccugaacaugaccaugccccugagcugcaccaagaacaacagccaccacuacaucauggugggcaacgagaccggccuggagcugacccugaccaacaccagcaucaucaaccacaaguucugcaaccugagcgacgcccacaagaagaaccuguacgaccacgcccugaugagcaucaucagcaccuuccaccugagcauccccaacuucaaccaguacgaggccaugagcugcgacuucaacggcggcaagaucagcgugcaguacaaccugagccacagcuacgccggcgacgccgccaaccacugcggcaccguggccaacggcgugcugcagaccuucaugagaauggccuggggcggcagcuacaucgcccuggacagcggcugcggcagcugggacugcaucaugaccagcuaccaguaccugaucauccagaacaccaccugggaggaccacugccaguucagcagacccagccccaucggcuaccugggccugcugagccagagaaccagagacaucuacaucagcagaagacugcugggcaccuucaccuggacccugagcgacagcgagggcaaggacacccccggcggcuacugccugaccagauggaugcugaucgaggccgagcugaagugcuucggcaacaccgccguggccaagugcaacgagaagcacgacgaggaguucugcgacaugcugagacuguucgacuucaacaagcaggccauccagagacugaaggccgaggcccagaugagcauccagcugaucaacaaggccgugaacgcccugaucaacgaccagcugaucaugaagaaccaccugagagacaucaugugcauccccuacugcaacuacagcaaguacugguaccugaaccacaccaccaccggcaagaccagccugcccaagugcuggcuggugagcaacggcagcuaccugaacgagacccacuucagcgacgacaucgagcagcaggccgacaacaugaucaccgagaugcugcagaaggaguacauggagagacagggcaagaccccccugggccugguggaccuguucguguucagcaccagcuucuaccugaucagcaucuuccugcaccuggugaagauccccacccacagacacaucgugggcaagagcugccccaagccccacagacugaaccacaugggcaucugcagcugcggccuguacaagcagcccggcgugcccgugaaguggaagagaugaggacuagucccuguucccagagcccacuuuuuuuucuuuuuuugaaauaaaauagccugucuuucagaucucaaaggcucuuuucagagccaccaaaaaaaaaaaaaaaaaaaaaaaaaaaaaaaaaaaaaaaaaaaaaaaaaaaaaaaaaaaaaaaaaaaaaaaaaaaaaaaaaaaaaaaaaaaaaaaaaaaaa

SEQ ID NO: 35580 - RNA, 1767 nt, Artificial Sequence
  mRNA product Design a-2 (hSL-A100) comprising derived and/or modified sequence from LASV(G1442-SLE-2011;Clade IV)__AIT17180__GPCmut9 (opt4)
aggagaguccgcucagccagguugcagaagcggcuuagcguguguccuaaucuucucucugcguguagguaggccugugccgcaaacaagcuuaccaugggccagaucgugaccuucuuccaggaggugccccacgugaucgaggaggugaugaacaucgugcugaucgcccugagcauccuggccgugcugaagggccuguacaacguggccaccugcggccugaucggccuggugaccuuccugcugcugugcggcagaagcugcaccaccacccuguacaagggcguguacgagcugcagacccuggagcugaacauggagacccugaacaugaccaugccccugagcugcaccaagaacaacagccaccacuacaucagagugggcaacgagaccggccuggagcugacccugaccaacaccagcaucaucaaccacaaguucugcaaccugagcgacgcccacaagaagaaccuguacgaccacgcccugaugagcaucaucagcaccuuccaccugagcauccccaacuucaaccaguacgaggccaugagcugcgacuucaacggcggcaagaucagcgugcaguacaaccugagccacagcuacgccggcgacgccgccaaccacugcggcaccguggccaacggcgugcugcagaccuucaugagaauggccuggggcggcagcuacaucgcccuggacagcggcugcggcaacugggacugcaucaugaccagcuaccaguaccugaucauccagaacaccaccugggacgaccacugccaguucagcagacccagccccaucggcuaccugggccugcugagccagagaaccagagacguguacaucagcagaagacugcugggcaccuucaccuggacccugagcgacagcgagggcaaggacacccccggcggcuacugccugaccagauggaugcugaucgaggccgagcugaagugcuucggcaacaccgccguggccaagugcaacgagaagcacgacgaggaguucugcgacaugcugagacuguucgacuucaacaagcaggccauccagagacugaaggccgaggcccagaugagcauccagcugaucaacaaggccgugaacgcccugaucaacgaccagcugaucaugaagaaccaccugagagacaucaugugcauccccuacugcaacuacagcaaguacugguaccugaacaacaccgccaccggcaagaccagccugcccaagugcuggcugaucagcaacggcagcuaccugaacgagacccacuucagcgacgacaucgagcaggaggccgacaacaugaucaccgagaugcugcagaaggaguacauggagagacagggcaagaccccccugggccugguggaccuguucguguucagcaccagcuucuaccugaucagcaucuuccugcaccuggugaagauccccacccacagacacaucgugggcaagagcugccccaagccccacagacugaaccacaugggcaucugcagcugcggccuguacaagcagcccggcgugcccgugagauggaagagaugaggacuagucccuguucccagagcccacuuuuuuuucuuuuuuugaaauaaaauagccugucuuucagaucucaaaggcucuuuucagagccaccaaaaaaaaaaaaaaaaaaaaaaaaaaaaaaaaaaaaaaaaaaaaaaaaaaaaaaaaaaaaaaaaaaaaaaaaaaaaaaaaaaaaaaaaaaaaaaaaaaaaa

SEQ ID NO: 35581 - RNA, 1767 nt, Artificial Sequence
  mRNA product Design a-2 (hSL-A100) comprising derived and/or modified sequence from LASV(G3010-SLE-2013;Clade IV)__AIT17344__GPCmut9 (opt4)
aggagaguccgcucagccagguugcagaagcggcuuagcguguguccuaaucuucucucugcguguagguaggccugugccgcaaacaagcuuaccaugggccagaucgugaccuucuuccaggaggugccccacgugaucgaggaggugaugaacaucgugcugaucgcccugagcauccuggccgugcugaagggccuguacaacuucgccaccugcggccuggugggccuggugaccuuccugcugcugugcggcagaagcugcaccaccagccuguacaagggcguguacgagcugcagacccuggagcugaacauggagacccugaacaugaccaugccccugagcugcaccaagaacaacagccaccacuacaucauggugggcaacgagaccggccuggagcugacccugaccaacaccagcaucaucaaccacaaguucugcaaccugagcgacgcccacaagaagaaccuguacaaccacgcccugaugagcaucaucagcaccuuccaccugagcauccccaacuucaaccaguacgaggccaugagcugcgacuucaacggcggcaagaucagcgugcaguacaaccugagccacagcuacgccggcgacgccgccagccacugcggcaccguggccaacggcgugcugcagaccuucaugagaauggccuggggcggcagcuacaucgcccuggacagcggcugcggcaagugggacugcaucaugaccagcuaccaguaccugaucauccagaacaccaccugggaggaccacugccaguucagcagacccagccccaucggcuaccugggccugcugagccagagaaccagagacaucuacaucagcagaagacugcugggcaccuucaccuggacccugagcgacagcgagggcaaggacacccccggcggcuacugccugaccagauggaugcugaucgaggccgagcugaagugcuucggcaacaccgccguggccaagugcaacgagaagcacgacgaggaguucugcgacaugcugagacuguucgacuucaacaagcaggccauccagagacugaagaccgaggcccagaugagcauccagcugaucaacaaggccgugaacgcccugaucaacgaccagcugaucaugaagaaccaccugagagacaucaugugcauccccuacugcaacuacagcaaguacugguaccugaaccacaccaccaccggcaagaccagccugcccaagugcuggcuggugagcaacggcagcuaccugaacgagacccacuucagcgacgacaucgagcagcaggccgacaacaugaucaccgagaugcugcagaaggaguacauggagagacagggcaagaccccccugggccugguggaccuguucguguucagcaccagcuucuaccugaucagcaucuuccugcaccuggugaagauccccacccacagacacaucgugggcaagagcugccccaagccccacagacugaaccacaugggcaucugcagcugcggccuguacaagcagcccggcgugcccgugagauggaagagaugaggacuagucccuguucccagagcccacuuuuuuuucuuuuuuugaaauaaaauagccugucuuucagaucucaaaggcucuuuucagagccaccaaaaaaaaaaaaaaaaaaaaaaaaaaaaaaaaaaaaaaaaaaaaaaaaaaaaaaaaaaaaaaaaaaaaaaaaaaaaaaaaaaaaaaaaaaaaaaaaaaaaa

SEQ ID NO: 35582 - RNA, 1767 nt, Artificial Sequence
  mRNA product Design a-2 (hSL-A100) comprising derived and/or modified sequence from LASV(G502-SLE-2009;Clade IV)__AIT17126__GPCmut9 (opt4)
aggagaguccgcucagccagguugcagaagcggcuuagcguguguccuaaucuucucucugcguguagguaggccugugccgcaaacaagcuuaccaugggccagaucgugaccuucuuccaggaggugccccacgugaucgaggaggugaugaacaucgugcugaucgcccugagcauccuggccgugcugaagggccuguacaacuucgccaccugcggccuggugggccugcugaccuuccugcugcugugcggcagaagcugcaccaccggccuguacaagggcguguacgagcugcagacccuggagcugaacauggagacccugaacaugaccaugccccugagcugcaccaagaacaacagccaccacuacaucauggugggcaacgagaccggccuggagcugacccugaccaacaccagcaucaucaaccacaaguucugcaaccugagcgacgcccacaagaagaaccuguacgaccacgcccugaugagcaucaucagcaccuuccaccugagcauccccaacuucaaccaguacgaggccaugagcugcgacuucaacggcggcaagaucagcgugcaguacaaccugagccacagcuacgccggcgacgccgccgaccacugcggcaccguggccaacggcgugcugcagaccuucaugagaauggccuggggcggcagcuacaucgcccuggacagcggcugcggcagaugggacugcaucaugaccagcuaccaguaccugaucauccagaacaccaccugggaggaccacugccaguucagcagacccagccccaucggcuaccugggccugcugagccagagaaccagagacaucuacaucagcagaagacugcugggcaccuucaccuggacccugagcgacagcgagggcaaggacacccccggcggcuacugccugaccagauggaugcugaucgaggccgagcugaagugcuucggcaacaccgccguggccaagugcaacgagaagcacgacgaggaguucugcgacaugcugagacuguucgacuucaacaagcaggccauccagagacugaaggccgaggcccagaugagcauccagcugaucaacaaggccgugaacgcccugaucaacgaccagcuggugaugaagaaccaccugagagacaucaugugcauccccuacugcaacuacagcagauacugguaccugaaccacaccaccaccggcagaaccagccugcccaagugcuggcuggugagcaacggcagcuaccugaacgagacccacuucagcgacgacaucgagcagcaggccgacaacaugaucaccgagaugcugcagaaggaguacauggagagacagggcaagaccccccugggccugguggaccuguucguguucagcaccagcuucuaccugaucagcaucuuccugcaccuggugaagauccccacccacagacacaucgugggcaagagcugccccaagccccacagacugaaccacaugggcaucugcagcugcggccuguacaagcagcccggcgugcccgugaaguggaagagaugaggacuagucccuguucccagagcccacuuuuuuuucuuuuuuugaaauaaaauagccugucuuucagaucucaaaggcucuuuucagagccaccaaaaaaaaaaaaaaaaaaaaaaaaaaaaaaaaaaaaaaaaaaaaaaaaaaaaaaaaaaaaaaaaaaaaaaaaaaaaaaaaaaaaaaaaaaaaaaaaaaaaa

SEQ ID NO: 35583 - RNA, 1767 nt, Artificial Sequence
  mRNA product Design a-2 (hSL-A100) comprising derived and/or modified sequence from LASV(G733-SLE-2010;Clade IV)__AIT17154__GPCmut9 (opt4)
aggagaguccgcucagccagguugcagaagcggcuuagcguguguccuaaucuucucucugcguguagguaggccugugccgcaaacaagcuuaccaugggccagaucgugaccuucuuccaggaggugccccacgugaucgaggaggugaugaacaucgugcugaucgcccugagcauccuggccgugcugaagggccuguacaacuucgccaccugcggcaucgugggccuggugagcuuccugcugcugugcggcagaagcugcaccaccagccuguacaagggcguguacgagcugcagacccuggagcugaacauggagacccugaacaugaccaugccccugagcugcaccaagaacaacagccaccacuacaucauggugggcaacgagaccggccuggagcugacccugaccaacaccagcaucaucaaccacaaguucugcaaccugagcgacgcccacaagaagaaccuguacgaccacgcccugaugagcaucaucagcaccuuccaccugagcauccccaacuucaaccaguacgaggccaugagcugcgacuucaacggcggcaagaucagcgugcaguacaaccugagccacagcuacgccggcgacgccgccaaccacugcggcaccaucgccaacggcgugcugcagaccuucaugagaauggccuggggcggcagcuacaucgcccuggacagcggcugcgacagaugggacugcaucaugaccagcuaccaguaccugaucauccagaacaccaccugggaggaccacugccaguucagcagacccagccccaucggcuaccugggccugcugagccagagaaccagagacaucuacaucagcagaagacugcugggcaccuucaccuggacccugagcgacagcgagggcaaggacacccccggcggcuacugccugaccagauggaugcugaucgaggccgagcugaagugcuucggcaacaccgccguggccaagugcaacgagaagcacgacgaggaguucugcgacaugcugagacuguucgacuucaacaagcaggccauccagagacugaaggccgaggcccagaugagcauccagcugaucaacaaggccgugaacgcccugaucaacgaccagcugaucaugaagaaccaccugagagacaucaugugcauccccuacugcaacuacagcaaguacugguaccugaaccacaccaccaccggcaagaccagccugcccaagugcuggcuggugagcaacggcagcuaccugaacgagacccacuucagcgacgacaucgagcagcaggccgacaacaugaucaccgagaugcugcagaaggaguacauggagagacagggcaagaccccccugggccugguggaccuguucguguucagcaccagcuucuaccugaucagcaucuuccugcaccuggugaagauccccacccacagacacguggugggcaagagcugccccaagccccacagacugaaccacaugggcaucugcagcugcggccuguacggccagcccggcgugcccgugaaguggaagagaugaggacuagucccuguucccagagcccacuuuuuuuucuuuuuuugaaauaaaauagccugucuuucagaucucaaaggcucuuuucagagccaccaaaaaaaaaaaaaaaaaaaaaaaaaaaaaaaaaaaaaaaaaaaaaaaaaaaaaaaaaaaaaaaaaaaaaaaaaaaaaaaaaaaaaaaaaaaaaaaaaaaaa

SEQ ID NO: 35584 - RNA, 1767 nt, Artificial Sequence
  mRNA product Design a-2 (hSL-A100) comprising derived and/or modified sequence from MOPV/LASV reassortant(IGS-1;Clade IV)__AFY05576__GPCmut9 (opt4)
aggagaguccgcucagccagguugcagaagcggcuuagcguguguccuaaucuucucucugcguguagguaggccugugccgcaaacaagcuuaccaugggccagaucgugaccuucuuccaggaggugccccacgugaucgaggaggugaugaacaucgugcugaucgcccugagcgugcuggccgugcugaagggccuguacaacuucgccaccugcggccuggugggccuggugaccuuccugcugcugugcggcagaagcugcaccaccagccuguacaagggcguguacgagcugcagacccuggagcugaacauggagacccugaacaugaccaugccccugagcugcaccaagaacaacagccaccacuacaucauggugggcaacgagaccggccuggagcugacccugaccaacaccagcaucaucaaccacaaguucugcaaccugagcgacgcccacaagaagaaccuguacgaccacgcccugaugagcaucaucagcaccuuccaccugagcauccccaacuucaaccaguacgaggccaugagcugcgacuucaacggcggcaagaucagcgugcaguacaaccugagccacagcuacgccggcgacgccgccaaccacugcggcaccguggccaacggcgugcugcagaccuucaugagaauggccuggggcggcagcuacaucgcccuggacagcggcugcggcaacugggacugcaucaugaccagcuaccaguaccugaucauccagaacaccaccugggaggaccacugccaguucagcagacccagccccaucggcuaccugggccugcugagccagagaaccagagacaucuacaucagcagaagacugcugggcaccuucaccuggacccugagcgacagcgagggcgaggacacccccggcggcuacugccugaccagauggaugcugaucgaggccgagcugaagugcuucggcaacaccgccguggccaagugcaacgagaagcacgacgaggaguucugcgacaugcugagacuguucgacuucaacaagcaggccauccagagacugaaggccgaggcccagaugagcauccagcugaucaacaaggccgugaacgcccugaucaacgaccagcugaucaugaagaaccaccugagagacaucaugugcauccccuacugcaacuacagcaaguacugguaccugaaccacaccaccaccggcagaaccagccugcccaagugcuggcuggugagcaacggcagcuaccugaacgagacccacuucagcgacgacaucgagcagcaggccgacaacaugaucaccgagaugcugcagaaggaguacauggagagacagggcaagaccccccugggccugguggaccuguucguguucagcaccagcuucuaccugaucagcaucuuccugcaccuggugaagauccccacccacagacacaucgugggcaagagcugccccaagccccacagacugaaccacaugggcaucugcagcugcggccuguacaagcagcccggcgugcccgugaaguggaagagaugaggacuagucccuguucccagagcccacuuuuuuuucuuuuuuugaaauaaaauagccugucuuucagaucucaaaggcucuuuucagagccaccaaaaaaaaaaaaaaaaaaaaaaaaaaaaaaaaaaaaaaaaaaaaaaaaaaaaaaaaaaaaaaaaaaaaaaaaaaaaaaaaaaaaaaaaaaaaaaaaaaaaa

SEQ ID NO: 35585 - RNA, 1767 nt, Artificial Sequence
  mRNA product Design a-2 (hSL-A100) comprising derived and/or modified sequence from LASV(LM765-SLE-2012;Clade IV)__AIT17814__GPCmut9 (opt4)
aggagaguccgcucagccagguugcagaagcggcuuagcguguguccuaaucuucucucugcguguagguaggccugugccgcaaacaagcuuaccaugggccagaucgugaccuucuuccaggaggugccccacgugaucgaggaggugaugaacaucgugcugaucgcccugagcauccuggccgugcugaagggccuguacaacuucgccaccugcggccuggugggccuggugaccuuccugcugcugugcggcagaagcugcaccaccagccuguacaagggcguguacgagcugcagacccuggagcugaacauggagacccugaacaugaccaugccccugagcugcaccaagaacaacagccaccacuacaucauggugggcaacgagaccggccuggagcugacccugaccaacaccagcaucaucgaccacaaguucugcaaccugagcgacgcccacagaaagaaccuguacgaccacgcccugaugagcaucaucagcaccuuccaccugagcauccccaacuucaaccaguacgaggccaugagcugcgacuucaacggcggcaagaucagcgugcaguacaaccugagccacagcuacgccaaggacgccgccgaccacugcggcaccguggccaacggcgugcugcagaccuucaugagaauggccuggggcggcagcuacaucgcccuggacagcggcugcggcagaugggacugcaucaugaccagcuaccaguaccugaucauccagaacaccaccugggaggaccacugccaguucagcagacccagccccaucggcuaccugggccugcugagccagagaaccagagacaucuacaucagcagaagacugcugggcaccuucaccuggacccugagcgacagcgagggcaaggacacccccggcggcuacugccugaccagauggaugcugaucgaggccgagcugaagugcuucggcaacaccgccguggccaagugcaacgagaagcacgacgaggaguucugcgacaugcugagacuguucgacuucaacaagcaggccauccagagacugaaggccgaggcccagaugagcauccagcugaucaacaaggccgugaacgcccugaucaacgaccagcugaucaugaagaaccaccugagagacaucaugugcauccccuacugcaacuacagcaaguacugguaccugaaccacaccaccaccggcaagaccagccugcccaagugcuggcuggugagcaacggcagcuaccugaacgagacccacuucagcgacgacaucgagcagcaggccgacaacaugaucaccgagaugcugcagaaggaguacauggagagacagggcaagaccccccugggccugguggaccuguucguguucagcaccagcuucuaccugaucagcaucuuccugcaccuggugaagauccccacccacagacacaucgugggcaagcccugccccaagccccacagacugaaccacaugggcaucugcagcugcggccuguacaagcagcccggcgugcccgugaaguggaagagaugaggacuagucccuguucccagagcccacuuuuuuuucuuuuuuugaaauaaaauagccugucuuucagaucucaaaggcucuuuucagagccaccaaaaaaaaaaaaaaaaaaaaaaaaaaaaaaaaaaaaaaaaaaaaaaaaaaaaaaaaaaaaaaaaaaaaaaaaaaaaaaaaaaaaaaaaaaaaaaaaaaaaa

SEQ ID NO: 35586 - RNA, 1767 nt, Artificial Sequence
  mRNA product Design a-2 (hSL-A100) comprising derived and/or modified sequence from LASV(LM776-SLE-2012;Clade IV)__AIT17824__GPCmut9 (opt4)
aggagaguccgcucagccagguugcagaagcggcuuagcguguguccuaaucuucucucugcguguagguaggccugugccgcaaacaagcuuaccaugggccagaucgugaccuucuuccaggaggugccccacgugaucgaggaggugaugaacaucgugcugaucgcccugagcauccuggccgugcugaagggccuguacaacuucgccaccugcggccuggugggccuggugaccuuccugcugcugugcggcagaagcugcaccaccagcguguacaagggcguguacgagcugcagacccuggagcugaacauggagacccugaacaugaccaugccccugagcugcaccaagaacaacagccaccacuacaucauggugggcaacgagaccggccuggagcugacccugaccaacaccagcaucaucaaccacaaguucugcaaccugagcgacgcccacaagaagaaccuguacgaccacgcccugaugagcaucaucagcaccuuccaccugagcauccccaacuucaaccaguacgaggccaugagcugcgacuucaacggcggcaagaucagcgugcaguacaaccugagccacagcuacgccggcgacgccgccaaccacugcggcaccguggccaacggcgugcugcagaccuucaugagaauggccuggggcggcagcuacaucgcccuggacagcggcugcggcaagugggacugcaucaugaccagcuaccaguaccugaucauccagaacaccaccugggaggaccacugccaguucagcagacccagccccaucggcuaccugggccugcugagccagagaaccagagacaucuacaucagcagaagacugcugggcaccuucaccuggacccugagcgacagcgagggcaaggacacccccggcggcuacugccugaccagauggaugcugaucgaggccgagcugaagugcuucggcaacaccgccguggccaagugcaacgagaagcacgacgaggaguucugcgacaugcugagacuguucgacuucaacaagcaggccauccagagacugaaggccgaggcccagaugagcauccagcugaucaacaaggccgugaacgcccugaucaacgaccagcugaucaugaagaaccaccugagagacaucaugugcauccccuacugcaacuacagcaaguacugguaccugaaccacaccaccaccggcaagaccagccugcccaagugcuggcuggugagcaacggcagcuaccugaacgagacccacuucagcgacgacaucgagcagcaggccgacaacaugaucaccgagaugcugcagaaggaguacauggagagacagggcaagaccccccugggccugguggaccuguucguguucagcaccagcuucuaccugaucagcaucuuccugcaccuggugaagauccccacccacagacacaucgugggcaagagcugccccaagccccacagacugaaccacaugggcaucugcagcugcggccuguacaagcagcccggcgugcccgugagauggaagagaugaggacuagucccuguucccagagcccacuuuuuuuucuuuuuuugaaauaaaauagccugucuuucagaucucaaaggcucuuuucagagccaccaaaaaaaaaaaaaaaaaaaaaaaaaaaaaaaaaaaaaaaaaaaaaaaaaaaaaaaaaaaaaaaaaaaaaaaaaaaaaaaaaaaaaaaaaaaaaaaaaaaaa

SEQ ID NO: 35587 - RNA, 1767 nt, Artificial Sequence
  mRNA product Design a-2 (hSL-A100) comprising derived and/or modified sequence from LASV(Mad39;Clade IV)__ANH09722__GPCmut9 (opt4)
aggagaguccgcucagccagguugcagaagcggcuuagcguguguccuaaucuucucucugcguguagguaggccugugccgcaaacaagcuuaccaugggccagaucgugaccuucuuccaggaggugccccacgugaucgaggaggugaugaacaucgugcugaucgcccugagcauccuggccgugcugaagggccuguacaacguggccaccugcggccugaucggccuggugaccuuccugcugcugugcggcagaagcugcaccaccacccuguacaagggcguguacgagcugcaggcccuggagcugaacauggagacccugaacaugaccaugccccugagcugcaccaagaacaacagccaccacuacaucagagugggcaacgagaccggccuggagcugacccugaccaacaccagccugaucaaccacaaguucugcaaccugagcgacgcccacaagaagaaccuguacgaccacgcccugaugagcaucaucagcaccuuccaccugagcauccccaacuucaaccaguacgaggccaugagcugcgacuucaacgacggcaagaucagcgugcaguacaaccugagccacaccuacgccggcgacaccgccaaccacugcggcaccguggccaacggcgugcugcagaccuucaugagaauggccuggggcggcagcuacaucgcccuggacagcggcugcggcggcugggacugcaucaugaccagcuaccaguaccugaucauccagaacaccaccugggaggaccacugccaguucagcagacccagccccaucggcuaccugggccugcugagccagagaaccagagacaucuacaucagcagaagacugcugggcaccuucaccuggacccugagcgacagcgagggcaaggacacccccggcggcuacugccugaccagauggaugcugaucgaggccgagcugaagugcuucggcaacaccgccguggccaagugcaacgagaagcacgacgaggaguucugcgacaugcugagacuguucgacuucaacaagcaggccauccagagacugaaggccgaggcccagaugagcauccagcugaucaacaaggccgugaacgcccugaucaacgaccagcugaucaugaagaaccaccugagagacaucaugugcauccccuacugcaacuacagcaaguacugguaccugaaccacaccgugaccggcaagaccagccugcccaagugcuggcuggugagcaacggcagcuaccugaacgagacccacuucagcgacgacaucgagcagcaggccgacaacaugaucaccgagaugcugcagaaggaguacauggagagacagggcaagaccccccugggccugguggaccuguucguguucagcaccagcuucuaccugaucagcaucuuccugcaccuggugaagauccccacccacagacacguggugggcaagcccugccccaagccccacagacugaaccacaugggcaucugcagcugcggcuucuacaagcagcccggcgugcccgugagauggaagagaugaggacuagucccuguucccagagcccacuuuuuuuucuuuuuuugaaauaaaauagccugucuuucagaucucaaaggcucuuuucagagccaccaaaaaaaaaaaaaaaaaaaaaaaaaaaaaaaaaaaaaaaaaaaaaaaaaaaaaaaaaaaaaaaaaaaaaaaaaaaaaaaaaaaaaaaaaaaaaaaaaaaaa

SEQ ID NO: 35588 - RNA, 1767 nt, Artificial Sequence
  mRNA product Design a-2 (hSL-A100) comprising derived and/or modified sequence from LASV(Z0947-SLE-2011;Clade IV)__AIT17840__GPCmut9 (opt4)
aggagaguccgcucagccagguugcagaagcggcuuagcguguguccuaaucuucucucugcguguagguaggccugugccgcaaacaagcuuaccaugggccagaucgugaccuucuuccaggaggugccccacgugaucgaggaggugaugaacaucgugcugaucgcccugagcauccuggccgugcugaagggccuguacaacuucgccaccugcggccuggugggccuggugaccuuccugcugcugugcggcagaagcugcaccaucagccuguacaagggcguguacgagcugcagacccuggagcugaacauggagacccugaacaugaccaugccccugagcugcaccaagaacaacagccaccacuacaucauggugggcaacgagaccggccuggagcugacccugaccaacaccagcaucaucaaccacaaguucugcaaccugagcgacgcccacaagaagaaccuguacgaccacgcccugaugagcaucaucagcaccuuccaccugagcauccccaacuucaaccaguacgaggccaugagcugcgacuucaacggcggcaagaucagcgugcaguacaaccugagccacagcuacgccggcgacgccgccaaccacugcggcaccguggccaacggcgugcugcagaccuucaugagaauggccuggggcggcagcuacaucgcccuggacagcggcugcgacagaugggacugcaucaugaccagcuaccaguaccugaucauccagaacaccaccugggaggaccacugccaguucagcagacccagccccaucggcuaccugggccugcugagccagagaaccagagacaucuacaucagcagaagacugcugggcaccuucaccuggacccugagcgacagcgagggcaaggacacccccggcggcuacugccugaccagauggaugcugaucgaggccgagcugaagugcuucggcaacaccgccguggccaagugcaacgagaagcacgacgaggaguucugcgacaugcugagacuguucgacuucaacaagcaggccauccagagacugaaggccgaggcccagaugagcauccagcugaucaacaaggccgugaacgcccugaucaacgaccagcugaucaugaagaaccaccugagagacaucaugugcauccccuacugcaacuacagcaaguacugguaccugaaccacaccaccaccggcaagaccagccugcccaagugcuggcuggugagcaacggcagcuaccugaacgagacccacuucagcgacgacaucgagcagcaggccgacaacaugaucaccgagaugcugcagaaggaguacauggagagacagggcaagaccccccugggccugguggaccuguucguguucagcaccagcuucuaccugaucagcaucuuccugcaccuggugaagauccccacccacagacacaucgugggcaagcccugccccaagccccacagacugaaccacaugggcaucugcagcugcggccuguacaagcagcccggcgugcccgugaaguggaagagaugaggacuagucccuguucccagagcccacuuuuuuuucuuuuuuugaaauaaaauagccugucuuucagaucucaaaggcucuuuucagagccaccaaaaaaaaaaaaaaaaaaaaaaaaaaaaaaaaaaaaaaaaaaaaaaaaaaaaaaaaaaaaaaaaaaaaaaaaaaaaaaaaaaaaaaaaaaaaaaaaaaaaa

SEQ ID NO: 35589 - RNA, 1767 nt, Artificial Sequence
  mRNA product Design a-2 (hSL-A100) comprising derived and/or modified sequence from LASV(Josiah;Clade IV)__NP_694870__GPCmut9 (opt5)
aggagaguccgcucagccagguugcagaagcggcuuagcguguguccuaaucuucucucugcguguagguaggccugugccgcaaacaagcuuaccaugggccagaucgugaccuucuuucaagaggucccccacguuauugaagaggugaugaacaucgugcugauugcccucagcguccuggcugugcuuaaggggcuguacaauuucgccacaugcggacucguuggccuggugacguuucuucugcucugugggagauccugcaccacaucucuguauaaaggagucuacgaacugcagacccucgagcugaacauggaaacacuuaauaugaccaugccucugagcuguacaaagaacaauucccaucacuauaucauggugggcaacgagaccgggcucgagcugacgcuuaccaauacaucuauuaucaaccauaaauucugcaaucugagcgacgcgcacaagaaaaaccucuacgaucaugcucugauguccaucauuucuaccuuucaccugagcaucccgaauuucaaccaguaugaagccauguccugugacuuuaauggaggcaagauuagcguucaguacaaccucucucacuccuaugccggcgaugcugccaaucauugcgggacaguggcuaacggaguccugcaaaccuucaugcggauggccuggggcgggagcuacaucgcgcuugacucuggauguggcaacugggauugcauuaugacguccuaccaguaucugaucauucagaauacaaccugggaggaccacugucaguuuagccgccccucuccuaucggguaccucggacugcuuucccaaagaacacgggauaucuauauuagccgcagacugcucggcaccuucaccuggacacuguccgacucugaaggcaaggauacgcccgggggauacugccugacccgguggaugcucaucgaggccgagcugaaauguuuuggcaacacagcuguggccaagugcaaugaaaaacaugacgaggaguucugcgauaugcuucgccuguuugacuucaacaagcaggcuauucagagacucaaagccgaagcgcagaugagcauccaacugauuaauaaggccgugaacgcucuuaucaaugaucagcugaucaugaagaaccaccuccgggacauuauguguaucccuuauugcaauuacuccaaauauugguaccugaaccacaccacaaccgggcgcacgagccugcccaaguguuggcucgucucuaauggauccuaccugaacgaaacacauuucagcgacgauauugagcagcaagccgacaauaugaucaccgagaugcuucagaaagaauauauggagagacagggcaagaccccucuggggcucguugaucuguuuguguucucuaccagcuuuuaccugauuuccaucuuccuucaccucgugaaaaucccgacacaucggcacauugucggaaagucuugccccaaaccucaucgccugaaccacaugggcaucuguagcugcggccuguauaagcagcccggggugccuguuaaguggaaaagaugaggacuagucccuguucccagagcccacuuuuuuuucuuuuuuugaaauaaaauagccugucuuucagaucucaaaggcucuuuucagagccaccaaaaaaaaaaaaaaaaaaaaaaaaaaaaaaaaaaaaaaaaaaaaaaaaaaaaaaaaaaaaaaaaaaaaaaaaaaaaaaaaaaaaaaaaaaaaaaaaaaaaa

SEQ ID NO: 35590 - RNA, 1764 nt, Artificial Sequence
  mRNA product Design a-2 (hSL-A100) comprising derived and/or modified sequence from LASV(LP;Clade I)__AAF86701__GPCmut9 (opt5)
aggagaguccgcucagccagguugcagaagcggcuuagcguguguccuaaucuucucucugcguguagguaggccugugccgcaaacaagcuuaccaugggccagaucauuaccuucuuucaagaggugccccacgucaucgaagagguuaugaacauugugcugaucgcccucagccugcuugcuauucugaaggggcucuacaauaucgccacaugcggaaucauuggccugguggcguuccuuuuucugugugggaaauccugcucucucacgcugaagggaggcuaugaacugcagacccucgagcugaacauggaaacacuuaauaugaccaugccucugagcuguaccaaaaacuccucucaucacuacaucagagucgggaaugagacaggacucgagcugacacuuaccaacacgagcauuaucaaucauaaguucugcaaccuguccgacgcucacaaaaagaaucucuaugaucaugcccugaugucuauuaucagcaccuuucaccuguccauuccgaacuucaaucaguacgaagccaugagcugugacuuuaacggcggcaagaucucugugcaguauaaucucucccacagcuacgcuggggaugccgcugagcauugcggaacaguugccaacggcgugcugcaaaccuucaugcggauggcguggggagggcgcuauaucgcccuugacucuggcugugggaauugggauugcauuaugacauccuaccaguaccugaucauucagaacaccacgugggaagaccacugucaguuuagcagacccucuccuaucggauaucucggccugcuuucccaacggacacgcgauauuuacaucagcagacggcugcucggcaccuucacauggacccuguccgacucugaggggaacgagacccccggaggcuauugccugacacgcuggaugcucaucgaagcugagcugaaauguuuugggaauacggccgucgcuaagugcaacgaaaaacaugaugaggaguucugcgacaugcuuagacuguuugauuucaauaagcaggccauucggcgccucaaagcggaagcccagaugagcauccagcugauuaacaaggcugugaaugcccuuaucaacgaccaacugauuaugaagaaucaccucagagauaucauguguaucccuuacugcaacuauuccaaauacugguaucugaaucacaccagcucuggacggacaucccugcccaaguguuggcucauuagcaacggcucuuaccugaaugagacccaguucagcgacgacaucgaacagcaagcugauaacaugauuacagagaugcuucagaaagaauacaucgagcgccaggggaagaccccucugggacucguugacauuuuuaucuucuccacgucuuuuuaucugauuagcaucuuccugcaucuuaucaaaauuccgacacacagacauaucgugggcaagcccugcccuaaaccccaccggcucaaucauaugggcgucuguuccugcgggcuguacaagcacccuggagugcccaccaaguggaaacgcugaggacuagucccuguucccagagcccacuuuuuuuucuuuuuuugaaauaaaauagccugucuuucagaucucaaaggcucuuuucagagccaccaaaaaaaaaaaaaaaaaaaaaaaaaaaaaaaaaaaaaaaaaaaaaaaaaaaaaaaaaaaaaaaaaaaaaaaaaaaaaaaaaaaaaaaaaaaaaaaaaaaaa

SEQ ID NO: 35591 - RNA, 1764 nt, Artificial Sequence
  mRNA product Design a-2 (hSL-A100) comprising derived and/or modified sequence from LASV(803213;Clade II)__AAF86703__GPCmut9 (opt5)
aggagaguccgcucagccagguugcagaagcggcuuagcguguguccuaaucuucucucugcguguagguaggccugugccgcaaacaagcuuaccaugggccagaucauuaccuucuuucaagaggugccccacgucaucgaagagguuaugaacauugugcugaucgcccucagccugcuugcuauucugaaggggaucuacaauguggccacaugcggacucuucggccugaucuccuuucuucugcucugugggagaucuugcagcgucacguauaaaggaguguacgaacugcagacccuggagcucaacauggcgaaucugaacaugacaaugccucuuuccuguaccaagaauaacucucaucacuauauuaugguuggcaaugaaacagggcuggagcucacccugacaaacaccagcaucauuaaucauaaauucugcaaccuuuccgacgcucacaagaaaaaucuguacgaucaugcccucaugucuaucauuagcacguuucaccuguccaucccgaacuucaaucaguaugaggccaugagcugugacuuuaacggaggcaagauuucugugcaguacaaucugucccacagcuucgcugucgaugccgcuaaccauugcggcaccaucgccaacggggugcuccaaacauuuaugcggauggcguggggaggcucuuauaucgcccuggacuccggguguggaaauugggauugcauuaugaccagcuaccaguaccuuaucauucagaacacaaccugggaagaccacugucaguucucucgccccuccccuaucggcuaucuggggcuccugagccaaagaacgcgggauauuuacaucucccgcagacuucugggaacauuuaccuggacacucucugacagcgagggcaaugaagcucccggcggguauugccugacccgguggaugcugaucgaggccgagcucaaguguuucggaaacaccgcuguugccaaaugcaaugaaaagcaugaugaggaauuuugcgacaugcugcgccuuuucgauuucaacaaacaggcgauuaagagacugaaaacagaggcccagauguccauccagcucauuaauaaggcugugaacgcccugaucaaugaccaacuuauuaugaagaaccaucugcgggauaucauguguaucccuuacugcaauuauagccgcuacugguaucucaaccacacggucaccggcaaaacaucucugcccagauguuggcugguguccaaugggagcuaccucaacgaaacccacuuuucugacgacauugagcagcaggcugauaauaugaucacagagaugcugcaaaaggaauacauggaccggcagggaaaaaccccucuuggccugguggaucucuucgucuuuagcacguccuucuaucugauuucuaucuuucugcaccuuguuaagauuccgacacaucgccacaucguggggaaacccugcccuaagccccauagacucaaccacaugggaauuuguagcugcggccuguacaaacacccuggcgugcccgucaaguggaagcggugaggacuagucccuguucccagagcccacuuuuuuuucuuuuuuugaaauaaaauagccugucuuucagaucucaaaggcucuuuucagagccaccaaaaaaaaaaaaaaaaaaaaaaaaaaaaaaaaaaaaaaaaaaaaaaaaaaaaaaaaaaaaaaaaaaaaaaaaaaaaaaaaaaaaaaaaaaaaaaaaaaaaa

SEQ ID NO: 35592 - RNA, 1764 nt, Artificial Sequence
  mRNA product Design a-2 (hSL-A100) comprising derived and/or modified sequence from LASV(GA391;Clade III)__CAA36645__GPCmut9 (opt5)
aggagaguccgcucagccagguugcagaagcggcuuagcguguguccuaaucuucucucugcguguagguaggccugugccgcaaacaagcuuaccaugggccagaucgugaccuucuuucaagaggucccccacguuauugaagaggugaugaacaucgugcugauugcccucagcauccuggcuauucuuaaggggcuguacaaugucgccacaugcggacucaucggccuggugacguuccuucugcucuccgggagaucuuguagccugaucuauaaaggaaccuacgaacugcagacacucgagcugaacauggaaacccuuaauaugacaaugccucuguccugcaccaagaacaauucucaucacuauauucggguuggcaacgagacagggcucgagcugacccuuacgaauaccagcauccugaaccauaaauuuuguaaucucuccgacgcgcacaagcgcaaccuguacgaucauucucugaugagcauuaucuccacauuccaccucagcauuccgaauuuuaaccaguaugaagcuaugucuugcgacuucaauggaggcaaaaucaccgugcaguacaaccugucccacagcuuugccgucgaugccgcuggccauugugggacacuugccaauggagugcugcaaaccuucaugagaauggcuuggggcgggucuuauauugcccucgacuccggaugcggcaacugggauuguaucaugacgagcuaccaguaccugaucauucagaacacaaccugggacgaucacugccaguuuucucggcccuccccuaucggguaucuuggacugcucagccaacgcacaagagacauuuacaucucccggcgccugcugggcaccuucaccuggacacucucugauagcgagggcaaugaaacgcccgggggauauugucugaccagauggaugcuuauugaggcggagcugaagugcuuuggcaacacagccguugcuaaguguaaugaaaaacaugacgaggaguucugcgauaugcuccggcuguuugacuucaacaagcaggccauccgcagacuuaaaaccgaagcucagauguccauccagcugauuaauaaggccgugaacgcgcucaucaaugaucaacugauuaugaaaaaccaucugcgggacaucaugugcauuccuuacuguaauuauagccgcuacugguaucucaaccacacaucuaccgggaagacgucccugcccagaugcuggcuuaucagcaauggaucuuaccugaacgaaacaaaguucagcgacgauaucgagcagcaggccgacaauaugauuaccgagaugcuccaaaaagaauacaucgaucggcagggcaagaccccucuggggcuggucgaccuuuuuguguucuccacaucuuuuuaucucauuagcaucuuccugcaccuggugaaaauuccgacccaccgccauaucgucggaaagcccuguccuaaaccccacagacucaaccauaugggcauuugcuccuguggccuguacaagcagccugggguucccgugcgguggaaaagaugaggacuagucccuguucccagagcccacuuuuuuuucuuuuuuugaaauaaaauagccugucuuucagaucucaaaggcucuuuucagagccaccaaaaaaaaaaaaaaaaaaaaaaaaaaaaaaaaaaaaaaaaaaaaaaaaaaaaaaaaaaaaaaaaaaaaaaaaaaaaaaaaaaaaaaaaaaaaaaaaaaaaa

SEQ ID NO: 35593 - RNA, 1767 nt, Artificial Sequence
  mRNA product Design a-2 (hSL-A100) comprising derived and/or modified sequence from LASV(AV;Clade V)__CCA30314__GPCmut9 (opt5)
aggagaguccgcucagccagguugcagaagcggcuuagcguguguccuaaucuucucucugcguguagguaggccugugccgcaaacaagcuuaccaugggccagaucgugaccuucuuucaagaggucccccacguuauugaagaggugaugaacaucgugcugauugcccucagcauccuggcuguccuuaaggggcuguacaauauugccacaugcggacucaucggccugaucacguuccuucugcucugugggagauccugcucuagcaaccuguauaaaggaguguacgaacugcagucccucgaccugaauauggagacccuuaacaugacaaugccucugucuuguaccaagaauaacagccaucacuauauucggguuggcaaugauacagggcucgaacugacccuuacaaacaccuccauccugaaucauaaauuuugcaaccucucugacgcgcacaagaaagaucuguacgaccaugcucugaugagcauuaucuccacguuccaccucagcauuccgaauuuuaaccaguaugaggccaugucuugugauuucaauggaggcaagaucuccgugcaguacaaccugagccacucuuaugccauugacgcugccaaucauugcggcaccgucgcuaacgggauccuucaaacauuuaugcgcauggccuggggaggcuccuacaucgcgcuggauagcggguguggaaacugggacugcauuaugaccucuuaccaguaucucaucauucagaauacaaccugggagaaccacugucaguucuccagacccagcccuaucggcuaccuggggcuucugucccaacggacgcgcgauauuuauaucucuagacggcuccugggaacauuuaccuggacacugagcgacuccgaaggcaaugccacccccggcggguacugccucacccgcuggaugcugaucgaggcugaacuuaaguguuucggaaacacagccguggcuaaaugcaaugagaagcaugaugaggaauuuugcgacaugcugagacucuucgauuuuaacaaacaggccauuagccggcugaagucugaggcgcagauguccauccagcuuauuaauaaagccguuaacgcucugaucaaugaccaacucauuaugaagaaccaucugcgcgacaucauguguaucccuuauugcaauuacagcaaguauugguaccugaaccacacgauuaccggcaaaacaucucuccccaaguguuggcuggugagcaauggguccuaccuuaacgaaacccacuucucugaugacaucgagcagcaggccgauaauaugauuacagaaaugcugcaaaaagaguauauggagagacagggaaagaccccucucggccuggucgaccuguucguguuuagcacguccuucuaccuuaucagcauuuuucuccggcuggugaaaaucccgacacaccgccauauugucgggaagcccugcccuaaaccccacagacugaaccauaugggaaucuguucuugcggccucuauaagcagccuggcguucccgugcgguggaagcgcugaggacuagucccuguucccagagcccacuuuuuuuucuuuuuuugaaauaaaauagccugucuuucagaucucaaaggcucuuuucagagccaccaaaaaaaaaaaaaaaaaaaaaaaaaaaaaaaaaaaaaaaaaaaaaaaaaaaaaaaaaaaaaaaaaaaaaaaaaaaaaaaaaaaaaaaaaaaaaaaaaaaaa

SEQ ID NO: 35594 - RNA, 1764 nt, Artificial Sequence
  mRNA product Design a-2 (hSL-A100) comprising derived and/or modified sequence from LASV(Togo/2016/7082;Clade VI)__AMR44577__GPCmut9 (opt5)
aggagaguccgcucagccagguugcagaagcggcuuagcguguguccuaaucuucucucugcguguagguaggccugugccgcaaacaagcuuaccaugggccagaucauuaccuucuuucaagaggugccccacgucaucgaagagguuaugaacauugugcugaucgcccucagccugcuugcuauucugaaggggguguacaaugucgccacaugcggaaucaucggccucgugacguuccuguuucuuugugggagauccugcucucugauuuauaaaggaagcuacgaacuccagacccuggagcugaacauggaaacacucaauaugaccaugccucuguccuguacaaagaacucuagccaucacuauauccggguuggcaaugagaccgggcuugagcugacacucaccaacacguccauuaucaaucauaaauucugcaaccugucugacgcgcacaagcgcaaucuuuacgaucaugcucugaugagcauucucuccaccuuucaccugagcaucccgaacuucaaucaguaugaagccaugucuugugacuuuaacggaggcaaaauuuccgugcaguacaaucugagccacgccuaugcugucgaugccgcugagcauugcggcacaguggccaacgggguucuccaaaccuucaugagaauggcguggggaggcucuuacaucgcccuggacuccggguguggaaauugggauugcaucaugacaagcuaccaguaucuuauuauccagaacaccacgugggaagaccacugucaguuuucucggcccuccccuauuggcuaccuggggcuccugagccaacgcacaagagauaucuauauuucccggcgccuucugggaaccuucacauggacccucucugacagcgagggcaacgagacccccggcggguacugccugacaagauggaugcugaucgaagcugagcucaaguguuuuggaaauacggccguggcuaagugcaacgaaaaacaugaugaggaguucugcgacaugcugcggcuuuuugauuucaauaagcaggccauccagcgccugaaauccgaagcgcagaugagcauucaacucaucaacaaggccgucaaugcucugauuaacgaccagcuuaucaugaaaaaucaccugagagauaugauguguauuccuuauugcaacuacucuaaguauugguaccucaaucacaccuccagcggccggacaucucugcccaaguguuggcuggugagcaacggguccuaccucaaugagacccauuucucugacgacaucgaacagcaagccgauaacaugaucacagagaugcugcagaaagaauauauugaccgccagggaaagaccccucuuggccugguggaucucuuugucuucagcacguccuuuuaccugaucagcauuuuccugcaccuuaucaaaauuccgacacauagacacaucguugggaagcccugcccuaaaccccaucggcucaaucacaugggaauuuguucuugcggccuguauaagcagccuggcgugcccacccgcuggaaaagaugaggacuagucccuguucccagagcccacuuuuuuuucuuuuuuugaaauaaaauagccugucuuucagaucucaaaggcucuuuucagagccaccaaaaaaaaaaaaaaaaaaaaaaaaaaaaaaaaaaaaaaaaaaaaaaaaaaaaaaaaaaaaaaaaaaaaaaaaaaaaaaaaaaaaaaaaaaaaaaaaaaaaa

SEQ ID NO: 35595 - RNA, 1764 nt, Artificial Sequence
  mRNA product Design a-2 (hSL-A100) comprising derived and/or modified sequence from LASV(KAK-428;Clade n.d. (VII))__ANH09740__GPCmut9 (opt5)
aggagaguccgcucagccagguugcagaagcggcuuagcguguguccuaaucuucucucugcguguagguaggccugugccgcaaacaagcuuaccaugggccagaucgugaccuucuuucaagaggucccccacguuauugaagaggugaugaacaucgugcugauugcccucagccugcuugcuauccugaaggggcucuacaauuucgccacaugcggagucauuggccugaucacguuucuucugcucugugggagauccugcucugcgaccuauaaaggacaguacgaacugcagacacuggagcucaacauggaaagccugaauaugaccaugccucuuuccuguacaaagaacaauucucaucacuauauccgggcuggcaacaauaccgggcuggagcucacacugaccaacacgagcauuaucucccauaaauucugcaaucuuucugacgcccacaagaaaaaccuguacgaucauacccucaugagcauuaucacaaccuuucaccuguccauuccgaauuucaaccaguaugaggccaugagcugugacuuuaauggaggcaagaucucuauucaauacaaccugucccacagcuaugcuggcgaugccgcucagcauugcgggacaguggccaauggaguucuccagaccuucaugcgcauggcguggggcgggucuuaccuggcccuugacuccggauguagaggcugggauugcaucaucagcucuuaccaguaucugauuauccaaaacacgacaugggacgaucacugucaguuuucccggcccagcccuauuggguaccucggauucgugucccagaagacccgcgacaucuauauuucuagacggcugcuuggcacauuuaccuggacccugagcgauuccgaaggccaugacaugcccgggggauacugccucacacgcuggaugcugaucgaggcugaucugaaauguuucggcaacacggccgucgcuaagugcaaugaaaaacacgacgaggaguuuugcgauauguggagacucuucgacuucaacaagcaggccauccaacggcugaaagcggaagcccagaugaauauucagcuuaucaacaaggcugugaaugcccugauuaacgaccaacucaugaugaagaaucaucugcgcgauaucauguguauuccuuauugcaacuacagcaaauuuugguaucuuaauaacaccacaaccgggagaacaucucugccccgguguuggcucaucuccaauggaagcuaccugaacgagacccacuucucugacgauaucgaacagcaggcugacaauaugauuacggagaugcugcagaaggaauacauggaucgccaaggcaaaacaccucucgggcugguugaccuuuuuguguucagcaccuccuuuuaucugaucaccauuuuccuccaccuggucaagaucccgacacauagacacauugugggaaaacccugcccuaagccccaucggcugaaccacaugggcaucuguucuugcggccuuuacaaacagccuggggugcccguccgcuggaagagaugaggacuagucccuguucccagagcccacuuuuuuuucuuuuuuugaaauaaaauagccugucuuucagaucucaaaggcucuuuucagagccaccaaaaaaaaaaaaaaaaaaaaaaaaaaaaaaaaaaaaaaaaaaaaaaaaaaaaaaaaaaaaaaaaaaaaaaaaaaaaaaaaaaaaaaaaaaaaaaaaaaaaa

SEQ ID NO: 35596 - RNA, 1764 nt, Artificial Sequence; identical to SEQ ID NO: 35590
  mRNA product Design a-2 (hSL-A100) comprising derived and/or modified sequence from LASV(Pinneo-NIG-1969;Clade I)__AIT17836__GPCmut9 (opt5)

SEQ ID NO: 35597 - RNA, 1764 nt, Artificial Sequence
  mRNA product Design a-2 (hSL-A100) comprising derived and/or modified sequence from LASV(ISTH0009-NIG-2011;Clade II)__AIT17404__GPCmut9 (opt5)
aggagaguccgcucagccagguugcagaagcggcuuagcguguguccuaaucuucucucugcguguagguaggccugugccgcaaacaagcuuaccaugggccagaucauuaccuucuuucaagaggugccccacgucaucgaagagguuaugaacauugugcugaucgcccucagccugcuugcuauucugaaggggaucuacaauguggccacaugcggacucuucggccuggucuccuuucuucugcucugugggagaucuugcagcacgaccuauaaaggaguguacgaacugcagacacuggagcucgacauggcgucccugaacaugaccaugccucuuucuuguacaaagaauaacagccaucacuauaucaugguuggcaaugaaaccgggcuggagcucacacugaccaacacguccauuaucaaucauaaauucugcaaccuuucugaugcucacaagaaaaaucuguacgaccaugcccucaugagcauuaucuccaccuuucaccugagcauuccgaacuucaaucaguaugaggccaugucuugugauuuuaacggaggcaagaucuccgugcaguacaaucugagccacgcuuaugccgucgacgcugccaaccauugcggcacaauugcgaauggggugcuccaaaccuucaugcggauggccuggggaggcucuuacaucgcucuggauuccggguguggaagcugggacugcaucaugacaucuuaccaguaucuuauuauccagaacaccacgugggaagaucacugucaguuuucccgccccagcccuauuggcuaccuggggcuccugucccaaagaacacgggacaucuauauuucucgcagacuucugggaaccuucacauggacccucagcgauuccgagggcaacgaaacccccggcggguacugccugacacgguggaugcugaucgaggccgagcucaaguguuuuggaaauacggcuguugccaaaugcaacgaaaagcaugacgaggaguucugcgauaugcugcgccuuuuugacuucaauaaacaggcgaucagacggcugaagaccgaagcccagaugagcauucagcucaucaacaaagcugugaaugcccugauuaacgaucaacuuaucaugaagaaucaucugcgcgacauuauguguaucccuuauugcaacuacucuaaguauugguaccucaaucacacagucaccggcaaaacaucccugcccagauguuggcuggugagcaacgggucuuaccucaaugaaacccacuucagcgacgauaucgagcagcaggcugacaacaugauuacggagcugcuucaaaaggaauauauggaucggcagggaaaaacaccucugggccucguggaccuguuugucuucuccaccucuuuuuaccugaucagcauuuuccuucaccucaucaagauuccgacccaucgccacaucacagggaaacccugcccuaagccccauagacugaaucacaugggaauuuguuccugcggccuguauaaacacccuggcguucccgugaaguggaagcggugaggacuagucccuguucccagagcccacuuuuuuuucuuuuuuugaaauaaaauagccugucuuucagaucucaaaggcucuuuucagagccaccaaaaaaaaaaaaaaaaaaaaaaaaaaaaaaaaaaaaaaaaaaaaaaaaaaaaaaaaaaaaaaaaaaaaaaaaaaaaaaaaaaaaaaaaaaaaaaaaaaaaa

SEQ ID NO: 35598 - RNA, 1764 nt, Artificial Sequence
  mRNA product Design a-2 (hSL-A100) comprising derived and/or modified sequence from LASV(ISTH2010-NIG-2012;Clade II)__AIT17482__GPCmut9 (opt5)
aggagaguccgcucagccagguugcagaagcggcuuagcguguguccuaaucuucucucugcguguagguaggccugugccgcaaacaagcuuaccaugggccagaucauuaccuucuuucaagaggugccccacgucaucgaagagguuaugaacauugugcugaucgcccucagccugcuugcuauucugaaggggaucuacaauguggccacaugcggacucuucggccuggucuccuuucuucugcucugugggagaucuugcagcacgaccuauaaaggaguguacgaacugcagacacuggagcucgacauggcgucccugaacaugaccaugccucuuucuuguacaaagaauaacagccaucacuauaucaugguuggcaaugaaaccgggcuggagcucacacugaccaacacguccauuaucaaucauaaauucugcaaccuuucugaugcucacaagaaaaaucuguacgaccaugcccucaugagcauuaucuccaccuuucaccugagcauuccgaacuucaaucaguaugaggccaugucuugugauuuuaacggaggcaagaucuccgugcaguacaaucugagccacgcuuaugccgucgacgcugccaaccauugcggcacaauugcgaauggggugcuccaaaccuucaugcggauggccuggggaggcucuuacaucgcucuggauuccggguguggaagcugggacugcaucaugacaucuuaccaguaucuuauuauccagaacauuaccugggaagaucacugucaguuuucccgccccagcccuaucggcuaccuggggcuccugucccaaagaacgcgggacauuuauaucucucgcagacuucugggaacauucaccuggacacucagcgauuccgagggcaacgaaacccccggcggguacugccugacccgguggaugcugaucgaggccgagcucaaguguuuuggaaauacagcuguugccaaaugcaacgaaaagcaugacgaggaguucugcgauaugcugcgccuuuuugacuucaauaaacaggcgauuagacggcugaagacggaagcccagaugagcauccagcucauuaacaaagcugugaaugcccugaucaacgaucaacuuauuaugaagaaucaucugcgcgacaucauguguaucccuuauugcaacuacucuaaguauugguaccucaaucacaccgucacaggcaaaaccucccugcccagauguuggcuggugagcaacgggucuuaccucaaugaaacacacuucagcgacgauauugagcagcaggcugacaacaugaucaccgagcugcuucaaaaggaauauauugaucggcagggaaaaacgccucugggccucguggaccuguuugucuucuccacaucuuuuuaccugaucagcauuuuccuucaccucguuaagaucccgacccaucgccacgugguggggaaacccugcccuaagccccauagacugaaucacaugggaauuuguuccugcggccuguauaaacacccuggcguccccgugaaguggaagcggugaggacuagucccuguucccagagcccacuuuuuuuucuuuuuuugaaauaaaauagccugucuuucagaucucaaaggcucuuuucagagccaccaaaaaaaaaaaaaaaaaaaaaaaaaaaaaaaaaaaaaaaaaaaaaaaaaaaaaaaaaaaaaaaaaaaaaaaaaaaaaaaaaaaaaaaaaaaaaaaaaaaaa

SEQ ID NO: 35599 - RNA, 1764 nt, Artificial Sequence
  mRNA product Design a-2 (hSL-A100) comprising derived and/or modified sequence from LASV(Lassa virus/H.sapiens-wt/NGA/2015/ISTH_0543;Clade II)__AVO03639__GPCmut9 (opt5)
aggagaguccgcucagccagguugcagaagcggcuuagcguguguccuaaucuucucucugcguguagguaggccugugccgcaaacaagcuuaccaugggccagaucauuaccuucuuucaagaggugccccacgucaucgaagagguuaugaacauugugcugaucgcccucagccugcuugcuauucugaaggggaucuacaauguggccacaugcggacucuucggccuggucuccuuucuucugcucugugggagaucuugcagcacgaccuauaaaggaguguacgaacugcagacacuggagcucgacauggcgaaccugaauaugaccaugccucuuuccuguacaaagaacaauucucaucacuauaucaugguuggcaacgaaaccgggcuggagcucacacugaccaauacgagcauuaucaaccauaaauucugcaaucuuuccgaugcucacaagaaaaaccuguacgaccaugcccucaugucuauuaucagcaccuuucaccuguccauuccgaauuucaaccaguaugaggccaugagcugugauuuuaauggaggcaagaucucugugcaguacaaccugucccacacauaugcugucgacgccgcuaaucauugcggcaccauugccaacggggugcuccaaacauucaugcggauggcguggggaggcagcuacaucgcccuggauucuggguguggauccugggacugcaucaugaccagcuaccaguaucuuguuauucagaacacgacaugggaagaucacugucaguuuucucgccccuccccuaucggcuaccuggggcuccugagccaaagaacccgggacauuuauaucucccgcagacuucugggaacauucaccuggacccucucugauagcgagggcaaugaaacacccggcggguacugccugacgcgguggaugcugauugaggcugagcucaaguguuuuggaaacaccgccguggcuaaaugcaaugaaaagcaugacgaggaguucugcgauaugcugcgccuuuuugacuucaacaaacaggccaucagacggcugaagacagaagcgcagauguccauccagcucauuaauaaagccgucaacgcucugaucaaugaucaacuuauuaugaagaaccaucugcgcgacaucauguguauuccuuauugcaauuacagcaaguauugguaccucaaccacaccgugacaggcaaaaccucucugcccagauguuggcugguguccaaugggagcuaccucaacgaaacgcacuucucugacgauaucgagcagcaggccgacaauaugaucacagagcugcuucaaaaggaauauauugaucggcagggaaaaaccccucugggccucgucgaccuguuuguuuucagcaccuccuuuuaccugaucucuauuuuccuucaccucgugaagaucccgacacaucgccacauuaccgggaaacccugcccuaagccccauagacugaaccacaugggaaucuguagcugcggccuguauaaacacccuggcgugcccgucaaguggaagcggugaggacuagucccuguucccagagcccacuuuuuuuucuuuuuuugaaauaaaauagccugucuuucagaucucaaaggcucuuuucagagccaccaaaaaaaaaaaaaaaaaaaaaaaaaaaaaaaaaaaaaaaaaaaaaaaaaaaaaaaaaaaaaaaaaaaaaaaaaaaaaaaaaaaaaaaaaaaaaaaaaaaaa

SEQ ID NO: 35600 - RNA, 1764 nt, Artificial Sequence
  mRNA product Design a-2 (hSL-A100) comprising derived and/or modified sequence from LASV(Lassa virus/H.sapiens-wt/NGA/2016/ISTH_0009;Clade II)__AVO03571__GPCmut9 (opt5)
aggagaguccgcucagccagguugcagaagcggcuuagcguguguccuaaucuucucucugcguguagguaggccugugccgcaaacaagcuuaccaugggccagaucauuaccuucuuucaagaggugccccacgucaucgaagagguuaugaacauugugcugaucgcccucagccugcuugcuauucugaaggggaucuacaauguggccacaugcggacuccugggccuugucuccuuccugcuccugugugggagaucuugcagcacgaccuauaaaggaguguacgaacugcagacacucgagcuggacauggcgucccuuaacaugaccaugccucugucuuguacaaagaauaacagccaucacuauaucaugguuggcaaugaaaccgggcucgagcugacacuuaccaacacguccauuaucaaucauaaauuuugcaaccugucugaugcucacaagaaaaaucucuacgaccaugcccugaugagcauuaucuccaccuuccaccugagcauuccgaacuuuaaucaguaugaggccaugucuugugauuucaacggaggccggaucuccgugcaguacaaucucagccacucuuaugcugucgacgccgcuaaccauugcggcacaauugccaauggggugcugcaaaccuuuaugcgcauggcguggggaggcuccuacaucgcccuugauagcggguguggaucuugggacugcaucaugacauccuaccaguaucugauuauccagaacaccacgugggaagaucacugucaguucagcagacccuccccuauuggcuaccucgggcugcuuucucaacggacacgcgacaucuauauuagcagacggcugcucggaaccuuuacauggacccuguccgauagcgagggcaacgaaacccccggcggguacugccugacacgcuggaugcucaucgaggcugagcugaaguguuucggaaauacggccguugcuaagugcaacgaaaaacaugacgaggaauuuugcgauaugcuuagacuguucgacuuuaauaagcaggccauccggcgccucaaaaccgaggcgcagaugucuauucagcugaucaacaaggccgugaaugcucuuauuaacgaucaacugaucaugaaaaaucaccucagagacauuauguguaucccuuauugcaacuacuccaaguauugguaccugaaucacacagucaccggcaagacaagccugccccgguguuggcucgugucuaacgggagcuaccugaaugaaacccauuucuccgacgauaucgagcagcaggccgacaacaugauuacggagcuucugcaaaaagaauauaucgaucgccagggaaagacaccucucggccugguggaccuguucgucuuuucuaccagcuucuaccuuauuuccaucuuucuccaccugguuaaaauuccgacccauagacacaucacagggaagcccugcccuaaaccccaucggcugaaucacaugggaauuuguagcugcggccucuauaaccacccuggcgugcccgugaaguggaaacgcugaggacuagucccuguucccagagcccacuuuuuuuucuuuuuuugaaauaaaauagccugucuuucagaucucaaaggcucuuuucagagccaccaaaaaaaaaaaaaaaaaaaaaaaaaaaaaaaaaaaaaaaaaaaaaaaaaaaaaaaaaaaaaaaaaaaaaaaaaaaaaaaaaaaaaaaaaaaaaaaaaaaaa

SEQ ID NO: 35601 - RNA, 1764 nt, Artificial Sequence
  mRNA product Design a-2 (hSL-A100) comprising derived and/or modified sequence from LASV(Lassa virus/H.sapiens-wt/NGA/2016/ISTH_0017;Clade II)__AVO03567__GPCmut9 (opt5)
aggagaguccgcucagccagguugcagaagcggcuuagcguguguccuaaucuucucucugcguguagguaggccugugccgcaaacaagcuuaccaugggccagaucauuaccuucuuucaagaggugccccacgucaucgaagagguuaugaacauugugcugaucgcccucagccugcuugcuauucugaaggggaucuacaauguggccacaugcggacucuucggccuggucuccuuucuucugcucugugggagaucuugcagcacgaccuauaaaggaguguacgaacugcagacacuggagcucgacauggcgucccugaacaugaccaugccucuuucuuguacaaagaauaacagccaucacuauaucaugguuggcaaugaaaccgggcuggagcucacacugaccaacacguccauuaucaaucauaaauucugcaaccuuucugaugcucacaagaaaaaucuguacgaccaugcccucaugagcauuaucuccaccuuucaccugagcauuccgaacuucaaucaguaugaggccaugucuugugauuuuaacggaggcaagaucuccgugcaguacaaucugagccacacauaugcuauugacgccgcuaaccauugcggcaccaucgccaaugggguccuccaaacauucaugcggauggcguggggaggcucuuacaucgcccuggauuccggguguggaagcugggacugcauuaugaccucuuaccaguaucuuaucauucagaacacgacaugggaagaucacugucaguuuucccgccccagcccuaucggcuaccuggggcuccugucccaaagaacccgggacauuuauaucucucgcagacuucugggaacauucaccuggacccucagcgauuccgagggcaacgaaacacccggcggguacugccugacgcgguggaugcugaucgaggcugagcucaaguguuuuggaaauaccgccguggcuaaaugcaacgaaaagcaugacgaggaguucugcgauaugcugcgccuuuuugacuucaauaaacaggccauuagacggcugaagacagaagcgcagaugagcauccagcucauuaacaaagccguuaaugcucugaucaacgaucaacuuauuaugaagaaucaucugcgcgacaucauguguaucccuuauugcaacuacucuaaguauugguaccucaaucacaccgugacaggcaaaaccucccugcccagauguuggcuggucagcaacgggucuuaccucaaugaaacgcacuucagcgacgauauugagcagcaggccgacaacaugaucacagagcugcuucaaaaggaauauauggaucggcagggaaaaaccccucugggccucguggaccuguuuguguucuccaccucuuuuuaccugauuagcaucuuccuucaccucguccgcauuccgacacauagacacguuaucgggaagcccugcccuaaaccccaucggcugaaucacaugggaauuuguuccugcggccuguauaagcacccuggcgugcccgugaaauggaagcgcugaggacuagucccuguucccagagcccacuuuuuuuucuuuuuuugaaauaaaauagccugucuuucagaucucaaaggcucuuuucagagccaccaaaaaaaaaaaaaaaaaaaaaaaaaaaaaaaaaaaaaaaaaaaaaaaaaaaaaaaaaaaaaaaaaaaaaaaaaaaaaaaaaaaaaaaaaaaaaaaaaaaaa

SEQ ID NO: 35602 - RNA, 1764 nt, Artificial Sequence
  mRNA product Design a-2 (hSL-A100) comprising derived and/or modified sequence from LASV(Lassa virus/H.sapiens-wt/NGA/2018/ISTH_0959;Clade II)__AVV65099__GPCmut9 (opt5)
aggagaguccgcucagccagguugcagaagcggcuuagcguguguccuaaucuucucucugcguguagguaggccugugccgcaaacaagcuuaccaugggccagaucauuaccuucuuucaagaggugccccacgucaucgaagagguuaugaacauugugcugaucgcccucagccugcuugcuauucugaaggggaucuacaauguggucacaugcggacucuucggccugguguccuuucuucugcucugugggagaucuugcagcacgaccuauaaaggaguuuacgaacugcagacacuggagcucgacauggccucccugaacaugaccaugccucuuucuuguacaaagaauaacagccaucacuauaucauggugggcaaugaaaccgggcuggagcucacacugaccaacacguccauuaucaaucauaaauucugcaaccuuucugaugcgcacaagaaaaaucuguacgaccaugcucucaugagcauuaucuccaccuuucaccugagcauuccgaacuucaaucaguaugaggccaugucuugugauuuuaacggaggcaagaucuccguccaguacaaucugagccacgccuaugcuauugacgccgcuaaccauugcggcacaaucgccaauggggugcuccaaaccuucaugcggauggcguggggaggcucuuacaucgcccuggauuccggguguggaagcugggacugcauuaugacaucuuaccaguaucuuaucauucagaacaccacgugggaagaucacugucaguuuucccgccccagcccuaucggcuaccuggggcuccugucccaaagaacacgggacauuuauaucucucgcagacuucugggaaccuucacauggacccucagcgauuccgagggcaacgaaacccccggcggguacugccugacacgguggaugcugaucgaggcugagcucaaguguuuuggaaauacggccguugcuaaaugcaacgaaaagcaugacgaggaguucugcgauaugcugcgccuuuuugacuucaauaaacaggccauuagacggcugaagaccgaagcgcagaugagcauccagcucauuaacaaagccgugaaugcucugaucaacgaucaacuuauuaugaagaaucaucugcgcgacaucauguguaucccuuauugcaacuacucuaaguauugguaccucaaucacacagucaccggcaaaacaucccugcccagauguuggcuggugagcaacgggucuuaccucaaugaaacccacuucagcgacgauauugagcagcaggccgacaacaugaucacggagcugcuucaaaaggaauauauugaucggcagggaaaaacaccucugggccucguggaccuguuugucuucuccaccucuuuuuaccugaucagcauuuuccuucaccucguuaagaucccgacccaucgccacgugauugggaaacccugcccuaagccccauagacugaaucacaugggaaucuguuccugcggccuguauaaacacccuggcgugcccgucaaguggaagcggugaggacuagucccuguucccagagcccacuuuuuuuucuuuuuuugaaauaaaauagccugucuuucagaucucaaaggcucuuuucagagccaccaaaaaaaaaaaaaaaaaaaaaaaaaaaaaaaaaaaaaaaaaaaaaaaaaaaaaaaaaaaaaaaaaaaaaaaaaaaaaaaaaaaaaaaaaaaaaaaaaaaaa

SEQ ID NO: 35603 - RNA, 1764 nt, Artificial Sequence
  mRNA product Design a-2 (hSL-A100) comprising derived and/or modified sequence from LASV(LASV003-NIG-2008;Clade II)__AIT17580__GPCmut9 (opt5)
aggagaguccgcucagccagguugcagaagcggcuuagcguguguccuaaucuucucucugcguguagguaggccugugccgcaaacaagcuuaccaugggccagaucauuaccuucuuucaagaggugccccacgucaucgaagagguuaugaacauugugcugaucgcccucagccugcuugcuauucugaaggggaucuacaauguggccacaugcggacucuucggccuggucuccuuucuucugcucugugggagaucuugcagcacgaccuauaaaggaguguacgaacugcagacacuggagcucgacauggcgucccugaacaugaccaugccucuuucuuguacaaagaauaacagccaucacuauaucaugguuggcaaugaaaccgggcuggagcucacacugaccaacacguccauuaucaaucauaaauucugcaaccuuucugaugcucacaagaaaaaucuguacgaccaugcccucaugagcauuaucuccaccuuucaccugagcauuccgaacuucaaucaguaugaggccaugucuugugauuuuaacggaggcaagaucuccgugcaguacaaucugagccacacauaugcugucgacgccgcuaaccauugcggcaccauugccaauggggugcuccaaacauucaugcggauggcguggggaggcucuuacaucgcccuggauuccggguguggaagcugggacugcaucaugaccucuuaccaguaucuuauuauccagaacacgacaugggaagaucacugucaguuuucccgccccagcccuauuggcuaccuggggcuccugucccaaagaacccgggacaucuauauuucucgcagacuucugggaacauucaccuggacccucagcgauuccgagagcaacgaaacacccggcggcuacugccugacgcgguggaugcugaucgaggcugagcucaaguguuuugggaauaccgccguugcuaaaugcaacgaaaagcaugacgaggaguucugcgauaugcugcgccuuuuugacuucaauaaacaggccaucagacggcugaaggcggaagcccagaugucuauucagcucaucaacaaagcugugaaugcccugauuaacgaucaacuuaucaugaagaaucaucugcgcgacauuauguguaucccuuauugcaacuacuccaaguauugguaccucaaucacacagucaccggaagaacaagccugccccgguguuggcuggugucuaacggcagcuaccucaaugaaacccacuucuccgacgauaucgagcagcaggcugacaacaugauuacggagcugcuucaaaaagaauauauggaucgccaggggaagacaccucugggacucguggaccuguuugucuucucuaccagcuuuuaccugaucuccauuuuccuucaccucguuaaaaucccgacccauagacacgugauuggcaagcccugcccuaaaccccaucggcugaaucacauggggaucuguagcugcggacuguauaagcacccuggcgugcccgucaaauggaagcgcugaggacuagucccuguucccagagcccacuuuuuuuucuuuuuuugaaauaaaauagccugucuuucagaucucaaaggcucuuuucagagccaccaaaaaaaaaaaaaaaaaaaaaaaaaaaaaaaaaaaaaaaaaaaaaaaaaaaaaaaaaaaaaaaaaaaaaaaaaaaaaaaaaaaaaaaaaaaaaaaaaaaaa

SEQ ID NO: 35604 - RNA, 1764 nt, Artificial Sequence
  mRNA product Design a-2 (hSL-A100) comprising derived and/or modified sequence from LASV(LASV035-NIG-2009;Clade II)__AIT17588__GPCmut9 (opt5)
aggagaguccgcucagccagguugcagaagcggcuuagcguguguccuaaucuucucucugcguguagguaggccugugccgcaaacaagcuuaccaugggccagaucauuaccuucuuucaagaggugccccacgucaucgaagagguuaugaacauugugcugaucgcccucagccugcuugcuauucugaaggggaucuacaauguggccacaugcggacucuucggccuggucuccuuucuucugcucugugggagaucuugcagcacgaccuauaaaggaguguacgaacugcagacacuggagcucgacauggcgucccugaacaugaccaugccucuuucuuguacaaagaauaacagccaucacuauaucaugguuggcaaugaaaccgggcuggagcucacacugaccaacacguccauuaucaaucauaaauucugcaaccuuucugaugcucacaagaaaaaucuguacgaccaugcccucaugagcauuaucuccaccuuucaccugagcauuccgaacuucaaucaguaugaggccaugucuugugauuuuaacggaggcaagaucuccgugcaguacaaucugagccacgcuuaugccgucgacgcugccaaccauugcggcacaauugcgaauggggugcuccaaaccuucaugcggauggccuggggaggcucuuacaucgcucuggauuccggguguggaagcugggacugcaucaugacaucuuaccaguaucuuauuauccagaacaccacgugggaagaucacugucaguuuucccgccccagcccuauuggcuaccuggggcuccugucccaaagaacacgggacaucuauauuucucgcagacuucugggaaccuucacauggacccucagcgauuccgagggcaacgaaacccccggcggguacugccugacacgguggaugcugaucgaggccgagcucaaguguuuuggaaauacggcuguugccaaaugcaacgaaaagcaugacgaggaguucugcgauaugcugcgccuuuuugacuucaauaaacaggcgaucagacggcugaaggccgaagcucagaugagcauucagcucaucaacaaagccgugaaugcucugauuaacgaucaacuuaucaugaagaaucaucugcgcgacauuauguguaucccuuauugcaacuacucuaaguauugguaccucaaucacaccgucacaggcaaaaccucccugcccagauguuggcuggugagcaacgggucuuaccucaaugaaacacacuucagcgacgauaucgagcagcaggccgacaacaugauuaccgagcugcuucaaaaggaauauaucgaucggcagggaaaaacgccucugggccucguggaccuguuugucuucuccacaucuuuuuaccugauuagcaucuuccuucaccucguuaagauuccgacccaucgccacgugaucgggaaacccugcccuaagccccauagacugaaucacaugggaauuuguuccugcggccuguauaaacacccuggcgugcccgucaaguggaagcggugaggacuagucccuguucccagagcccacuuuuuuuucuuuuuuugaaauaaaauagccugucuuucagaucucaaaggcucuuuucagagccaccaaaaaaaaaaaaaaaaaaaaaaaaaaaaaaaaaaaaaaaaaaaaaaaaaaaaaaaaaaaaaaaaaaaaaaaaaaaaaaaaaaaaaaaaaaaaaaaaaaaaa

SEQ ID NO: 35605 - RNA, 1764 nt, Artificial Sequence
  mRNA product Design a-2 (hSL-A100) comprising derived and/or modified sequence from LASV(LASV1000-NIG-2009;Clade II)__AIT17782__GPCmut9 (opt5)
aggagaguccgcucagccagguugcagaagcggcuuagcguguguccuaaucuucucucugcguguagguaggccugugccgcaaacaagcuuaccaugggccagaucauuaccuucuuucaagaggugccccacgucaucgaagagguuaugaacauugugcugaucgcccucagccugcuugcuauucugaaggggaucuacaauguggccacaugcggacucuucggccuggucuccuuucuucugcucugugggagaucuugcagcacgaccuauaaaggaguguacgaacugcagacacuggagcucgacauggcgucccugaacaugaccaugccucuuucuuguacaaagaauaacagccaucacuauaucaugguuggcaaugaaaccgggcuggagcucacacugaccaacacguccauuaucaaucauaaauucugcaaccuuucugaugcucacaagaaaaaucuguacgaccaugcccucaugagcauuaucuccaccuuucaccugagcauuccgaacuucaaucaguaugaggccaugucuugugauuuuaacggaggcaagaucuccgugcaguacaaucugagccacacauaugcugucgacgccgcuaaccauugcggcaccauugccaauggggugcuccaaacauucaugcggauggcguggggaggcucuuacaucgcccuggauuccggguguggaagcugggacugcaucaugaccucuuaccaguaucuuauuauccagaacacgacaugggaagaucacugucaguuuucccgccccagcccuauuggcuaccuggggcuccugucccaaagaacccgggacaucuauauuucucgcagacuucugggaacauucaccuggacccucagcgauuccgagggcaacgaaacacccggcggguacugccugacgcgguggaugcugaucgaggcugagcucaaguguuuuggaaauaccgccguugcuaaaugcaacgaaaagcaugacgaggaguucugcgauaugcugcgccuuuuugacuucaauaaacaggccaucaagagacugaaaacagaagcgcagaugagcauucagcucaucaacaaggccgugaaugcucugauuaacgaucaacuuaucaugaagaaucaucugcgggacauuauguguaucccuuauugcaacuacucuaaauauugguaccucaaucacaccgucacaggcaagaccucccugccccgcuguuggcuggugagcaacgggucuuaccucaaugaaacgcacuucagcgacgauaucgagcagcaggccgacaacaugauuacagagcugcuucaaaaagaauauaucgauagacagggaaagaccccucugggccucguggaccuguuugucuucuccaccucuuuuuaccugauuagcaucuuccuucaccucguuaaaauuccgacacaucggcacgugguggggaagcccugcccuaaaccccaucgccugaaucacaugggaaucuguuccugcggccuguauaagcacccuggcguccccgugaaguggaaaagaugaggacuagucccuguucccagagcccacuuuuuuuucuuuuuuugaaauaaaauagccugucuuucagaucucaaaggcucuuuucagagccaccaaaaaaaaaaaaaaaaaaaaaaaaaaaaaaaaaaaaaaaaaaaaaaaaaaaaaaaaaaaaaaaaaaaaaaaaaaaaaaaaaaaaaaaaaaaaaaaaaaaaa

SEQ ID NO: 35606 - RNA, 1764 nt, Artificial Sequence
  mRNA product Design a-2 (hSL-A100) comprising derived and/or modified sequence from LASV(LASV221-NIG-2010;Clade II)__AIT17624__GPCmut9 (opt5)
aggagaguccgcucagccagguugcagaagcggcuuagcguguguccuaaucuucucucugcguguagguaggccugugccgcaaacaagcuuaccaugggccagaucauuaccuucuuucaagaggugccccacgucaucgaagagguuaugaacauugugcugaucgcccucagccugcuugcuauucugaaggggaucuacaauguggccacaugcggacucuucggccuggucuccuuucuucugcucugugggagaucuugcagcacgaccuauaaaggaguguacgaacugcagacacuggagcucgacauggcgucccugaacaugaccaugccucuuucuuguacaaagaauaacagccaucacuauaucaugguuggcaaugaaaccgggcuggagcucacacugaccaacacguccauuaucaaucauaaauucugcaaccuuucugaugcucacaagaaaaaucuguacgaccaugcccucaugagcauuaucuccaccuuucaccugagcauuccgaacuucaaucaguaugaggccaugucuugugauuuuaacggaggcaagaucuccgugcaguacaaucugagccacacauaugcuauugacgccgcuaaccauugcggcaccaucgccaaugggguccuccaaacauucaugcggauggcguggggaggcucuuacaucgcccuggauuccggguguggaagcugggacugcauuaugaccucuuaccaguaucuuaucauucagaacacgacaugggaagaucacugucaguuuucccgccccagcccuaucggcuaccuggggcuccugucccaaagaacccgggacauuuauaucucucgcagacuucugggaacauucaccuggacccucagcgauuccgagggcaacgaaacacccggcggguacugccugacgcgguggaugcugaucgaggcugagcucaaguguuuuggaaauaccgccguggcuaaaugcaacgaaaagcaugacgaggaguucugcgauaugcugcgccuuuuugacuucaauaaacaggccauuagacggcugaagacagaagcgcagaugagcauccagcucauuaacaaagccguuaaugcucugaucaacgaucaacuuauuaugaagaaucaucugcgcgacaucauguguaucccuuauugcaacuacucuaaguauugguaccucaaucacaccgugacaggcaaaaccucccugcccagauguuggcuggucagcaacgggucuuaccucaaugaaacgcacuucagcgacgauauugagcagcaggccgacaacaugaucacagagaugcugcaaaaggaauauauggaucggcagggaaaaaccccucuuggccugguggaccucuuuguguucuccaccucuuuuuaccugauuagcaucuuccugcaccuugucaagauuccgacacaucgccacguuaucgggaaacccugcccuaagccccauagacucaaucacaugggaauuuguuccugcggccuguauaaacacccuggcgugcccgugaaguggaagcggugaggacuagucccuguucccagagcccacuuuuuuuucuuuuuuugaaauaaaauagccugucuuucagaucucaaaggcucuuuucagagccaccaaaaaaaaaaaaaaaaaaaaaaaaaaaaaaaaaaaaaaaaaaaaaaaaaaaaaaaaaaaaaaaaaaaaaaaaaaaaaaaaaaaaaaaaaaaaaaaaaaaaa

SEQ ID NO: 35607 - RNA, 1764 nt, Artificial Sequence
  mRNA product Design a-2 (hSL-A100) comprising derived and/or modified sequence from LASV(LASV237-NIG-2010;Clade II)__AIT17638__GPCmut9 (opt5)
aggagaguccgcucagccagguugcagaagcggcuuagcguguguccuaaucuucucucugcguguagguaggccugugccgcaaacaagcuuaccaugggccagaucauuaccuucuuucaagaggugccccacgucaucgaagagguuaugaacauugugcugaucgcccucagccugcuugcuauucugaaggggaucuacaauguggccacaugcggacucuucggccuggucuccuuucuucugcucugugggagaucuugcagcacgaccuauaaaggaguguacgaacugcagacacuggagcucgacauggcgucccugaacaugaccaugccucuuucuuguacaaagaauaacagccaucacuauaucaugguuggcaaugaaaccgggcuggagcucacacugaccaacacguccauuaucaaucauaaauucugcaaccuuucugaugcucacaagaaagaccuguacgaucaugcccucaugagcauuaucuccaccuuucaccugagcauuccgaauuucaaccaguaugaggccaugucuugugacuuuaauggaggcaagaucuccgugcaguacaaccugagccacacauaugcugucgaugccgcuaaucauugcggcaccauugccaacggggugcuccaaacauucaugcggauggcguggggaggcucuuacaucgcccuggacuccggguguggaagcugggauugcaucaugaccucuuaccaguaucuuauuauccagaauacgacaugggaagaccacugucaguuuucccgccccagcccuauuggcuaccuggggcuccugucccaaagaacccgggauaucuauauuucucgcagacuucugggaacauucaccuggacccucagcgacuccgagggcaacgaaacacccggcggguacugccugacgcgguggaugcugaucgaggcugagcucaaguguuuuggaaacaccgccguugcuaaaugcaaugaaaagcaugaugaggaguucugcgacaugcugcgccuuuuugauuucaacaaacaggccaucagacggcugaagacagaagcgcagaugagcauucagcucaucaauaaagccgugaacgcucugauuaaugaccaacuuaucaugaagaaccaucugcgcgacauuauguguaucccuuauugcaauuacucuaaguauugguaccucaaccacaccgucacaggcaaaaccucccugcccagauguuggcuggugagcaaugggucuuaccucaacgaaacgcacuucagcgaugacaucgagcagcaggccgauaauaugauuacagagcugcuucaaaaggaauauauggaccggcagggaaaaaccccucugggccucguggaucuguuugucuucuccaccucuuuuuaccugaucagcauuuuccuucaccucaucaagauuccgacacaucgccacaucaccgggaaacccugcccuaagccccauagacugaaccacaugggaauuuguuccugcggccuguauaaacacccuggcguucccgugaaguggaagcggugaggacuagucccuguucccagagcccacuuuuuuuucuuuuuuugaaauaaaauagccugucuuucagaucucaaaggcucuuuucagagccaccaaaaaaaaaaaaaaaaaaaaaaaaaaaaaaaaaaaaaaaaaaaaaaaaaaaaaaaaaaaaaaaaaaaaaaaaaaaaaaaaaaaaaaaaaaaaaaaaaaaaa

SEQ ID NO: 35608 - RNA, 1764 nt, Artificial Sequence
  mRNA product Design a-2 (hSL-A100) comprising derived and/or modified sequence from LASV(LASV253-NIG-2011;Clade II)__AIT17670__GPCmut9 (opt5)
aggagaguccgcucagccagguugcagaagcggcuuagcguguguccuaaucuucucucugcguguagguaggccugugccgcaaacaagcuuaccaugggccagaucauuaccuucuuucaagaggugccccacgucaucgaagagguuaugaacauugugcugaucgcccucagccugcuugcuauucugaaggggaucuacaauguggccacaugcggacucuucggccuggucuccuuucuucugcucugugggagaucuugcagcacgaccuauaaaggaguguacgaacugcagacacuggagcucgacauggcgucccugaacaugaccaugccucuuucuuguacaaagaauaacagccaucacuauaucaugguuggcaaugaaaccgggcuggagcucacacugaccaacacguccauuaucaaucauaaauucugcaaccuuucugaugcucacaagaaaaaucuguacgaccaugcccucaugagcauuaucuccaccuuucaccugagcauuccgaacuucaaucaguaugaggccaugucuugugauuuuaacggaggcaagaucuccgugcaguacaaucugagccacacauaugcugucgacgccgcuaaccauugcggcaccauugccaauggggugcuccaaacauucaugcggauggcguggggaggcucuuacaucgcccuggauuccggguguggaagcugggacugcaucaugaccucuuaccaguaucuuauuauccagaacacgacaugggaagaucacugucaguuuucccgccccagcccuauuggcuaccuggggcuccugucccaaagaacccgggacaucuauauuucucgcagacuucugggaacauucaccuggacccucagcgauuccgagggcaacgaaacacccggcggguacugccugacgcgguggaugcugaucgaggcugagcucaaguguuuuggaaauaccgccguugcuaaaugcaacgaaaagcaugacgaggaguucugcgauaugcugcgccuuuuugacuucaauaaacaggccaucagacggcugaaggcggaagcccagaugagcauucagcucaucaacaaagcugugaaugcccugauuaacgaucaacuuaucaugaagaaucaucugcgcgacauuauguguaucccuuauugcaacuacucuaaguauugguaccucaaucacacagucaccggcagaacaucccugccccgguguuggcuggugagcaacgggucuuaccucaaugaaacccacuucagcgacgauaucgagcagcaggcugacaacaugauuacggagcugcuucaaaaagaauauaucgaucgccagggaaagacaccucugggccucguggaccuguuugucuucuccaccucuuuuuaccugauuagcaucuuccuucaccucguuaaaauuccgacccauagacacaucauugggaagcccugcccuaaaccccaucggcugaaucacaugggaaucuguuccugcggccuguauaagcacccuggcgugcccgugaaauggaagcgcugaggacuagucccuguucccagagcccacuuuuuuuucuuuuuuugaaauaaaauagccugucuuucagaucucaaaggcucuuuucagagccaccaaaaaaaaaaaaaaaaaaaaaaaaaaaaaaaaaaaaaaaaaaaaaaaaaaaaaaaaaaaaaaaaaaaaaaaaaaaaaaaaaaaaaaaaaaaaaaaaaaaaa

SEQ ID NO: 35609 - RNA, 1764 nt, Artificial Sequence
  mRNA product Design a-2 (hSL-A100) comprising derived and/or modified sequence from LASV(LASV254-NIG-2011;Clade II)__AIT17674__GPCmut9 (opt5)
aggagaguccgcucagccagguugcagaagcggcuuagcguguguccuaaucuucucucugcguguagguaggccugugccgcaaacaagcuuaccaugggccagaucauuaccuucuuucaagaggugccccacgucaucgaagagguuaugaacauugugcugaucgcccucagccugcuugcuauucugaaggggaucuacaauguggccacaugcggacucuucggccuggucuccuuucuucugcucugugggagaucuugcagcacgaccuauaaaggaguguacgaacugcagacacuggagcucgacaugaccaaccugaauaugacaaugccucuuuccuguaccaagaacaauucucaucacuauaucaugguuggcaacgaaacagggcuggagcucacccugacgaauaccagcauuaucaaccauaaauucugcaaucuuuccgaugcgcacaagaaaaaccuguacaaucaugcucucaugucuauuaucagcacauuucaccuguccauuccgaacuucaaucaguaugaggccaugagcugugacuuuaacggaggcaagaucucugugcaguacaaucugucccacagcuaugccgucgaugcugccaaccauugcggcaccauugcuaacggggugcuccaaacauucaugcggauggccuggggaggcucuuacaucgcgcuggacuccggguguggaaauugggauugcaucaugaccagcuaccaguaucuuauuauccagaacacgacaugggaagaccacugucaguuuucucgccccuccccuauuggcuaccuggggcuccugagccaaagaacccgggauaucuauauuucccgcagacuucugggaacauucaccuggacccucucugacagcgagggcaaugaaacacccggcggguacugccugacgcgguggaugcugaucgaggccgagcucaaguguuuuggaaacaccgcuguugccaaaugcaaugaaaagcaugaugaggaguucugcgacaugcugcgccuuuuugauuucaacaaacaggcuaucagacggcugaagacagaagcccaggcgaauauucagcucaucaacaaagccgugaaugcucugauuaacgaccaacuuaucaugaagaaucaucugcgcgauauuauguguaucccuuauugcaacuacuccaaguauugguaccucaaucacaccgucacaggcaaaaccagccugcccagauguuggcuggugucuaacggguccuaccucaaugaaacgcacuucagcgacgacaucgagcagcaggccgauaacaugauuacagagcugcuucaaaaggaauauauggaccggcagggaaaaaccccucugggccucguggaucuguuugucuucucuaccagcuuuuaccugaucuccauuuuccuucaccucguuaagaucccgacacaucgccacgugauugggaaacccugcccuaagccccauagacugaaccacaugggaaucuguucuugcggccuguauaaacacccuggcgugcccgucaaguggaagcggugaggacuagucccuguucccagagcccacuuuuuuuucuuuuuuugaaauaaaauagccugucuuucagaucucaaaggcucuuuucagagccaccaaaaaaaaaaaaaaaaaaaaaaaaaaaaaaaaaaaaaaaaaaaaaaaaaaaaaaaaaaaaaaaaaaaaaaaaaaaaaaaaaaaaaaaaaaaaaaaaaaaaa

SEQ ID NO: 35610 - RNA, 1764 nt, Artificial Sequence
  mRNA product Design a-2 (hSL-A100) comprising derived and/or modified sequence from LASV(Nig08-A19;Clade III)__ADU56618__GPCmut9 (opt5)
aggagaguccgcucagccagguugcagaagcggcuuagcguguguccuaaucuucucucugcguguagguaggccugugccgcaaacaagcuuaccaugggccagaucgugaccuucuuucaagaggucccccacguuauugaagaggugaugaacaucgugcugauugcccucagcauccuggcuauucuuaaggggcuguacaauaucgccacaugcggacucaucggccuggucacguuccuucugcucuccgggagaucuuguagcaugaccuauaaaggaguguacgaacugcagacacuggagcucaacaugaauacccugaacaugacaaugccucuuuccugcaccaagaauaacucucaucacuauauuaugguuggcaaugaaacagggcuggagcucacccugacgaacaccagccuucugcaucacaaauuuuguaaucucuccgacgcgcauaagaaaaaccuguacgaucacacacugaugucuaucauuagcaccuuccaccucuccaucccgaauuuuaaccaguaugaggcuaugagcugcgacuucaauggaggcaagauuacagugcaguacaaccugucucauuccuaugccaucgaugccgcuaaucacuguggcaccgucgccaacggggugcuucaaacguuuaugcggauggcuuggggaggcagcuacauugcccuggacucugggugcggaaagugggauuguaucaugacauccuaccaguaucucaucauucagaacaccacaugggaagaccauugccaguucagccgccccucuccuaucggcuaccuggggcuucugucccaaagaacccgggauauuuauaucagccgcagacuccugggaaccuuuacauggacgcuguccgacucugagggcaaugaaacccccggcggguacugucucacacgguggaugcugauugaggcggagcuuaaaugcuucggaaacaccgccguugcuaaguguaaugaaaaacacgaugaggaauuuugcgacaugcugcgccucuucgauuuuaacaagcaggccaucagacggcugaaagcugaggcccagaugagcauccagcuuauuaauaaggcggugaacgcccugaucaaugaccaacucauuaugaagaaccaucugcgcgauaucaugugcauuccuuauuguaauuacuccaaauauugguaccugaaccacacaagcaccggcagaacgucucucccccggugcuggcuggucuccaaugggagcuaccuuaacgaaacacacuucucugacgacaucgagcagcaggcugauaauaugaucaccgagaugcugcaaaaggaauaucucgaccgccagggaaaaaccccucugggccugguggaucuuuucguguuuagcacauccuucuaccucauuucuaucuuucugcaucuggucaagauuccgacccacagacauaucguugggaaacccuguccuaagccccaccggcucaaccacaugggaauuugcagcuguggccuguauaaacagccuggcgugcccgugcgcuggaagagaugaggacuagucccuguucccagagcccacuuuuuuuucuuuuuuugaaauaaaauagccugucuuucagaucucaaaggcucuuuucagagccaccaaaaaaaaaaaaaaaaaaaaaaaaaaaaaaaaaaaaaaaaaaaaaaaaaaaaaaaaaaaaaaaaaaaaaaaaaaaaaaaaaaaaaaaaaaaaaaaaaaaaa

SEQ ID NO: 35611 - RNA, 1767 nt, Artificial Sequence
  mRNA product Design a-2 (hSL-A100) comprising derived and/or modified sequence from LASV(G1180-SLE-2010;Clade IV)__AIT17168__GPCmut9 (opt5)
aggagaguccgcucagccagguugcagaagcggcuuagcguguguccuaaucuucucucugcguguagguaggccugugccgcaaacaagcuuaccaugggccagaucgugaccuucuuucaagaggucccccacguuauugaagaggugaugaacaucgugcugauugcccucagcauccuggcuguccuuaaggggcuguacaauuucgccacaugcggacucgugggccugcuuacguuucugcuccugugugggagauccugcaccgcgucucgguauaaaggaguuuacgaacugcagacacucgagcugaacauggaaacccuuaauaugacaaugccucugagcuguaccaagaacaauucccaucacuauauuauggugggcaacgagacagggcucgagcugacccuuacgaauaccucuaucaucaaccauaaauucugcaaucugagcgacgcucacaagaaaaaccucuacgaucaugcccugauguccauuaucucuacauuucaccugagcauuccgaauuucaaccaguaugaagccauguccugugacuuuaauggaggcaagaucagcguccaguacaaccucucucacuccuaugcuggcgaugccgcuaaucauugcgggaccguggccaacggaguucugcaaacauucaugcgcauggcguggggcgggagcuacauugcccuugacucuggauguggcuccugggauugcaucaugaccagcuaccaguaucugauuauccagaacacgacaugggaggaccacugucaguuuucuagacccuccccuaucggguaccucggacugcuuagccaacggacccgcgauauuuauaucuccagacggcugcucggcacauucaccuggacccugucugacagcgaaggcaaggauacacccgggggauacugccugacgcgcuggaugcucauugaggcugagcugaaauguuuuggcaauaccgccguggcuaagugcaacgaaaaacaugacgaggaguucugcgauaugcuuagacuguuugacuucaauaagcaggccauccagcggcucaaagcggaagcccagauguccauucaacugaucaacaaggcugucaaugcccuuaucaacgaucagcugauuaugaagaaucaccuccgcgacaucauguguauuccuuauugcaacuacagcaaauauugguaccugaaucacacaaccacagggaagaccucucugcccaaauguuggcucguguccaacggaagcuaccugaaugaaacgcauuucucugacgauaucgagcagcaagcugacaacaugauuacagagaugcuucagaaggaauauauggagagacagggcaaaaccccucuggggcucguggaucuguuugucuucagcaccuccuuuuaccugaucucuaucuuccuucaccucguuaagauuccgacacaucggcacaucgugggaaaaagcugccccaagccucaucgccugaaucacaugggcauuuguuccugcggccuguauaagcagcccggggugccugucaaauggaagagaugaggacuagucccuguucccagagcccacuuuuuuuucuuuuuuugaaauaaaauagccugucuuucagaucucaaaggcucuuuucagagccaccaaaaaaaaaaaaaaaaaaaaaaaaaaaaaaaaaaaaaaaaaaaaaaaaaaaaaaaaaaaaaaaaaaaaaaaaaaaaaaaaaaaaaaaaaaaaaaaaaaaaa

SEQ ID NO: 35612 - RNA, 1767 nt, Artificial Sequence
  mRNA product Design a-2 (hSL-A100) comprising derived and/or modified sequence from LASV(G1442-SLE-2011;Clade IV)__AIT17180__GPCmut9 (opt5)
aggagaguccgcucagccagguugcagaagcggcuuagcguguguccuaaucuucucucugcguguagguaggccugugccgcaaacaagcuuaccaugggccagaucgugaccuucuuucaagaggucccccacguuauugaagaggugaugaacaucgugcugauugcccucagcauccuggcuguccuuaaggggcuguacaauguggccacaugcggacucauuggccugguuacguuccuucugcucugugggagauccugcaccacaacccuguauaaaggaguguacgaacugcagacacucgagcugaacauggaaacccuuaauaugacaaugccucugucuuguaccaagaacaauagccaucacuauauccgggucggcaacgagacggggcucgagcugacccuuacaaauaccuccaucauuaaccauaaauuuugcaaucugucugacgcgcacaagaaaaaccucuacgaucaugcucugaugagcaucauuuccacauuccaccugucuaucccgaauuuuaaccaguaugaagccaugagcugugacuucaauggaggcaagauuuccgugcaguacaaccucagccacucuuaugccggcgaugcugccaaucauugcgggaccguugcuaacggagugcugcaaacguuuaugcgcauggccuggggcggguccuacaucgcgcuugacagcggauguggcaacugggauugcauuaugacaucuuaccaguaucugaucauccagaauaccacaugggacgaucacugucaguucuccagacccagcccuauuggguaccucggacugcuuucucaacggacccgcgacgucuauaucuccagacggcugcucggcaccuuuacauggacgcugagcgauuccgagggcaaggacacccccgggggauacugccugacacgcuggaugcucauugaagccgagcugaaauguuucggcaacaccgcuguggccaagugcaaugagaaacaugaugaagaguuuugcgacaugcuuagacuguucgauuuuaacaagcaggcuauccagcggcucaaagccgaagcgcagaugucuauucaacugaucaauaaggccgugaacgcucuuaucaaugaccagcugauuaugaagaaccaccuccgcgacaucauguguauuccuuauugcaauuacagcaaauauugguaccugaacaauacagccaccgggaagacgucccugcccaaauguuggcucaucagcaacggaucuuaccugaaugagacacacuucuccgaugacauugaacaggaggcugauaacaugaucaccgagaugcuucaaaaggaauauauggagagacagggcaaaaccccucuggggcucgucgaccuguucguuuuuagcacaucuuucuaccugaucagcauuuuucuucaucucgugaagaucccgacccaccggcauauugugggaaaauccugccccaagccucaccgccugaaucauaugggcaucuguucuugcggccuguauaagcagcccggggucccugugagauggaaacggugaggacuagucccuguucccagagcccacuuuuuuuucuuuuuuugaaauaaaauagccugucuuucagaucucaaaggcucuuuucagagccaccaaaaaaaaaaaaaaaaaaaaaaaaaaaaaaaaaaaaaaaaaaaaaaaaaaaaaaaaaaaaaaaaaaaaaaaaaaaaaaaaaaaaaaaaaaaaaaaaaaaaa

SEQ ID NO: 35613 - RNA, 1767 nt, Artificial Sequence
  mRNA product Design a-2 (hSL-A100) comprising derived and/or modified sequence from LASV(G3010-SLE-2013;Clade IV)__AIT17344__GPCmut9 (opt5)
aggagaguccgcucagccagguugcagaagcggcuuagcguguguccuaaucuucucucugcguguagguaggccugugccgcaaacaagcuuaccaugggccagaucgugaccuucuuucaagaggucccccacguuauugaagaggugaugaacaucgugcugauugcccucagcauccuggcuguccuuaaggggcuguacaauuucgccacaugcggacucgugggccugguuacguuucuucugcucugugggagauccugcaccacaucucuguauaaaggaguguacgaacugcagacccucgagcugaacauggaaacacuuaauaugaccaugccucugagcuguacaaagaacaauucccaucacuauauuauggucggcaacgagaccgggcucgagcugacgcuuaccaauacaucuaucaucaaccauaaauucugcaaucugagcgacgcgcacaagaaaaaccucuacaaucaugcucugauguccauuaucucuaccuuucaccugagcauuccgaacuucaaucaguaugaagccauguccugugauuuuaacggaggcaagaucagcgugcaguacaaucucucucacuccuaugccggcgacgcugccagccauugcgggacaguugcuaacggagugcugcaaaccuucaugcggauggccuggggcgggucuuacauugcgcuugauuccggauguggcaagugggacugcaucaugacgagcuaccaguaucugauuauccagaacacaaccugggaggaucacugucaguuuucucgccccuccccuaucggguaccucggacugcuuagccaaagaacacgggacauuuauaucucccgcagacugcucggcaccuucaccuggacacugucugauagcgaaggcaaagacacgcccgggggauacugccugacccgguggaugcucauugaggccgagcugaaguguuuuggcaauacagcugucgccaaaugcaacgaaaagcaugaugaggaguucugcgacaugcuucgccuguuugauuucaauaaacaggcuauccagagacucaagaccgaagcccagauguccauucaacugaucaacaaggcggugaaugcccuuaucaacgaccagcugauuaugaaaaaucaccuccgggauaucauguguauuccuuauugcaacuacagcaaguauugguaccugaaucacacaaccacggggaaaacaucucugcccaaguguuggcucguguccaacggaagcuaccugaaugaaacccauuucucugacgacaucgagcagcaagcugauaacaugauuaccgagaugcuucagaaagaauauauggagcgccagggcaagacaccucuggggcucgucgaccuguuuguuuucagcaccuccuuuuaccugaucucuaucuuccuucaccucgugaaaauuccgacacauagacacaucgugggaaagagcugccccaagccucaucggcugaaucacaugggcauuuguuccugcggccuguauaaacagcccggggucccugugcgcuggaagagaugaggacuagucccuguucccagagcccacuuuuuuuucuuuuuuugaaauaaaauagccugucuuucagaucucaaaggcucuuuucagagccaccaaaaaaaaaaaaaaaaaaaaaaaaaaaaaaaaaaaaaaaaaaaaaaaaaaaaaaaaaaaaaaaaaaaaaaaaaaaaaaaaaaaaaaaaaaaaaaaaaaaaa

SEQ ID NO: 35614 - RNA, 1767 nt, Artificial Sequence
  mRNA product Design a-2 (hSL-A100) comprising derived and/or modified sequence from LASV(G502-SLE-2009;Clade IV)__AIT17126__GPCmut9 (opt5)
aggagaguccgcucagccagguugcagaagcggcuuagcguguguccuaaucuucucucugcguguagguaggccugugccgcaaacaagcuuaccaugggccagaucgugaccuucuuucaagaggucccccacguuauugaagaggugaugaacaucgugcugauugcccucagcauccuggcuguccuuaaggggcuguacaauuucgccacaugcggacucgugggccugcuuacguuucugcuccugugugggagauccugcaccacaggacuguauaaaggcguuuacgaacuccagacccuggagcuuaacauggaaacacugaauaugaccaugccucucucuuguacaaagaacaauagccaucacuauauuaugguggggaacgagaccggacuggagcuuacgcugaccaauacauccaucaucaaccauaaauucugcaaucucucugacgcgcacaagaaaaaccuguacgaucaugcucugaugagcauuaucuccaccuuucaccucucuauuccgaauuucaaccaguaugaagccaugagcugugacuuuaauggcggcaagaucuccguccaguacaaccugagccacucuuaugccggggaugcugccgaccauugcggaacaguggcuaauggcguucuucaaaccuucaugcggauggccuggggaggguccuacauugcgcuggauagcggcugugggcgcugggacugcaucaugacgucuuaccaguaucucauuauccagaacacaaccugggaggaucacugucaguuuuccagacccagcccuaucggauaccugggccuucugucucaacggacacgcgacauuuauaucuccagacggcuccugggcaccuucaccuggacacugagcgauuccgaagggaaggacacgcccggaggcuacugccucacccgcuggaugcugauugaggccgagcuuaaauguuuugggaacacagcuguggccaagugcaaugaaaaacaugaugaggaguucugcgacaugcugagacucuuugauuucaacaagcaggcuauccagcggcugaaagccgaagcgcagaugucuauucaacuuaucaauaaggccgucaacgcucugaucaaugaccagcucgugaugaagaaccaucugcgcgacauuauguguaucccuuauugcaauuacagcagauauugguaccugaaccacaccacaaccggacggacgucccuccccaaauguuggcuggugagcaauggcucuuaccuuaacgaaacacacuucuccgaugacauugagcagcaagccgauaauaugaucaccgagaugcugcagaaggaauauauggagcgccaggggaaaaccccucucggacuggucgaccuguuuguuuucagcacaucuuuuuaccuuauuagcaucuuccuccaccuggugaagaucccgacccauagacacauugugggcaaauccugccccaagccucaucggcugaaccacaugggcaucuguucuugcgggcucuauaaacagcccggagucccugugaaguggaagcgcugaggacuagucccuguucccagagcccacuuuuuuuucuuuuuuugaaauaaaauagccugucuuucagaucucaaaggcucuuuucagagccaccaaaaaaaaaaaaaaaaaaaaaaaaaaaaaaaaaaaaaaaaaaaaaaaaaaaaaaaaaaaaaaaaaaaaaaaaaaaaaaaaaaaaaaaaaaaaaaaaaaaaa

SEQ ID NO: 35615 - RNA, 1767 nt, Artificial Sequence
  mRNA product Design a-2 (hSL-A100) comprising derived and/or modified sequence from LASV(G733-SLE-2010;Clade IV)__AIT17154__GPCmut9 (opt5)
aggagaguccgcucagccagguugcagaagcggcuuagcguguguccuaaucuucucucugcguguagguaggccugugccgcaaacaagcuuaccaugggccagaucgugaccuucuuucaagaggucccccacguuauugaagaggugaugaacaucgugcugauugcccucagcauccuggcuguccuuaaggggcuguacaauuucgccacaugcggaauugugggccucguuuccuuucugcuucugugugggagaucuugcacgaccagccucuauaaaggaguguacgaacugcagacacuggagcucaacauggaaacccugaauaugacaaugccucuuuccuguaccaagaacaauucucaucacuauaucauggucggcaacgagacagggcuggagcucacccugacgaauaccagcaucauuaaccauaaauucugcaaucuuuccgacgcgcacaagaaaaaccuguacgaucaugcucucaugucuaucauuagcacauuucaccuguccaucccgaauuucaaccaguaugaagccaugagcugugacuuuaauggaggcaagauuucugugcaguacaaccugucccacagcuaugccggcgaugcugccaaucauugcgggaccaucgcuaacggaguucuccaaacauucaugcggauggccuggggcgggucuuacauugcgcuggacuccggaugugaucgcugggacugcaucaugaccagcuaccaguaucuuaucauucagaacacgacaugggaggaucacugucaguuuucuagacccuccccuaucggcuaccuggggcuccugagccaacggacccgcgacauuuauaucuccagacggcuucugggaacauucaccuggacccucucugauagcgaaggcaaggacacacccggcggguacugccugacgcgcuggaugcugauugaggccgagcucaaauguuuuggaaauaccgcuguggccaagugcaacgaaaaacaugaugaggaguucugcgacaugcugagacuuuuugauuucaauaagcaggcuauccagcggcugaaagccgaagcgcagauguccauccaacucauuaacaaggccgucaaugcucugaucaacgaccagcuuauuaugaagaaucaucugcgcgacaucauguguauuccuuauugcaacuacagcaaauauugguaccucaaucacacaaccacaggcaagaccucucugcccaaauguuggcugguguccaacgggagcuaccucaaugaaacgcacuucucugaugacaucgagcagcaagccgauaacaugaucacagagaugcugcagaaggaauauauggagagacagggaaaaaccccucuuggccugguggaccucuuugucuucagcaccuccuuuuaccugauuucuaucuuccugcaccuuguuaagauuccgacacaucggcacgugguggggaaaagcugccccaagccucaucgccucaaucacaugggaaucuguuccugcggccuguauggccagcccggggucccugugaaguggaaaagaugaggacuagucccuguucccagagcccacuuuuuuuucuuuuuuugaaauaaaauagccugucuuucagaucucaaaggcucuuuucagagccaccaaaaaaaaaaaaaaaaaaaaaaaaaaaaaaaaaaaaaaaaaaaaaaaaaaaaaaaaaaaaaaaaaaaaaaaaaaaaaaaaaaaaaaaaaaaaaaaaaaaaa

SEQ ID NO: 35616 - RNA, 1767 nt, Artificial Sequence
  mRNA product Design a-2 (hSL-A100) comprising derived and/or modified sequence from MOPV/LASV reassortant(IGS-1;Clade IV)__AFY05576__GPCmut9 (opt5)
aggagaguccgcucagccagguugcagaagcggcuuagcguguguccuaaucuucucucugcguguagguaggccugugccgcaaacaagcuuaccaugggccagaucgugaccuucuuucaagaggucccccacguuauugaagaggugaugaacaucgugcugauugcccucagcguccuggcugugcuuaaggggcuguacaauuucgccacaugcggacucguuggccuggugacguuucuucugcucugugggagauccugcaccacaucucuguauaaaggagucuacgaacugcagacccucgagcugaacauggaaacacuuaauaugaccaugccucugagcuguacaaagaacaauucccaucacuauaucauggugggcaacgagaccgggcucgagcugacgcuuaccaauacaucuauuaucaaccauaaauucugcaaucugagcgacgcgcacaagaaaaaccucuacgaucaugcucugauguccaucauuucuaccuuucaccugagcaucccgaauuucaaccaguaugaagccauguccugugacuuuaauggaggcaagauuagcguucaguacaaccucucucacuccuaugccggcgaugcugccaaucauugcgggacaguggcuaacggaguccugcaaaccuucaugcggauggccuggggcgggagcuacaucgcgcuugacucuggauguggcaacugggauugcauuaugacguccuaccaguaucugaucauucagaauacaaccugggaggaccacugucaguuuagccgccccucuccuaucggguaccucggacugcuuucccaaagaacacgggauaucuauauuagccgcagacugcucggcaccuucaccuggacacuguccgacucugaaggcgaggauacgcccgggggauacugccugacccgguggaugcucaucgaggccgaacugaaguguuuuggcaacacagcuguggccaaaugcaaugagaagcaugacgaagaguucugcgauaugcuucgccuguuugacuucaacaaacaggcuauucagagacucaaggccgaagcgcagaugagcauccaacugauuaauaaagccgugaacgcucuuaucaaugaucagcugaucaugaagaaccaccuccgggacauuauguguaucccuuauugcaauuacuccaaguauugguaccugaaccacaccacaaccgggcgcacgagccugcccaaauguuggcucgucucuaauggauccuaccugaacgagacacauuucagcgacgauauugagcagcaagccgacaauaugaucaccgaaaugcuucagaaggaguauauggaaagacagggcaaaaccccucuggggcucguugaucuguuuguguucucuaccagcuuuuaccugauuuccaucuuccuucaccucgugaagaucccgacacaucggcacauugucggaaaaucuugccccaagccucaucgccugaaccacaugggcaucuguagcugcggccuguauaaacagcccggggugccuguuaaguggaagagaugaggacuagucccuguucccagagcccacuuuuuuuucuuuuuuugaaauaaaauagccugucuuucagaucucaaaggcucuuuucagagccaccaaaaaaaaaaaaaaaaaaaaaaaaaaaaaaaaaaaaaaaaaaaaaaaaaaaaaaaaaaaaaaaaaaaaaaaaaaaaaaaaaaaaaaaaaaaaaaaaaaaaa

SEQ ID NO: 35617 - RNA, 1767 nt, Artificial Sequence
  mRNA product Design a-2 (hSL-A100) comprising derived and/or modified sequence from LASV(LM765-SLE-2012;Clade IV)__AIT17814__GPCmut9 (opt5)
aggagaguccgcucagccagguugcagaagcggcuuagcguguguccuaaucuucucucugcguguagguaggccugugccgcaaacaagcuuaccaugggccagaucgugaccuucuuucaagaggucccccacguuauugaagaggugaugaacaucgugcugauugcccucagcauccuggcuguccuuaaggggcuguacaauuucgccacaugcggacucgugggccugguuacguuucuucugcucugugggagauccugcaccacaucucuguauaaaggaguguacgaacugcagacccucgagcugaacauggaaacacuuaauaugaccaugccucugagcuguacaaagaacaauucccaucacuauauuauggucggcaacgagaccgggcucgagcugacgcuuaccaauacaucuaucaucgaccauaaauucugcaaccugagcgaugcgcaccggaagaaucucuacgaccaugcucugauguccauuaucucuaccuuucaccugagcauuccgaacuucaaucaguaugaagccauguccugugauuuuaacggaggcaaaaucagcgugcaguacaaucucucucacuccuaugccaaggacgcugccgaucauugcggcacaguugcuaacggggugcugcaaaccuucaugcgcauggccuggggaggcagcuacauugcgcuugacucuggguguggaagaugggauugcaucaugacguccuaccaguaucugauuauccagaauacaaccugggaggaccacugucaguuuagccggcccucuccuaucggcuaccucgggcugcuuucccaacgcacaagagauauuuauaucagccggcgccugcucggaaccuucaccuggacacuguccgacucugaaggcaaggauacgcccggcggguacugccugaccagauggaugcucauugaggccgagcugaaauguuuuggaaacacagcugucgccaagugcaacgaaaaacaugacgaggaguucugcgauaugcuucggcuguuugacuucaauaagcaggcuauccagcgccucaaagccgaagcgcagaugagcauucaacugaucaacaaggccgugaaugcucuuaucaacgaccagcugauuaugaagaaucaccucagagauaucauguguauuccuuauugcaacuacuccaaauauugguaccugaaucacaccacaaccggcaagacgagccugcccaaauguuggcucgugucuaacggguccuaccugaaugaaacacauuucagcgacgauaucgagcagcaagccgacaacaugauuaccgagaugcuucagaaggaauauauggagcggcagggaaaaaccccucugggccucgucgaucuguuuguuuucucuaccagcuuuuaccugaucuccaucuuccuucaccucgugaagauuccgacacaucgccacaucguggggaaacccugcccuaagccccauagacugaaucacaugggaauuuguucuugcggccuguauaagcagccuggcguccccgugaaauggaagcggugaggacuagucccuguucccagagcccacuuuuuuuucuuuuuuugaaauaaaauagccugucuuucagaucucaaaggcucuuuucagagccaccaaaaaaaaaaaaaaaaaaaaaaaaaaaaaaaaaaaaaaaaaaaaaaaaaaaaaaaaaaaaaaaaaaaaaaaaaaaaaaaaaaaaaaaaaaaaaaaaaaaaa

SEQ ID NO: 35618 - RNA, 1767 nt, Artificial Sequence
  mRNA product Design a-2 (hSL-A100) comprising derived and/or modified sequence from LASV(LM776-SLE-2012;Clade IV)__AIT17824__GPCmut9 (opt5)
aggagaguccgcucagccagguugcagaagcggcuuagcguguguccuaaucuucucucugcguguagguaggccugugccgcaaacaagcuuaccaugggccagaucgugaccuucuuucaagaggucccccacguuauugaagaggugaugaacaucgugcugauugcccucagcauccuggcuguccuuaaggggcuguacaauuucgccacaugcggacucgugggccugguuacguuucuucugcucugugggagauccugcaccacaucuguguauaaaggagucuacgaacugcagacccuggagcucaacauggaaacacugaauaugaccaugccucuuagcuguacaaagaacaauucccaucacuauauuauggugggcaacgagaccgggcuggagcucacgcugaccaauacaucuaucaucaaccauaaauucugcaaucuuagcgacgcgcacaagaaaaaccuguacgaucaugcucucauguccauuaucucuaccuuucaccugagcauuccgaauuucaaccaguaugaagccauguccugugacuuuaauggaggcaagaucagcguucaguacaaccugucucacuccuaugccggcgaugcugccaaucauugcgggacaguggcuaacggaguccuccaaaccuucaugcggauggccuggggcgggagcuacauugcgcuggacucuggauguggcaagugggauugcaucaugacguccuaccaguaucuuauuauccagaacacaaccugggaggaccacugucaguuuagccgccccucuccuaucggguaccugggacuccugucccaaagaacacgggauauuuauaucagccgcagacuucugggcaccuucaccuggacacucuccgacucugaaggcaaagauacgcccgggggauacugccugacccgguggaugcugauugaggccgagcucaaguguuuuggcaauacagcuguggccaaaugcaacgaaaagcaugacgaggaguucugcgauaugcugcgccuuuuugacuucaauaaacaggcuauccagagacugaaggccgaagcgcagaugagcauucaacucaucaacaaggccgugaaugcucugaucaacgaucagcuuauuaugaaaaaucaucugcgggacaucauguguauuccuuauugcaacuacuccaaguauugguaccucaaucacaccacaaccgggaaaacgagccugcccaaguguuggcuggucucuaacggauccuaccucaaugaaacacacuucagcgacgauaucgagcagcaagccgacaacaugauuaccgagaugcugcagaaagaauauauggagcgccagggcaagaccccucuugggcugguugaucucuuuguguucucuaccagcuuuuaccugaucuccaucuuccugcaccuugugaaaauuccgacacauagacacaucgucggaaagucuugccccaagccucaucggcucaaucacaugggcauuuguagcugcggccuguauaaacagcccggggugccuguucgcuggaagagaugaggacuagucccuguucccagagcccacuuuuuuuucuuuuuuugaaauaaaauagccugucuuucagaucucaaaggcucuuuucagagccaccaaaaaaaaaaaaaaaaaaaaaaaaaaaaaaaaaaaaaaaaaaaaaaaaaaaaaaaaaaaaaaaaaaaaaaaaaaaaaaaaaaaaaaaaaaaaaaaaaaaaa

SEQ ID NO: 35619 - RNA, 1767 nt, Artificial Sequence
  mRNA product Design a-2 (hSL-A100) comprising derived and/or modified sequence from LASV(Mad39;Clade IV)__ANH09722__GPCmut9 (opt5)
aggagaguccgcucagccagguugcagaagcggcuuagcguguguccuaaucuucucucugcguguagguaggccugugccgcaaacaagcuuaccaugggccagaucgugaccuucuuucaagaggucccccacguuauugaagaggugaugaacaucgugcugauugcccucagcauccuggcuguccuuaaggggcuguacaauguggccacaugcggacucauuggccugguuacguuccuucugcucugugggagauccugcaccacaacccuguauaaaggaguguacgaacugcaggcgcucgagcugaacauggaaacacuuaauaugaccaugccucugucuuguacaaagaacaauagccaucacuauauccgggucggcaacgagaccgggcucgagcugacgcuuaccaauacaucccugaucaaccauaaauuuugcaaucucucugacgcucacaagaaaaaccuguacgaucaugcccugaugagcauuaucuccaccuuccaccucucuauuccgaauuuuaaccaguaugaagccaugagcugugacuucaaugauggaaagaucuccgugcaguacaaccugagccacacauaugcuggcgacaccgccaaucauugcggcacgguugcuaacggggugcuucaaacauuuaugcgcauggccuggggaggcucuuacauugcgcuggauuccggguguggaggcugggacugcaucaugaccagcuaccaguaucucauuauccagaacacaaccugggaggaucacugucaguucucuagacccuccccuaucggguaccugggacuucugagccaacggacccgcgacauuuauaucucuagacggcuccugggcacauuuacguggacccuguccgauagcgaaggcaaggacacacccgggggauacugccucacccgcuggaugcugauugaggccgagcuuaaauguuucggcaauacagcugucgccaagugcaacgaaaaacaugaugaggaauuuugcgacaugcugagacucuucgauuuuaauaagcaggcuauccagcggcugaaagccgaggcgcagauguccauucaacuuaucaacaaggccgugaaugcucugaucaacgaccagcucauuaugaagaaucaucugcgcgacaucauguguauuccuuauugcaacuacucuaaauauugguaccugaaucacaccgugacggggaagacaagccuccccaaauguuggcuggucuccaacggaagcuaccuuaaugaaacccacuucucugaugacaucgagcagcaagccgauaacaugauuaccgagaugcugcagaaggaauauauggagagacagggcaaaacaccucucgggcugguugaccuguucguguuuuccaccagcuucuaccuuaucucuaucuuucuccaccuggugaagauuccgacacaucggcacgucgugggaaaacccugcccuaagccccaucgccugaaucacaugggcaucuguagcugcggcuucuauaagcagccugggguucccgugagauggaaacggugaggacuagucccuguucccagagcccacuuuuuuuucuuuuuuugaaauaaaauagccugucuuucagaucucaaaggcucuuuucagagccaccaaaaaaaaaaaaaaaaaaaaaaaaaaaaaaaaaaaaaaaaaaaaaaaaaaaaaaaaaaaaaaaaaaaaaaaaaaaaaaaaaaaaaaaaaaaaaaaaaaaaa

SEQ ID NO: 35620 - RNA, 1767 nt, Artificial Sequence
  mRNA product Design a-2 (hSL-A100) comprising derived and/or modified sequence from LASV(Z0947-SLE-2011;Clade IV)__AIT17840__GPCmut9 (opt5)
aggagaguccgcucagccagguugcagaagcggcuuagcguguguccuaaucuucucucugcguguagguaggccugugccgcaaacaagcuuaccaugggccagaucgugaccuucuuucaagaggucccccacguuauugaagaggugaugaacaucgugcugauugcccucagcauccuggcuguccuuaaggggcuguacaauuucgccacaugcggacucgugggccugguuacguuucuucugcucugugggagauccugcaccauuucucuguauaaaggaguguacgaacugcagacacucgagcugaacauggaaacccuuaauaugacaaugccucugagcuguaccaagaacaauucccaucacuauaucauggucggcaacgagacagggcucgagcugacccuuacgaauaccucuaucauuaaccauaaauucugcaaucugagcgacgcgcacaagaaaaaccucuacgaucaugcucugauguccaucauuucuacauuucaccugagcaucccgaauuucaaccaguaugaagccauguccugugacuuuaauggaggcaagauuagcgugcaguacaaccucucucacuccuaugccggcgaugcugccaaucauugcgggaccguugcuaacggagugcugcaaacauucaugcggauggccuggggcgggagcuacaucgcgcuugacucuggaugugaucgcugggacugcauuaugaccuccuaccaguaucugaucauccagaacacgacaugggaggaucacugucaguuuagcagacccucuccuauuggcuaccucgggcugcuuucccaacggacccgcgacaucuauauuagcagacggcugcucggaacauucaccuggacccuguccgauucugaaggcaaggacacacccggcggguacugccugacgcgcuggaugcucaucgaggccgagcugaaauguuuuggaaauaccgcugucgccaagugcaacgaaaaacaugaugaggaguucugcgacaugcuuagacuguuugauuucaauaagcaggcuauucagcggcucaaagccgaagcgcagaugagcauccaacugaucaacaaggccgugaaugcucuuauuaacgaccagcugaucaugaagaaucaccuccgcgacauuauguguaucccuuauugcaacuacuccaaauauugguaccugaaucacacaaccacaggcaagaccagccugcccaaauguuggcucgugucuaacggguccuaccugaaugaaacgcauuucagcgaugacauugagcagcaagccgauaacaugaucacagagaugcuucagaaggaauauauggagagacagggaaaaaccccucugggccucgucgaccuguuuguuuucucuaccagcuuuuaccugaucuccauuuuccuucaccucgugaagaucccgacacaucggcacauuguggggaaacccugcccuaagccccaucgccugaaucacaugggaaucuguucuugcggccuguauaagcagccuggcguccccgugaaauggaagagaugaggacuagucccuguucccagagcccacuuuuuuuucuuuuuuugaaauaaaauagccugucuuucagaucucaaaggcucuuuucagagccaccaaaaaaaaaaaaaaaaaaaaaaaaaaaaaaaaaaaaaaaaaaaaaaaaaaaaaaaaaaaaaaaaaaaaaaaaaaaaaaaaaaaaaaaaaaaaaaaaaaaaa

SEQ ID NO: 35621 - RNA, 1743 nt, Artificial Sequence
  mRNA product Design a-2 (A100) comprising derived and/or modified sequence from LASV(Josiah;Clade IV)__NP_694870__GPCmut9 (opt1)
aggagaguccgcucagccagguugcagaagcggcuuagcguguguccuaaucuucucucugcguguagguaggccugugccgcaaacaagcuuaccaugggccagaucgugaccuucuuccaggaggucccccacgugaucgaggaggugaugaacaucguccugaucgcccucagcgugcuggccgugcugaaggggcucuacaacuucgcgaccugcggccuggucgggcuggugacguuccuccugcugugcggccgcuccugcaccaccagccucuacaaggggguguacgagcugcagacccuggagcucaacauggagacgcugaacaugaccaugccgcuguccugcaccaagaacaacagccaccacuacaucauggucggcaacgagaccggccucgagcugacgcugaccaacaccuccaucaucaaccacaaguucugcaaccucagcgacgcccacaagaagaaccuguacgaccacgcccugauguccaucaucagcaccuuccaccucuccauccccaacuucaaccaguacgaggccaugagcugcgacuucaacgggggcaagaucuccgugcaguacaaccugagccacuccuacgccggggacgcggccaaccacugcggcacgguggccaacgggguccugcagaccuucaugcggauggccuggggcggcagcuacaucgcgcucgacuccgggugcggcaacugggacugcaucaugaccagcuaccaguaccugaucauccagaacaccacgugggaggaccacugccaguucucccggcccagccccaucggguaccugggccuccugucccagcgcacccgggacaucuacaucagccgccggcugcucggcaccuucaccuggacgcugagcgacuccgaggggaaggacaccccgggcggguacugccugacccgcuggaugcucaucgaggccgagcugaagugcuucggcaacaccgccguggccaagugcaacgagaagcacgacgaggaguucugcgacaugcugcggcuguucgacuucaacaagcaggccauccagcgccugaaggcggaggcccagaugagcauccagcugaucaacaaggccgugaacgcccucaucaacgaccagcugaucaugaagaaccaccuccgggacaucaugugcauccccuacugcaacuacuccaaguacugguaccucaaccacacgaccaccggccgcaccagccugcccaagugcuggcuggucuccaacggcagcuaccucaacgagacgcacuucuccgacgacaucgagcagcaggccgacaacaugaucaccgagaugcugcagaaggaguacauggagcggcaggggaagacgccccugggccucguggaccuguucguguucagcaccuccuucuaccugaucagcaucuuccugcaccucgucaagaucccgacccaccgccacaucguggggaaguccugccccaagccccaccggcugaaccacaugggcaucugcagcugcgggcuguacaagcagcccggcgugccggucaaguggaagcgcugaggacuagucccuguucccagagcccacuuuuuuuucuuuuuuugaaauaaaauagccugucuuucagaucuaaaaaaaaaaaaaaaaaaaaaaaaaaaaaaaaaaaaaaaaaaaaaaaaaaaaaaaaaaaaaaaaaaaaaaaaaaaaaaaaaaaaaaaaaaaaaaaaaaaa

SEQ ID NO: 35622 - RNA, 1740 nt, Artificial Sequence
  mRNA product Design a-2 (A100) comprising derived and/or modified sequence from LASV(LP;Clade I)__AAF86701__GPCmut9 (opt1)
aggagaguccgcucagccagguugcagaagcggcuuagcguguguccuaaucuucucucugcguguagguaggccugugccgcaaacaagcuuaccaugggccagaucaucaccuucuuccaggaggugccccacgucaucgaggaggugaugaacaucgugcugaucgcccucagccugcuggccauccucaaggggcuguacaacaucgcgaccugcggcaucaucgggcuggucgccuuccucuuccugugcggcaaguccugcagccugacgcucaagggcggguacgagcugcagacccuggagcucaacauggagacccugaacaugaccaugccgcuguccugcacgaagaacagcucccaccacuacauccgcgugggcaacgagaccgggcucgagcugacccugaccaacacgagcaucaucaaccacaaguucugcaaccucuccgacgcccacaagaagaaccuguacgaccacgcccugaugagcaucaucuccaccuuccaccucagcauccccaacuucaaccaguacgaggccauguccugcgacuucaacggcgggaagaucagcgugcaguacaaccugucccacagcuacgcgggcgacgccgccgagcacugcgggaccgucgccaacggcgugcugcagaccuucaugcggauggcguggggcgggcgcuacaucgcccucgacuccggcugcgggaacugggacugcaucaugacgagcuaccaguaccugaucauccagaacaccaccugggaggaccacugccaguucucccggcccagccccaucggcuaccugggccuccugucccagcgcacccgggacaucuacaucagccgccggcugcucgggacguucaccuggacccugagcgacuccgagggcaacgagacccccgggggcuacugccugacgcgcuggaugcucaucgaggccgagcugaagugcuucgggaacaccgccguggccaagugcaacgagaagcacgacgaggaguucugcgacaugcugcggcuguucgacuucaacaagcaggcgauccgccggcugaaggccgaggcccagaugagcauccagcugaucaacaaggccgucaacgcccucaucaacgaccagcugaucaugaagaaccaccuccgcgacaucaugugcauccccuacugcaacuacuccaaguacugguaccucaaccacaccagcuccggccggaccagccugcccaagugcuggcugaucuccaacgggagcuaccucaacgagacgcaguucuccgacgacaucgagcagcaggcggacaacaugaucaccgagaugcugcagaaggaguacaucgagcgccagggcaagaccccgcuggggcucguggacaucuucaucuucagcaccuccuucuaccugaucagcaucuuccugcaccugaucaagaucccgacgcaccggcacaucgugggcaagcccugccccaagccccaccgccucaaccacaugggggucugcuccugcggccuguacaagcacccgggcgugcccaccaaguggaagcggugaggacuagucccuguucccagagcccacuuuuuuuucuuuuuuugaaauaaaauagccugucuuucagaucuaaaaaaaaaaaaaaaaaaaaaaaaaaaaaaaaaaaaaaaaaaaaaaaaaaaaaaaaaaaaaaaaaaaaaaaaaaaaaaaaaaaaaaaaaaaaaaaaaaaa

SEQ ID NO: 35623 - RNA, 1740 nt, Artificial Sequence
  mRNA product Design a-2 (A100) comprising derived and/or modified sequence from LASV(803213;Clade II)__AAF86703__GPCmut9 (opt1)
aggagaguccgcucagccagguugcagaagcggcuuagcguguguccuaaucuucucucugcguguagguaggccugugccgcaaacaagcuuaccaugggccagaucaucaccuucuuccaggaggugccccacgucaucgaggaggugaugaacaucgugcugaucgcccucagccugcuggccauccucaaggggaucuacaacgucgcgaccugcggccuguucgggcugaucuccuuccuccugcugugcggccgcagcugcuccgugacguacaaggggguguacgagcuccagacccuggagcugaacauggccaaccucaacaugaccaugccgcugagcugcaccaagaacaacucccaccacuacaucauggucggcaacgagacgggccuggagcucacccugaccaacaccagcaucaucaaccacaaguucugcaaccuguccgacgcccacaagaagaaccucuacgaccacgcccugaugagcaucaucuccacguuccaccugagcauccccaacuucaaccaguacgaggccauguccugcgacuucaacgggggcaagaucagcgugcaguacaaccucucccacagcuucgcgguggacgccgccaaccacugcgggaccaucgccaacggcguccugcagaccuucaugcggauggcguggggcggguccuacaucgcccuggacagcggcugcgggaacugggacugcaucaugaccuccuaccaguaccucaucauccagaacacgaccugggaggaccacugccaguucagccgccccucccccaucggcuaccuggggcugcucagccagcggacccgcgacaucuacaucagccggcgccugcugggcaccuucacguggacccucuccgacagcgagggcaacgaggcccccgggggcuacugccugacccgguggaugcugaucgaggccgagcucaagugcuucgggaacaccgccguggcgaagugcaacgagaagcacgacgaggaguucugcgacaugcugcgccuguucgacuucaacaagcaggccaucaagcggcucaagacggaggcccagauguccauccagcugaucaacaaggccgugaacgcccugaucaacgaccagcucaucaugaagaaccaccuccgcgacaucaugugcauccccuacugcaacuacagccgguacugguaccugaaccacaccgucaccgggaagaccucccugccccgcugcuggcuggugagcaacggcuccuaccugaacgagacgcacuucagcgacgacaucgagcagcaggcggacaacaugaucaccgagaugcuccagaaggaguacauggaccggcagggcaagaccccgcuggggcugguggaccucuucgucuucuccaccagcuucuaccugaucuccaucuuccugcaccuggugaagaucccgacgcaccgccacaucgugggcaagcccugccccaagccccaccggcucaaccacauggggaucugcagcugcggccuguacaagcacccggggguccccgugaaguggaagcgcugaggacuagucccuguucccagagcccacuuuuuuuucuuuuuuugaaauaaaauagccugucuuucagaucuaaaaaaaaaaaaaaaaaaaaaaaaaaaaaaaaaaaaaaaaaaaaaaaaaaaaaaaaaaaaaaaaaaaaaaaaaaaaaaaaaaaaaaaaaaaaaaaaaaaa

SEQ ID NO: 35624 - RNA, 1740 nt, Artificial Sequence
  mRNA product Design a-2 (A100) comprising derived and/or modified sequence from LASV(GA391;Clade III)__CAA36645__GPCmut9 (opt1)
aggagaguccgcucagccagguugcagaagcggcuuagcguguguccuaaucuucucucugcguguagguaggccugugccgcaaacaagcuuaccaugggccagaucgugaccuucuuccaggaggucccccacgugaucgaggaggugaugaacaucguccugaucgcccucagcauccuggccauccugaaggggcucuacaacguggcgaccugcggccugaucgggcuggugacguuccuccugcuguccggccgcagcugcucccucaucuacaaggggaccuacgagcugcagacccuggagcucaacauggagacccugaacaugacgaugccgcugagcugcaccaagaacaacucccaccacuacauccgggucggcaacgagaccggccucgagcugacccugacgaacaccagcauccucaaccacaaguucugcaaccuguccgacgcccacaagcgcaaccuguacgaccacagccucauguccaucaucagcaccuuccaccuguccauccccaacuucaaccaguacgaggccaugagcugcgacuucaacgggggcaagaucaccgugcaguacaaccugucccacagcuucgccguggacgccgcggggcacugcggcacgcucgccaacgggguccugcagaccuucaugcggauggccuggggcggcuccuacaucgcccuggacagcgggugcggcaacugggacugcaucaugaccuccuaccaguaccucaucauccagaacaccacgugggacgaccacugccaguucagccggcccucccccaucggguaccugggccugcucagccagcgcacccgggacaucuacaucagccgccggcugcugggcaccuucaccuggacgcucuccgacagcgaggggaacgagaccccgggcggguacugccugacccgcuggaugcugaucgaggcggagcucaagugcuucggcaacaccgccguggccaagugcaacgagaagcacgacgaggaguucugcgacaugcugcggcuguucgacuucaacaagcaggccauccgccggcucaagacggaggcccagauguccauccagcugaucaacaaggcggugaacgcccugaucaacgaccagcucaucaugaagaaccaccuccgcgacaucaugugcauccccuacugcaacuacagccgguacugguaccugaaccacaccuccaccggcaagaccagccugccccgcugcuggcugaucuccaacggcagcuaccugaacgagacgaaguucuccgacgacaucgagcagcaggccgacaacaugaucaccgagaugcuccagaaggaguacaucgaccggcaggggaagacgccccugggccuggucgaccuguucguguucagcaccuccuucuaccucaucagcaucuuccugcaccuggugaagaucccgacccaccgccacaucgucgggaagcccugccccaagccccaccggcucaaccacaugggcaucugcuccugcgggcuguacaagcagccgggcgugcccgugcgcuggaagcggugaggacuagucccuguucccagagcccacuuuuuuuucuuuuuuugaaauaaaauagccugucuuucagaucuaaaaaaaaaaaaaaaaaaaaaaaaaaaaaaaaaaaaaaaaaaaaaaaaaaaaaaaaaaaaaaaaaaaaaaaaaaaaaaaaaaaaaaaaaaaaaaaaaaaa

SEQ ID NO: 35625 - RNA, 1743 nt, Artificial Sequence
  mRNA product Design a-2 (A100) comprising derived and/or modified sequence from LASV(AV;Clade V)__CCA30314__GPCmut9 (opt1)
aggagaguccgcucagccagguugcagaagcggcuuagcguguguccuaaucuucucucugcguguagguaggccugugccgcaaacaagcuuaccaugggccagaucgugaccuucuuccaggaggucccccacgugaucgaggaggugaugaacaucguccugaucgcccucagcauccuggccgugcugaaggggcucuacaacaucgcgaccugcggccugaucgggcugaucacguuccuccugcugugcggccgcuccugcagcuccaaccucuacaaggggguguacgagcugcagagccuggaccucaacauggagacccugaacaugaccaugccgcuguccugcaccaagaacaacagccaccacuacauccgggucggcaacgacacgggccucgagcugacccugaccaacaccuccauccucaaccacaaguucugcaaccugagcgacgcccacaagaaggaccuguacgaccacgcccucauguccaucaucagcacguuccaccuguccauccccaacuucaaccaguacgaggccaugagcugcgacuucaacgggggcaagaucuccgugcaguacaaccugagccacuccuacgccaucgacgcggccaaccacugcgggaccguggccaacggcauccuccagaccuucaugcgcauggccuggggcgggagcuacaucgcgcuggacuccggcugcgggaacugggacugcaucaugaccagcuaccaguaccugaucauccagaacacgaccugggagaaccacugccaguucucccgccccagccccaucggcuaccucgggcugcugagccagcggacccgcgacaucuacaucucccggcgccuccugggcaccuucacguggacccugagcgacuccgagggcaacgccacccccgggggcuacugccucacccgguggaugcugaucgaggccgagcugaagugcuucgggaacacggccgucgccaagugcaacgagaagcacgacgaggaguucugcgacaugcuccgccuguucgacuucaacaagcaggcgaucagccggcugaaguccgaggcccagaugagcauccagcucaucaacaaggccgugaacgcccugaucaacgaccagcugaucaugaagaaccaccuccgcgacaucaugugcauccccuacugcaacuacuccaaguacugguaccugaaccacaccaucaccgggaagaccagccugcccaagugcuggcucguguccaacggcagcuaccugaacgagacgcacuucuccgacgacaucgagcagcaggccgacaacaugaucaccgagaugcugcagaaggaguacauggagcggcagggcaagaccccgcucgggcuggucgaccuguucguguucagcaccuccuucuaccugaucagcaucuuccuccgccuggugaagaucccgacgcaccggcacaucgucggcaagcccugccccaagccccaccgccugaaccacauggggaucugcuccugcggccucuacaagcagccgggggugcccgugcgguggaagcgcugaggacuagucccuguucccagagcccacuuuuuuuucuuuuuuugaaauaaaauagccugucuuucagaucuaaaaaaaaaaaaaaaaaaaaaaaaaaaaaaaaaaaaaaaaaaaaaaaaaaaaaaaaaaaaaaaaaaaaaaaaaaaaaaaaaaaaaaaaaaaaaaaaaaaa

SEQ ID NO: 35626 - RNA, 1740 nt, Artificial Sequence
  mRNA product Design a-2 (A100) comprising derived and/or modified sequence from LASV(Togo/2016/7082;Clade VI)__AMR44577__GPCmut9 (opt1)
aggagaguccgcucagccagguugcagaagcggcuuagcguguguccuaaucuucucucugcguguagguaggccugugccgcaaacaagcuuaccaugggccagaucaucaccuucuuccaggaggugccccacgucaucgaggaggugaugaacaucgugcugaucgcccucagccugcuggccauccucaagggggucuacaacguggcgaccugcggcaucaucgggcuggugacguuccuguuccucugcggccgcuccugcagccugaucuacaagggguccuacgagcugcagacccucgagcugaacauggagacccugaacaugaccaugccgcucagcugcacgaagaacuccagccaccacuacauccgggucggcaacgagaccggccuggagcugacccucaccaacacguccaucaucaaccacaaguucugcaaccugagcgacgcccacaagcgcaaccuguacgaccacgcccucauguccauccugagcaccuuccaccuguccauccccaacuucaaccaguacgaggccaugagcugcgacuucaacgggggcaagaucuccgugcaguacaaccucagccacgccuacgcgguggacgccgccgagcacugcgggaccgucgccaacggcgugcugcagaccuucaugcggauggcguggggcggguccuacaucgcccuggacagcggcugcgggaacugggacugcaucaugacguccuaccaguaccucaucauccagaacaccaccugggaggaccacugccaguucagccggcccucccccaucggcuaccuggggcugcucagccagcgcacccgggacaucuacaucagccgccggcugcugggcacguucaccuggacccucuccgacagcgagggcaacgagacccccgggggcuacugccugacgcgcuggaugcugaucgaggccgagcucaagugcuucgggaacaccgccguggccaagugcaacgagaagcacgacgaggaguucugcgacaugcugcggcuguucgacuucaacaagcaggcgauccagcgccucaaguccgaggcccagaugagcauccagcugaucaacaaggccgucaacgcccugaucaacgaccagcucaucaugaagaaccaccuccgggacaugaugugcauccccuacugcaacuacuccaaguacugguaccugaaccacaccagcuccgggcgcaccagccugcccaagugcuggcugguguccaacggcagcuaccugaacgagacgcacuucuccgacgacaucgagcagcaggccgacaacaugaucaccgagaugcuccagaaggaguacaucgaccggcagggcaagaccccgcuggggcugguggaccucuucgucuucagcaccuccuucuaccugaucagcaucuuccugcaccugaucaagaucccgacgcaccgccacaucgugggcaagcccugccccaagccccaccggcucaaccacauggggaucugcuccugcggccuguacaagcagccgggggugcccacccgcuggaagcggugaggacuagucccuguucccagagcccacuuuuuuuucuuuuuuugaaauaaaauagccugucuuucagaucuaaaaaaaaaaaaaaaaaaaaaaaaaaaaaaaaaaaaaaaaaaaaaaaaaaaaaaaaaaaaaaaaaaaaaaaaaaaaaaaaaaaaaaaaaaaaaaaaaaaa

SEQ ID NO: 35627 - RNA, 1740 nt, Artificial Sequence
  mRNA product Design a-2 (A100) comprising derived and/or modified sequence from LASV(KAK-428;Clade n.d. (VII))__ANH09740__GPCmut9 (opt1)
aggagaguccgcucagccagguugcagaagcggcuuagcguguguccuaaucuucucucugcguguagguaggccugugccgcaaacaagcuuaccaugggccagaucgugaccuucuuccaggaggucccccacgugaucgaggaggugaugaacaucguccugaucgcccucagccugcuggccauccucaaggggcuguacaacuucgcgaccugcggcgugaucgggcugaucacguuccuccugcugugcggccgcuccugcagcgccaccuacaaggggcaguacgagcuccagacccuggagcugaacauggagucccucaacaugaccaugccgcugagcugcacgaagaacaacucccaccacuacauccgggccggcaacaacaccggccuggagcucacccugaccaacacgagcaucaucucccacaaguucugcaaccugagcgacgcccacaagaagaaccucuacgaccacacccugauguccaucaucaccaccuuccaccugagcauccccaacuucaaccaguacgaggccauguccugcgacuucaacgggggcaagaucagcauccaguacaaccucucccacagcuacgcgggggacgccgcccagcacugcggcacgguggccaacgggguccugcagaccuucaugcgcauggcguggggcggcuccuaccuggcccucgacagcgggugccgcggcugggacugcaucaucuccagcuaccaguaccugaucauccagaacaccaccugggacgaccacugccaguucucccggcccagccccaucggguaccugggcuucgugagccagaagacgcgcgacaucuacaucucccggcgccuccugggcaccuucaccuggacccugagcgacuccgaggggcacgacaugccgggcggguacugccucacgcgguggaugcugaucgaggccgaccugaagugcuucggcaacaccgccguggccaagugcaacgagaagcacgacgaggaguucugcgacauguggcgccucuucgacuucaacaagcaggcgauccagcggcugaaggccgaggcccagaugaacauccagcugaucaacaaggccgucaacgcccucaucaacgaccagcugaugaugaagaaccaccuccgcgacaucaugugcauccccuacugcaacuacagcaaguucugguaccugaacaacaccaccacgggccggaccucccugccccgcugcuggcugaucagcaacggcuccuaccucaacgagacccacuucagcgacgacaucgagcagcaggcggacaacaugaucaccgagaugcugcagaaggaguacauggaccggcaggggaagacgccccugggccucguggaccuguucguguucuccaccagcuucuaccugaucaccaucuuccuccaccuggucaagaucccgacccaccgccacaucguggggaagcccugccccaagccccaccggcugaaccacaugggcaucugcuccugcgggcuguacaagcagccgggcgugcccguccgcuggaagcggugaggacuagucccuguucccagagcccacuuuuuuuucuuuuuuugaaauaaaauagccugucuuucagaucuaaaaaaaaaaaaaaaaaaaaaaaaaaaaaaaaaaaaaaaaaaaaaaaaaaaaaaaaaaaaaaaaaaaaaaaaaaaaaaaaaaaaaaaaaaaaaaaaaaaa

SEQ ID NO: 35628 - RNA, 1740 nt, Artificial Sequence; identical to SEQ ID NO: 35622
  mRNA product Design a-2 (A100) comprising derived and/or modified sequence from LASV(Pinneo-NIG-1969;Clade I)__AIT17836__GPCmut9 (opt1)

SEQ ID NO: 35629 - RNA, 1740 nt, Artificial Sequence
  mRNA product Design a-2 (A100) comprising derived and/or modified sequence from LASV(ISTH0009-NIG-2011;Clade II)__AIT17404__GPCmut9 (opt1)
aggagaguccgcucagccagguugcagaagcggcuuagcguguguccuaaucuucucucugcguguagguaggccugugccgcaaacaagcuuaccaugggccagaucaucaccuucuuccaggaggugccccacgucaucgaggaggugaugaacaucgugcugaucgcccucagccugcuggccauccucaaggggaucuacaacgucgcgaccugcggccuguucgggcugguguccuuccuccugcugugcggccgcagcugcuccacgaccuacaaggggguguacgagcuccagacccuggagcuggacauggccagccucaacaugaccaugccgcuguccugcacgaagaacaacagccaccacuacaucauggucggcaacgagaccggccuggagcucacccugaccaacacguccaucaucaaccacaaguucugcaaccugagcgacgcccacaagaagaaccucuacgaccacgcccugauguccaucaucagcaccuuccaccuguccauccccaacuucaaccaguacgaggccaugagcugcgacuucaacgggggcaagaucuccgugcaguacaaccucagccacgcguacgccguggacgccgccaaccacugcgggaccaucgcgaacggcguccugcagaccuucaugcggauggccuggggcggguccuacaucgcccuggacagcggcugcggguccugggacugcaucaugacgagcuaccaguaccucaucauccagaacaccaccugggaggaccacugccaguucucccgccccagccccaucggcuaccuggggcugcucagccagcggacccgcgacaucuacaucucccggcgccugcugggcacguucaccuggacccucagcgacuccgagggcaacgagacccccgggggcuacugccugacgcgguggaugcugaucgaggccgagcucaagugcuucgggaacaccgccguggcgaagugcaacgagaagcacgacgaggaguucugcgacaugcugcgccuguucgacuucaacaagcaggccauccggcgccucaagaccgaggcccagaugagcauccagcugaucaacaaggccgugaacgcccugaucaacgaccagcucaucaugaagaaccaccuccgggacaucaugugcaucccguacugcaacuacuccaaguacugguaccugaaccacaccgucacggggaagaccagccugccccgcugcuggcugguguccaacggcagcuaccugaacgagacccacuucuccgacgacaucgagcagcaggcggacaacaugaucaccgagcuccugcagaaggaguacauggaccggcagggcaagacgccccuggggcucguggaccuguucgucuucagcaccuccuucuaccugaucagcaucuuccugcaccucaucaagaucccgacccaccgccacaucaccggcaagcccugccccaagccccaccggcugaaccacauggggaucugcuccugcggccuguacaagcacccgggggugcccgugaaguggaagcgcugaggacuagucccuguucccagagcccacuuuuuuuucuuuuuuugaaauaaaauagccugucuuucagaucuaaaaaaaaaaaaaaaaaaaaaaaaaaaaaaaaaaaaaaaaaaaaaaaaaaaaaaaaaaaaaaaaaaaaaaaaaaaaaaaaaaaaaaaaaaaaaaaaaaaa

SEQ ID NO: 35630 - RNA, 1740 nt, Artificial Sequence
  mRNA product Design a-2 (A100) comprising derived and/or modified sequence from LASV(ISTH2010-NIG-2012;Clade II)__AIT17482__GPCmut9 (opt1)
aggagaguccgcucagccagguugcagaagcggcuuagcguguguccuaaucuucucucugcguguagguaggccugugccgcaaacaagcuuaccaugggccagaucaucaccuucuuccaggaggugccccacgucaucgaggaggugaugaacaucgugcugaucgcccucagccugcuggccauccucaaggggaucuacaacgucgcgaccugcggccuguucgggcugguguccuuccuccugcugugcggccgcagcugcuccacgaccuacaaggggguguacgagcuccagacccuggagcuggacauggccagccucaacaugaccaugccgcuguccugcacgaagaacaacagccaccacuacaucauggucggcaacgagaccggccuggagcucacccugaccaacacguccaucaucaaccacaaguucugcaaccugagcgacgcccacaagaagaaccucuacgaccacgcccugauguccaucaucagcaccuuccaccuguccauccccaacuucaaccaguacgaggccaugagcugcgacuucaacgggggcaagaucuccgugcaguacaaccucagccacgcguacgccguggacgccgccaaccacugcgggaccaucgcgaacggcguccugcagaccuucaugcggauggccuggggcggguccuacaucgcccuggacagcggcugcggguccugggacugcaucaugacgagcuaccaguaccucaucauccagaacaucaccugggaggaccacugccaguucucccgccccagccccaucggcuaccuggggcugcucagccagcggacccgcgacaucuacaucucccggcgccugcugggcaccuucacguggacccucagcgacuccgagggcaacgagacccccgggggcuacugccugacccgguggaugcugaucgaggccgagcucaagugcuucgggaacacggccguggcgaagugcaacgagaagcacgacgaggaguucugcgacaugcugcgccuguucgacuucaacaagcaggccauccggcgccucaagaccgaggcccagaugagcauccagcugaucaacaaggccgugaacgcccugaucaacgaccagcucaucaugaagaaccaccuccgggacaucaugugcauccccuacugcaacuacuccaaguacugguaccugaaccacaccgucaccgggaagacgagccugccccgcugcuggcugguguccaacggcagcuaccugaacgagacccacuucuccgacgacaucgagcagcaggcggacaacaugaucaccgagcuccugcagaaggaguacaucgaccggcagggcaagaccccgcuggggcucguggaccuguucgucuucagcacguccuucuaccugaucagcaucuuccugcaccucgugaagaucccgacccaccgccacguggucggcaagcccugccccaagccccaccggcugaaccacauggggaucugcuccugcggccuguacaagcacccgggggugcccgugaaguggaagcgcugaggacuagucccuguucccagagcccacuuuuuuuucuuuuuuugaaauaaaauagccugucuuucagaucuaaaaaaaaaaaaaaaaaaaaaaaaaaaaaaaaaaaaaaaaaaaaaaaaaaaaaaaaaaaaaaaaaaaaaaaaaaaaaaaaaaaaaaaaaaaaaaaaaaaa

SEQ ID NO: 35631 - RNA, 1740 nt, Artificial Sequence
  mRNA product Design a-2 (A100) comprising derived and/or modified sequence from LASV(Lassa virus/H.sapiens-wt/NGA/2015/ISTH_0543;Clade II)__AVO03639__GPCmut9 (opt1)
aggagaguccgcucagccagguugcagaagcggcuuagcguguguccuaaucuucucucugcguguagguaggccugugccgcaaacaagcuuaccaugggccagaucaucaccuucuuccaggaggugccccacgucaucgaggaggugaugaacaucgugcugaucgcccucagccugcuggccauccucaaggggaucuacaacgucgcgaccugcggccuguucgggcugguguccuuccuccugcugugcggccgcagcugcuccacgaccuacaaggggguguacgagcuccagacccuggagcuggacauggccaaccucaacaugaccaugccgcugagcugcacgaagaacaacucccaccacuacaucauggucggcaacgagaccggccuggagcucacccugaccaacacgagcaucaucaaccacaaguucugcaaccuguccgacgcccacaagaagaaccucuacgaccacgcccugaugagcaucaucuccaccuuccaccugagcauccccaacuucaaccaguacgaggccauguccugcgacuucaacgggggcaagaucagcgugcaguacaaccucucccacaccuacgcgguggacgccgccaaccacugcgggaccaucgccaacggcguccugcagacguucaugcggauggcguggggcgggagcuacaucgcccuggacuccggcugcgggagcugggacugcaucaugaccuccuaccaguaccucgugauccagaacaccaccugggaggaccacugccaguucagccgccccucccccaucggcuaccuggggcugcucagccagcggacgcgcgacaucuacaucagccggcgccugcugggcaccuucaccuggacccucuccgacagcgagggcaacgagacgcccgggggcuacugccugacccgguggaugcugaucgaggccgagcucaagugcuucgggaacaccgccguggccaagugcaacgagaagcacgacgaggaguucugcgacaugcugcgccuguucgacuucaacaagcaggcgauccggcgccucaagaccgaggcccagauguccauccagcugaucaacaaggccgucaacgcccugaucaacgaccagcucaucaugaagaaccaccuccgggacaucaugugcauccccuacugcaacuacagcaaguacugguaccugaaccacacggugaccgggaagaccucccugccccgcugcuggcuggugagcaacggcuccuaccugaacgagacccacuucagcgacgacaucgagcagcaggccgacaacaugaucacggagcuccugcagaaggaguacaucgaccggcagggcaagaccccgcuggggcucgucgaccuguucguguucuccaccagcuucuaccugaucuccaucuuccugcaccucgugaagaucccgacccaccgccacaucacgggcaagcccugccccaagccccaccggcugaaccacauggggaucugcagcugcggccuguacaagcacccggggguccccgugaaguggaagcgcugaggacuagucccuguucccagagcccacuuuuuuuucuuuuuuugaaauaaaauagccugucuuucagaucuaaaaaaaaaaaaaaaaaaaaaaaaaaaaaaaaaaaaaaaaaaaaaaaaaaaaaaaaaaaaaaaaaaaaaaaaaaaaaaaaaaaaaaaaaaaaaaaaaaaa

SEQ ID NO: 35632 - RNA, 1740 nt, Artificial Sequence
  mRNA product Design a-2 (A100) comprising derived and/or modified sequence from LASV(Lassa virus/H.sapiens-wt/NGA/2016/ISTH_0009;Clade II)__AVO03571__GPCmut9 (opt1)
aggagaguccgcucagccagguugcagaagcggcuuagcguguguccuaaucuucucucugcguguagguaggccugugccgcaaacaagcuuaccaugggccagaucaucaccuucuuccaggaggugccccacgucaucgaggaggugaugaacaucgugcugaucgcccucagccugcuggccauccucaaggggaucuacaacgucgcgaccugcggccugcuggggcucguguccuuccugcugcucugcggccgcagcugcuccacgaccuacaaggggguguacgagcugcagacccuggagcucgacauggccagccugaacaugaccaugccgcuguccugcacgaagaacaacagccaccacuacaucauggucggcaacgagaccggccucgagcugacccugaccaacacguccaucaucaaccacaaguucugcaaccucagcgacgcccacaagaagaaccuguacgaccacgcccugauguccaucaucagcaccuuccaccucuccauccccaacuucaaccaguacgaggccaugagcugcgacuucaacgggggccggaucuccgugcaguacaaccugagccacuccuacgcgguggacgccgccaaccacugcgggaccaucgccaacggcguccugcagaccuucaugcgcauggcguggggcgggagcuacaucgcccucgacuccggcugcgggagcugggacugcaucaugacguccuaccaguaccugaucauccagaacaccaccugggaggaccacugccaguucagccggcccagccccaucggcuaccuggggcuccugucccagcgcacccgggacaucuacaucagccgccggcugcucggcacguucaccuggacccuguccgacagcgagggcaacgagacccccgggggcuacugccugacgcgcuggaugcucaucgaggccgagcugaagugcuucgggaacaccgccguggccaagugcaacgagaagcacgacgaggaguucugcgacaugcugcggcuguucgacuucaacaagcaggcgauccgccggcugaagaccgaggcccagauguccauccagcugaucaacaaggccgugaacgcccucaucaacgaccagcugaucaugaagaaccaccuccgcgacaucaugugcaucccguacugcaacuacagcaaguacugguaccucaaccacaccgucacggggaagaccucccugccccggugcuggcuggugagcaacggcuccuaccucaacgagacccacuucagcgacgacaucgagcagcaggccgacaacaugaucaccgagcugcugcagaaggaguacaucgaccgccagggcaagacgccccucgggcugguggaccuguucgucuucuccaccagcuucuaccugaucuccaucuuccuccaccuggugaagaucccgacccaccggcacaucaccggcaagcccugccccaagccccaccgccugaaccacauggggaucugcagcugcggccucuacaaccacccgggggugcccgucaaguggaagcggugaggacuagucccuguucccagagcccacuuuuuuuucuuuuuuugaaauaaaauagccugucuuucagaucuaaaaaaaaaaaaaaaaaaaaaaaaaaaaaaaaaaaaaaaaaaaaaaaaaaaaaaaaaaaaaaaaaaaaaaaaaaaaaaaaaaaaaaaaaaaaaaaaaaaa

SEQ ID NO: 35633 - RNA, 1740 nt, Artificial Sequence
  mRNA product Design a-2 (A100) comprising derived and/or modified sequence from LASV(Lassa virus/H.sapiens-wt/NGA/2016/ISTH_0017;Clade II)__AVO03567__GPCmut9 (opt1)
aggagaguccgcucagccagguugcagaagcggcuuagcguguguccuaaucuucucucugcguguagguaggccugugccgcaaacaagcuuaccaugggccagaucaucaccuucuuccaggaggugccccacgucaucgaggaggugaugaacaucgugcugaucgcccucagccugcuggccauccucaaggggaucuacaacgucgcgaccugcggccuguucgggcugguguccuuccuccugcugugcggccgcagcugcuccacgaccuacaaggggguguacgagcuccagacccuggagcuggacauggccagccucaacaugaccaugccgcuguccugcacgaagaacaacagccaccacuacaucauggucggcaacgagaccggccuggagcucacccugaccaacacguccaucaucaaccacaaguucugcaaccugagcgacgcccacaagaagaaccucuacgaccacgcccugauguccaucaucagcaccuuccaccuguccauccccaacuucaaccaguacgaggccaugagcugcgacuucaacgggggcaagaucuccgugcaguacaaccucagccacaccuacgcgaucgacgccgccaaccacugcgggaccaucgccaacggcgugcugcagacguucaugcggauggcguggggcggguccuacaucgcccuggacagcggcugcggguccugggacugcaucaugaccagcuaccaguaccucaucauccagaacaccaccugggaggaccacugccaguucucccgccccagccccaucggcuaccuggggcugcucagccagcggacgcgcgacaucuacaucucccggcgccugcugggcaccuucaccuggacccucagcgacuccgagggcaacgagacgcccgggggcuacugccugacccgguggaugcugaucgaggccgagcucaagugcuucgggaacaccgccgucgccaagugcaacgagaagcacgacgaggaguucugcgacaugcugcgccuguucgacuucaacaagcaggcgauccggcgccucaagaccgaggcccagaugagcauccagcugaucaacaaggccgugaacgcccugaucaacgaccagcucaucaugaagaaccaccuccgggacaucaugugcauccccuacugcaacuacuccaaguacugguaccugaaccacacggugaccgggaagaccagccugccccgcugcuggcuggucuccaacggcagcuaccugaacgagacccacuucuccgacgacaucgagcagcaggccgacaacaugaucacggagcuccugcagaaggaguacauggaccggcagggcaagaccccgcuggggcucguggaccuguucguguucagcaccuccuucuaccugaucagcaucuuccugcaccucguccgcaucccgacccaccggcacgugaucggcaagcccugccccaagccccaccgccugaaccacauggggaucugcuccugcggccuguacaagcacccgggggugcccgucaaguggaagcggugaggacuagucccuguucccagagcccacuuuuuuuucuuuuuuugaaauaaaauagccugucuuucagaucuaaaaaaaaaaaaaaaaaaaaaaaaaaaaaaaaaaaaaaaaaaaaaaaaaaaaaaaaaaaaaaaaaaaaaaaaaaaaaaaaaaaaaaaaaaaaaaaaaaaa

SEQ ID NO: 35634 - RNA, 1740 nt, Artificial Sequence
  mRNA product Design a-2 (A100) comprising derived and/or modified sequence from LASV(Lassa virus/H.sapiens-wt/NGA/2018/ISTH_0959;Clade II)__AVV65099__GPCmut9 (opt1)
aggagaguccgcucagccagguugcagaagcggcuuagcguguguccuaaucuucucucugcguguagguaggccugugccgcaaacaagcuuaccaugggccagaucaucaccuucuuccaggaggugccccacgucaucgaggaggugaugaacaucgugcugaucgcccucagccugcuggccauccucaaggggaucuacaacgucgugaccugcggccuguucgggcugguguccuuccuccugcugugcggccgcagcugcuccacgaccuacaagggggucuacgagcuccagacccuggagcuggacauggcgagccucaacaugaccaugccgcuguccugcacgaagaacaacagccaccacuacaucauggugggcaacgagaccggccuggagcucacccugaccaacacguccaucaucaaccacaaguucugcaaccugagcgacgcccacaagaagaaccucuacgaccacgcccugauguccaucaucagcaccuuccaccuguccauccccaacuucaaccaguacgaggccaugagcugcgacuucaacgggggcaagaucuccgugcaguacaaccucagccacgccuacgcgaucgacgccgccaaccacugcgggaccaucgccaacggcguccugcagaccuucaugcggauggcguggggcggguccuacaucgcccuggacagcggcugcggguccugggacugcaucaugacgagcuaccaguaccucaucauccagaacaccaccugggaggaccacugccaguucucccgccccagccccaucggcuaccuggggcugcucagccagcggacccgcgacaucuacaucucccggcgccugcugggcacguucaccuggacccucagcgacuccgagggcaacgagacccccgggggcuacugccugacgcgguggaugcugaucgaggccgagcucaagugcuucgggaacaccgccguggccaagugcaacgagaagcacgacgaggaguucugcgacaugcugcgccuguucgacuucaacaagcaggcgauccggcgccucaagaccgaggcccagaugagcauccagcugaucaacaaggccgugaacgcccugaucaacgaccagcucaucaugaagaaccaccuccgggacaucaugugcaucccguacugcaacuacuccaaguacugguaccugaaccacaccgucacggggaagaccagccugccccgcugcuggcugguguccaacggcagcuaccugaacgagacccacuucuccgacgacaucgagcagcaggccgacaacaugaucaccgagcuccugcagaaggaguacaucgaccggcagggcaagacgccccuggggcucguggaccuguucgucuucagcaccuccuucuaccugaucagcaucuuccugcaccucgugaagaucccgacccaccgccacgugaucggcaagcccugccccaagccccaccggcugaaccacauggggaucugcuccugcggccuguacaagcacccggggguccccgugaaguggaagcgcugaggacuagucccuguucccagagcccacuuuuuuuucuuuuuuugaaauaaaauagccugucuuucagaucuaaaaaaaaaaaaaaaaaaaaaaaaaaaaaaaaaaaaaaaaaaaaaaaaaaaaaaaaaaaaaaaaaaaaaaaaaaaaaaaaaaaaaaaaaaaaaaaaaaaa

SEQ ID NO: 35635 - RNA, 1740 nt, Artificial Sequence
  mRNA product Design a-2 (A100) comprising derived and/or modified sequence from LASV(LASV003-NIG-2008;Clade II)__AIT17580__GPCmut9 (opt1)
aggagaguccgcucagccagguugcagaagcggcuuagcguguguccuaaucuucucucugcguguagguaggccugugccgcaaacaagcuuaccaugggccagaucaucaccuucuuccaggaggugccccacgucaucgaggaggugaugaacaucgugcugaucgcccucagccugcuggccauccucaaggggaucuacaacgucgcgaccugcggccuguucgggcugguguccuuccuccugcugugcggccgcagcugcuccacgaccuacaaggggguguacgagcuccagacccuggagcuggacauggccagccucaacaugaccaugccgcuguccugcacgaagaacaacagccaccacuacaucauggucggcaacgagaccggccuggagcucacccugaccaacacguccaucaucaaccacaaguucugcaaccugagcgacgcccacaagaagaaccucuacgaccacgcccugauguccaucaucagcaccuuccaccuguccauccccaacuucaaccaguacgaggccaugagcugcgacuucaacgggggcaagaucuccgugcaguacaaccucagccacaccuacgcgguggacgccgccaaccacugcgggaccaucgccaacggcguccugcagacguucaugcggauggcguggggcggguccuacaucgcccuggacagcggcugcggguccugggacugcaucaugaccagcuaccaguaccucaucauccagaacaccaccugggaggaccacugccaguucucccgccccagccccaucggcuaccuggggcugcucagccagcggacgcgcgacaucuacaucucccggcgccugcugggcaccuucaccuggacccucagcgacuccgagagcaacgagacgccgggcggguacugccugacccgguggaugcugaucgaggccgagcucaagugcuucggcaacaccgccguggccaagugcaacgagaagcacgacgaggaguucugcgacaugcugcgccuguucgacuucaacaagcaggcgauccggcgccucaaggccgaggcccagauguccauccagcugaucaacaaggccgugaacgcccugaucaacgaccagcucaucaugaagaaccaccuccgggacaucaugugcauccccuacugcaacuacagcaaguacugguaccugaaccacaccgucacgggccgcaccucccugccccggugcuggcuggugagcaacggguccuaccugaacgagacccacuucagcgacgacaucgagcagcaggcggacaacaugaucaccgagcuccugcagaaggaguacauggaccgccagggcaagacgccccugggccucguggaccuguucgucuucuccaccagcuucuaccugaucuccaucuuccugcaccucgugaagaucccgacccaccggcacgugaucgggaagcccugccccaagccccaccgccugaaccacaugggcaucugcagcugcgggcuguacaagcacccgggcguccccgugaaguggaagcggugaggacuagucccuguucccagagcccacuuuuuuuucuuuuuuugaaauaaaauagccugucuuucagaucuaaaaaaaaaaaaaaaaaaaaaaaaaaaaaaaaaaaaaaaaaaaaaaaaaaaaaaaaaaaaaaaaaaaaaaaaaaaaaaaaaaaaaaaaaaaaaaaaaaaa

SEQ ID NO: 35636 - RNA, 1740 nt, Artificial Sequence
  mRNA product Design a-2 (A100) comprising derived and/or modified sequence from LASV(LASV035-NIG-2009;Clade II)__AIT17588__GPCmut9 (opt1)
aggagaguccgcucagccagguugcagaagcggcuuagcguguguccuaaucuucucucugcguguagguaggccugugccgcaaacaagcuuaccaugggccagaucaucaccuucuuccaggaggugccccacgucaucgaggaggugaugaacaucgugcugaucgcccucagccugcuggccauccucaaggggaucuacaacgucgcgaccugcggccuguucgggcugguguccuuccuccugcugugcggccgcagcugcuccacgaccuacaaggggguguacgagcuccagacccuggagcuggacauggccagccucaacaugaccaugccgcuguccugcacgaagaacaacagccaccacuacaucauggucggcaacgagaccggccuggagcucacccugaccaacacguccaucaucaaccacaaguucugcaaccugagcgacgcccacaagaagaaccucuacgaccacgcccugauguccaucaucagcaccuuccaccuguccauccccaacuucaaccaguacgaggccaugagcugcgacuucaacgggggcaagaucuccgugcaguacaaccucagccacgcguacgccguggacgccgccaaccacugcgggaccaucgcgaacggcguccugcagaccuucaugcggauggccuggggcggguccuacaucgcccuggacagcggcugcggguccugggacugcaucaugacgagcuaccaguaccucaucauccagaacaccaccugggaggaccacugccaguucucccgccccagccccaucggcuaccuggggcugcucagccagcggacccgcgacaucuacaucucccggcgccugcugggcacguucaccuggacccucagcgacuccgagggcaacgagacccccgggggcuacugccugacgcgguggaugcugaucgaggccgagcucaagugcuucgggaacaccgccguggcgaagugcaacgagaagcacgacgaggaguucugcgacaugcugcgccuguucgacuucaacaagcaggccauccggcgccucaaggccgaggcccagaugagcauccagcugaucaacaaggccgugaacgcgcugaucaacgaccagcucaucaugaagaaccaccuccgggacaucaugugcauccccuacugcaacuacuccaaguacugguaccugaaccacaccgucaccgggaagacgagccugccccgcugcuggcugguguccaacggcagcuaccugaacgagacccacuucuccgacgacaucgagcagcaggccgacaacaugaucaccgagcuccugcagaaggaguacaucgaccggcagggcaagaccccgcuggggcucguggaccuguucgucuucagcacguccuucuaccugaucagcaucuuccugcaccucgugaagaucccgacccaccgccacgugaucggcaagcccugccccaagccccaccggcugaaccacauggggaucugcuccugcggccuguacaagcacccggggguccccgugaaguggaagcgcugaggacuagucccuguucccagagcccacuuuuuuuucuuuuuuugaaauaaaauagccugucuuucagaucuaaaaaaaaaaaaaaaaaaaaaaaaaaaaaaaaaaaaaaaaaaaaaaaaaaaaaaaaaaaaaaaaaaaaaaaaaaaaaaaaaaaaaaaaaaaaaaaaaaaa

SEQ ID NO: 35637 - RNA, 1740 nt, Artificial Sequence
  mRNA product Design a-2 (A100) comprising derived and/or modified sequence from LASV(LASV1000-NIG-2009;Clade II)__AIT17782__GPCmut9 (opt1)
aggagaguccgcucagccagguugcagaagcggcuuagcguguguccuaaucuucucucugcguguagguaggccugugccgcaaacaagcuuaccaugggccagaucaucaccuucuuccaggaggugccccacgucaucgaggaggugaugaacaucgugcugaucgcccucagccugcuggccauccucaaggggaucuacaacgucgcgaccugcggccuguucgggcugguguccuuccuccugcugugcggccgcagcugcuccacgaccuacaaggggguguacgagcuccagacccuggagcuggacauggccagccucaacaugaccaugccgcuguccugcacgaagaacaacagccaccacuacaucauggucggcaacgagaccggccuggagcucacccugaccaacacguccaucaucaaccacaaguucugcaaccugagcgacgcccacaagaagaaccucuacgaccacgcccugauguccaucaucagcaccuuccaccuguccauccccaacuucaaccaguacgaggccaugagcugcgacuucaacgggggcaagaucuccgugcaguacaaccucagccacaccuacgcgguggacgccgccaaccacugcgggaccaucgccaacggcguccugcagacguucaugcggauggcguggggcggguccuacaucgcccuggacagcggcugcggguccugggacugcaucaugaccagcuaccaguaccucaucauccagaacaccaccugggaggaccacugccaguucucccgccccagccccaucggcuaccuggggcugcucagccagcggacgcgcgacaucuacaucucccggcgccugcugggcaccuucaccuggacccucagcgacuccgagggcaacgagacgcccgggggcuacugccugacccgguggaugcugaucgaggccgagcucaagugcuucgggaacaccgccguggccaagugcaacgagaagcacgacgaggaguucugcgacaugcugcgccuguucgacuucaacaagcaggcgaucaagcggcucaagaccgaggcccagaugagcauccagcugaucaacaaggccgugaacgcccugaucaacgaccagcucaucaugaagaaccaccuccgcgacaucaugugcauccccuacugcaacuacuccaaguacugguaccugaaccacacggucaccgggaagaccagccugccccggugcuggcugguguccaacggcagcuaccugaacgagacccacuucuccgacgacaucgagcagcaggccgacaacaugaucacggagcuccugcagaaggaguacaucgaccgccagggcaagaccccgcuggggcucguggaccuguucgucuucagcaccuccuucuaccugaucagcaucuuccugcaccucgugaagaucccgacccaccggcacguggucggcaagcccugccccaagccccaccgccugaaccacauggggaucugcuccugcggccuguacaagcacccgggggugcccgugaaguggaagcggugaggacuagucccuguucccagagcccacuuuuuuuucuuuuuuugaaauaaaauagccugucuuucagaucuaaaaaaaaaaaaaaaaaaaaaaaaaaaaaaaaaaaaaaaaaaaaaaaaaaaaaaaaaaaaaaaaaaaaaaaaaaaaaaaaaaaaaaaaaaaaaaaaaaaa

SEQ ID NO: 35638 - RNA, 1740 nt, Artificial Sequence
  mRNA product Design a-2 (A100) comprising derived and/or modified sequence from LASV(LASV221-NIG-2010;Clade II)__AIT17624__GPCmut9 (opt1)
aggagaguccgcucagccagguugcagaagcggcuuagcguguguccuaaucuucucucugcguguagguaggccugugccgcaaacaagcuuaccaugggccagaucaucaccuucuuccaggaggugccccacgucaucgaggaggugaugaacaucgugcugaucgcccucagccugcuggccauccucaaggggaucuacaacgucgcgaccugcggccuguucgggcugguguccuuccuccugcugugcggccgcagcugcuccacgaccuacaaggggguguacgagcuccagacccuggagcuggacauggccagccucaacaugaccaugccgcuguccugcacgaagaacaacagccaccacuacaucauggucggcaacgagaccggccuggagcucacccugaccaacacguccaucaucaaccacaaguucugcaaccugagcgacgcccacaagaagaaccucuacgaccacgcccugauguccaucaucagcaccuuccaccuguccauccccaacuucaaccaguacgaggccaugagcugcgacuucaacgggggcaagaucuccgugcaguacaaccucagccacaccuacgcgaucgacgccgccaaccacugcgggaccaucgccaacggcgugcugcagacguucaugcggauggcguggggcggguccuacaucgcccuggacagcggcugcggguccugggacugcaucaugaccagcuaccaguaccucaucauccagaacaccaccugggaggaccacugccaguucucccgccccagccccaucggcuaccuggggcugcucagccagcggacgcgcgacaucuacaucucccggcgccugcugggcaccuucaccuggacccucagcgacuccgagggcaacgagacgcccgggggcuacugccugacccgguggaugcugaucgaggccgagcucaagugcuucgggaacaccgccgucgccaagugcaacgagaagcacgacgaggaguucugcgacaugcugcgccuguucgacuucaacaagcaggcgauccggcgccucaagaccgaggcccagaugagcauccagcugaucaacaaggccgugaacgcccugaucaacgaccagcucaucaugaagaaccaccuccgggacaucaugugcauccccuacugcaacuacuccaaguacugguaccugaaccacacggugaccgggaagaccagccugccccgcugcuggcuggucuccaacggcagcuaccugaacgagacccacuucuccgacgacaucgagcagcaggccgacaacaugaucacggagaugcuccagaaggaguacauggaccggcagggcaagaccccgcuggggcugguggaccucuucguguucagcaccuccuucuaccugaucagcaucuuccugcaccuggucaagaucccgacccaccgccacgugaucggcaagcccugccccaagccccaccggcucaaccacauggggaucugcuccugcggccuguacaagcacccgggggugcccgucaaguggaagcgcugaggacuagucccuguucccagagcccacuuuuuuuucuuuuuuugaaauaaaauagccugucuuucagaucuaaaaaaaaaaaaaaaaaaaaaaaaaaaaaaaaaaaaaaaaaaaaaaaaaaaaaaaaaaaaaaaaaaaaaaaaaaaaaaaaaaaaaaaaaaaaaaaaaaaa

SEQ ID NO: 35639 - RNA, 1740 nt, Artificial Sequence
  mRNA product Design a-2 (A100) comprising derived and/or modified sequence from LASV(LASV237-NIG-2010;Clade II)__AIT17638__GPCmut9 (opt1)
aggagaguccgcucagccagguugcagaagcggcuuagcguguguccuaaucuucucucugcguguagguaggccugugccgcaaacaagcuuaccaugggccagaucaucaccuucuuccaggaggugccccacgucaucgaggaggugaugaacaucgugcugaucgcccucagccugcuggccauccucaaggggaucuacaacgucgcgaccugcggccuguucgggcugguguccuuccuccugcugugcggccgcagcugcuccacgaccuacaaggggguguacgagcuccagacccuggagcuggacauggccagccucaacaugaccaugccgcuguccugcacgaagaacaacagccaccacuacaucauggucggcaacgagaccggccuggagcucacccugaccaacacguccaucaucaaccacaaguucugcaaccugagcgacgcccacaagaaggaccucuacgaccacgcccugauguccaucaucagcaccuuccaccuguccauccccaacuucaaccaguacgaggccaugagcugcgacuucaacgggggcaagaucuccgugcaguacaaccucagccacaccuacgcgguggacgccgccaaccacugcgggaccaucgccaacggcguccugcagacguucaugcggauggcguggggcggguccuacaucgcccuggacagcggcugcggguccugggacugcaucaugaccagcuaccaguaccucaucauccagaacaccaccugggaggaccacugccaguucucccgccccagccccaucggcuaccuggggcugcucagccagcggacgcgcgacaucuacaucucccggcgccugcugggcaccuucaccuggacccucagcgacuccgagggcaacgagacgcccgggggcuacugccugacccgguggaugcugaucgaggccgagcucaagugcuucgggaacaccgccguggccaagugcaacgagaagcacgacgaggaguucugcgacaugcugcgccuguucgacuucaacaagcaggcgauccggcgccucaagaccgaggcccagaugagcauccagcugaucaacaaggccgugaacgcccugaucaacgaccagcucaucaugaagaaccaccuccgggacaucaugugcauccccuacugcaacuacuccaaguacugguaccugaaccacacggucaccgggaagaccagccugccccgcugcuggcugguguccaacggcagcuaccugaacgagacccacuucuccgacgacaucgagcagcaggccgacaacaugaucacggagcuccugcagaaggaguacauggaccggcagggcaagaccccgcuggggcucguggaccuguucgucuucagcaccuccuucuaccugaucagcaucuuccugcaccucaucaagaucccgacccaccgccacaucacgggcaagcccugccccaagccccaccggcugaaccacauggggaucugcuccugcggccuguacaagcacccgggggugcccgugaaguggaagcgcugaggacuagucccuguucccagagcccacuuuuuuuucuuuuuuugaaauaaaauagccugucuuucagaucuaaaaaaaaaaaaaaaaaaaaaaaaaaaaaaaaaaaaaaaaaaaaaaaaaaaaaaaaaaaaaaaaaaaaaaaaaaaaaaaaaaaaaaaaaaaaaaaaaaaa

SEQ ID NO: 35640 - RNA, 1740 nt, Artificial Sequence
  mRNA product Design a-2 (A100) comprising derived and/or modified sequence from LASV(LASV253-NIG-2011;Clade II)__AIT17670__GPCmut9 (opt1)
aggagaguccgcucagccagguugcagaagcggcuuagcguguguccuaaucuucucucugcguguagguaggccugugccgcaaacaagcuuaccaugggccagaucaucaccuucuuccaggaggugccccacgucaucgaggaggugaugaacaucgugcugaucgcccucagccugcuggccauccucaaggggaucuacaacgucgcgaccugcggccuguucgggcugguguccuuccuccugcugugcggccgcagcugcuccacgaccuacaaggggguguacgagcuccagacccuggagcuggacauggccagccucaacaugaccaugccgcuguccugcacgaagaacaacagccaccacuacaucauggucggcaacgagaccggccuggagcucacccugaccaacacguccaucaucaaccacaaguucugcaaccugagcgacgcccacaagaagaaccucuacgaccacgcccugauguccaucaucagcaccuuccaccuguccauccccaacuucaaccaguacgaggccaugagcugcgacuucaacgggggcaagaucuccgugcaguacaaccucagccacaccuacgcgguggacgccgccaaccacugcgggaccaucgccaacggcguccugcagacguucaugcggauggcguggggcggguccuacaucgcccuggacagcggcugcggguccugggacugcaucaugaccagcuaccaguaccucaucauccagaacaccaccugggaggaccacugccaguucucccgccccagccccaucggcuaccuggggcugcucagccagcggacgcgcgacaucuacaucucccggcgccugcugggcaccuucaccuggacccucagcgacuccgagggcaacgagacgcccgggggcuacugccugacccgguggaugcugaucgaggccgagcucaagugcuucgggaacaccgccguggccaagugcaacgagaagcacgacgaggaguucugcgacaugcugcgccuguucgacuucaacaagcaggcgauccggcgccucaaggccgaggcccagaugagcauccagcugaucaacaaggccgugaacgcccugaucaacgaccagcucaucaugaagaaccaccuccgggacaucaugugcaucccguacugcaacuacuccaaguacugguaccugaaccacaccgucacggggcgcaccagccugccccggugcuggcugguguccaacggcagcuaccugaacgagacccacuucuccgacgacaucgagcagcaggcggacaacaugaucaccgagcuccugcagaaggaguacaucgaccgccagggcaagacgccccuggggcucguggaccuguucgucuucagcaccuccuucuaccugaucagcaucuuccugcaccucgugaagaucccgacccaccggcacaucaucggcaagcccugccccaagccccaccgccugaaccacauggggaucugcuccugcggccuguacaagcacccgggggugcccgucaaguggaagcggugaggacuagucccuguucccagagcccacuuuuuuuucuuuuuuugaaauaaaauagccugucuuucagaucuaaaaaaaaaaaaaaaaaaaaaaaaaaaaaaaaaaaaaaaaaaaaaaaaaaaaaaaaaaaaaaaaaaaaaaaaaaaaaaaaaaaaaaaaaaaaaaaaaaaa

SEQ ID NO: 35641 - RNA, 1740 nt, Artificial Sequence
  mRNA product Design a-2 (A100) comprising derived and/or modified sequence from LASV(LASV254-NIG-2011;Clade II)__AIT17674__GPCmut9 (opt1)
aggagaguccgcucagccagguugcagaagcggcuuagcguguguccuaaucuucucucugcguguagguaggccugugccgcaaacaagcuuaccaugggccagaucaucaccuucuuccaggaggugccccacgucaucgaggaggugaugaacaucgugcugaucgcccucagccugcuggccauccucaaggggaucuacaacgucgcgaccugcggccuguucgggcugguguccuuccuccugcugugcggccgcagcugcuccacgaccuacaaggggguguacgagcuccagacccuggagcuggacaugaccaaccucaacaugacgaugccgcugagcugcaccaagaacaacucccaccacuacaucauggucggcaacgagaccggccuggagcucacccugacgaacaccagcaucaucaaccacaaguucugcaaccuguccgacgcccacaagaagaaccucuacaaccacgcccugaugagcaucaucuccaccuuccaccugagcauccccaacuucaaccaguacgaggccauguccugcgacuucaacgggggcaagaucagcgugcaguacaaccucucccacagcuacgccguggacgcggccaaccacugcgggaccaucgccaacggcguccugcagacguucaugcggauggccuggggcggguccuacaucgcgcuggacagcggcugcgggaacugggacugcaucaugaccuccuaccaguaccucaucauccagaacaccaccugggaggaccacugccaguucagccgccccucccccaucggcuaccuggggcugcucagccagcggacgcgcgacaucuacaucagccggcgccugcugggcaccuucaccuggacccucuccgacagcgagggcaacgagacgcccgggggcuacugccugacccgguggaugcugaucgaggccgagcucaagugcuucgggaacaccgccguggccaagugcaacgagaagcacgacgaggaguucugcgacaugcugcgccuguucgacuucaacaagcaggccauccggcgccucaagaccgaggcgcaggccaacauccagcugaucaacaaggccgugaacgcccugaucaacgaccagcucaucaugaagaaccaccuccgggacaucaugugcauccccuacugcaacuacuccaaguacugguaccugaaccacacggucaccgggaagaccagccugccccgcugcuggcugguguccaacggcagcuaccugaacgagacccacuucuccgacgacaucgagcagcaggccgacaacaugaucacggagcuccugcagaaggaguacauggaccggcagggcaagaccccgcuggggcucguggaccuguucgucuucagcaccuccuucuaccugaucagcaucuuccugcaccucgugaagaucccgacccaccgccacgugaucggcaagcccugccccaagccccaccggcugaaccacauggggaucugcuccugcggccuguacaagcacccggggguccccgugaaguggaagcgcugaggacuagucccuguucccagagcccacuuuuuuuucuuuuuuugaaauaaaauagccugucuuucagaucuaaaaaaaaaaaaaaaaaaaaaaaaaaaaaaaaaaaaaaaaaaaaaaaaaaaaaaaaaaaaaaaaaaaaaaaaaaaaaaaaaaaaaaaaaaaaaaaaaaaa

SEQ ID NO: 35642 - RNA, 1740 nt, Artificial Sequence
  mRNA product Design a-2 (A100) comprising derived and/or modified sequence from LASV(Nig08-A19;Clade III)__ADU56618__GPCmut9 (opt1)
aggagaguccgcucagccagguugcagaagcggcuuagcguguguccuaaucuucucucugcguguagguaggccugugccgcaaacaagcuuaccaugggccagaucgugaccuucuuccaggaggucccccacgugaucgaggaggugaugaacaucguccugaucgcccucagcauccuggccauccugaaggggcucuacaacaucgcgaccugcggccugaucgggcuggugacguuccuccugcuguccggccgcagcugcuccaugaccuacaaggggguguacgagcuccagacccuggagcugaacaugaacacccucaacaugacgaugccgcugagcugcaccaagaacaacucccaccacuacaucauggucggcaacgagaccggccuggagcucacccugacgaacaccagccugcuccaccacaaguucugcaaccuguccgacgcccacaagaagaaccuguacgaccacacccucaugagcaucaucuccaccuuccaccugagcauccccaacuucaaccaguacgaggccauguccugcgacuucaacgggggcaagaucacggugcaguacaaccugagccacuccuacgccaucgacgccgcgaaccacugcgggaccguggccaacggcguccuccagaccuucaugcggauggccuggggcgggagcuacaucgcccuggacuccggcugcgggaagugggacugcaucaugaccagcuaccaguaccugaucauccagaacacgaccugggaggaccacugccaguucucccggcccagccccaucggcuaccucgggcugcugucccagcgcacccgggacaucuacaucagccgccggcuccugggcaccuucacguggacccugagcgacuccgagggcaacgagacccccgggggcuacugccucacccgcuggaugcugaucgaggcggagcugaagugcuucgggaacacggccguggccaagugcaacgagaagcacgacgaggaguucugcgacaugcuccggcuguucgacuucaacaagcaggccauccgccggcugaaggccgaggcgcagaugagcauccagcucaucaacaaggccgugaacgcccugaucaacgaccagcugaucaugaagaaccaccuccgcgacaucaugugcauccccuacugcaacuacuccaaguacugguaccugaaccacaccagcaccgggcggaccucccugccccgcugcuggcucgucagcaacggcuccuaccugaacgagacgcacuucagcgacgacaucgagcagcaggccgacaacaugaucaccgagaugcugcagaaggaguaccucgaccggcagggcaagaccccgcuggggcugguggaccuguucguguucuccaccagcuucuaccucaucuccaucuuccugcaccuggucaagaucccgacgcaccgccacaucgugggcaagcccugccccaagccccaccggcucaaccacauggggaucugcagcugcggccuguacaagcagccgggggugcccguccgcuggaagcggugaggacuagucccuguucccagagcccacuuuuuuuucuuuuuuugaaauaaaauagccugucuuucagaucuaaaaaaaaaaaaaaaaaaaaaaaaaaaaaaaaaaaaaaaaaaaaaaaaaaaaaaaaaaaaaaaaaaaaaaaaaaaaaaaaaaaaaaaaaaaaaaaaaaaa

SEQ ID NO: 35643 - RNA, 1743 nt, Artificial Sequence
  mRNA product Design a-2 (A100) comprising derived and/or modified sequence from LASV(G1180-SLE-2010;Clade IV)__AIT17168__GPCmut9 (opt1)
aggagaguccgcucagccagguugcagaagcggcuuagcguguguccuaaucuucucucugcguguagguaggccugugccgcaaacaagcuuaccaugggccagaucgugaccuucuuccaggaggucccccacgugaucgaggaggugaugaacaucguccugaucgcccucagcauccuggccgugcugaaggggcucuacaacuucgcgaccugcggccugguggggcugcucaccuuccugcugcucugcggccgcuccugcaccgccagccgguacaagggggucuacgagcugcagacccuggagcucaacauggagacccugaacaugacgaugccgcuguccugcaccaagaacaacagccaccacuacaucauggugggcaacgagaccggccucgagcugacccugacgaacaccuccaucaucaaccacaaguucugcaaccucagcgacgcccacaagaagaaccuguacgaccacgcccugauguccaucaucagcaccuuccaccucuccauccccaacuucaaccaguacgaggccaugagcugcgacuucaacgggggcaagaucuccgugcaguacaaccugagccacuccuacgcgggggacgccgccaaccacugcggcaccgucgccaacggggugcugcagacguucaugcgcauggcguggggcggcagcuacaucgcccucgacuccgggugcggcagcugggacugcaucaugaccuccuaccaguaccugaucauccagaacaccaccugggaggaccacugccaguucagccggcccucccccaucggguaccugggccuccugagccagcgcacgcgggacaucuacaucagccgccggcugcucggcaccuucaccuggacccuguccgacagcgaggggaaggacacgccgggcggguacugccugacccgcuggaugcucaucgaggccgagcugaagugcuucggcaacaccgccguggccaagugcaacgagaagcacgacgaggaguucugcgacaugcugcggcuguucgacuucaacaagcaggcgauccagcgccugaaggccgaggcccagauguccauccagcugaucaacaaggccgucaacgcccucaucaacgaccagcugaucaugaagaaccaccuccgggacaucaugugcauccccuacugcaacuacagcaaguacugguaccucaaccacaccacgaccggcaagaccucccugcccaagugcuggcuggugagcaacggcuccuaccucaacgagacccacuucagcgacgacaucgagcagcaggcggacaacaugaucacggagaugcugcagaaggaguacauggagcgccaggggaagacgccccugggccucguggaccuguucgucuucuccaccagcuucuaccugaucuccaucuuccugcaccucgugaagaucccgacccaccggcacaucgugggcaagagcugccccaagccccaccgccugaaccacauggggaucugcuccugcgggcuguacaagcagcccggcgucccggugaaguggaagcggugaggacuagucccuguucccagagcccacuuuuuuuucuuuuuuugaaauaaaauagccugucuuucagaucuaaaaaaaaaaaaaaaaaaaaaaaaaaaaaaaaaaaaaaaaaaaaaaaaaaaaaaaaaaaaaaaaaaaaaaaaaaaaaaaaaaaaaaaaaaaaaaaaaaaa

SEQ ID NO: 35644 - RNA, 1743 nt, Artificial Sequence
  mRNA product Design a-2 (A100) comprising derived and/or modified sequence from LASV(G1442-SLE-2011;Clade IV)__AIT17180__GPCmut9 (opt1)
aggagaguccgcucagccagguugcagaagcggcuuagcguguguccuaaucuucucucugcguguagguaggccugugccgcaaacaagcuuaccaugggccagaucgugaccuucuuccaggaggucccccacgugaucgaggaggugaugaacaucguccugaucgcccucagcauccuggccgugcugaaggggcucuacaacguggcgaccugcggccugaucgggcuggucacguuccuccugcugugcggccgcuccugcaccaccacccucuacaaggggguguacgagcugcagacgcuggagcucaacauggagacccugaacaugaccaugccgcugagcugcaccaagaacaacucccaccacuacauccgggugggcaacgagacgggccucgagcugacccugaccaacaccagcaucaucaaccacaaguucugcaaccucuccgacgcccacaagaagaaccuguacgaccacgcccugaugagcaucaucuccacguuccaccucagcauccccaacuucaaccaguacgaggccauguccugcgacuucaacgggggcaagaucagcguccaguacaaccugucccacagcuacgccggggacgcggccaaccacugcggcaccguggccaacggggugcugcagaccuucaugcgcauggccuggggcggcuccuacaucgcgcucgacagcgggugcggcaacugggacugcaucaugaccuccuaccaguaccugaucauccagaacacgaccugggacgaccacugccaguucagccgccccucccccaucggguaccugggccuccugagccagcggacccgcgacgucuacaucucccggcgccugcucggcaccuucacguggacccugagcgacagcgaggggaaggacaccccgggcggguacugccugacccgguggaugcucaucgaggccgagcugaagugcuucggcaacacggccguggccaagugcaacgagaagcacgacgaggaguucugcgacaugcugcgccucuucgacuucaacaagcaggccauccagcggcugaaggcggaggcccagauguccauccagcugaucaacaaggccgugaacgcccucaucaacgaccagcugaucaugaagaaccaccuccgcgacaucaugugcauccccuacugcaacuacagcaaguacugguaccugaacaacaccgccaccggcaagaccucccugcccaagugcuggcugaucagcaacggcuccuaccucaacgagacgcacuucagcgacgacaucgagcaggaggcggacaacaugaucaccgagaugcugcagaaggaguacauggagcggcaggggaagacgccccugggccucgucgaccuguucguguucuccaccagcuucuaccugaucuccaucuuccugcaccucgugaagaucccgacccaccgccacaucgucggcaagagcugccccaagccccaccggcugaaccacauggggaucugcuccugcgggcuguacaagcagcccggcgugccggugcgcuggaagcggugaggacuagucccuguucccagagcccacuuuuuuuucuuuuuuugaaauaaaauagccugucuuucagaucuaaaaaaaaaaaaaaaaaaaaaaaaaaaaaaaaaaaaaaaaaaaaaaaaaaaaaaaaaaaaaaaaaaaaaaaaaaaaaaaaaaaaaaaaaaaaaaaaaaaa

SEQ ID NO: 35645 - RNA, 1743 nt, Artificial Sequence
  mRNA product Design a-2 (A100) comprising derived and/or modified sequence from LASV(G3010-SLE-2013;Clade IV)__AIT17344__GPCmut9 (opt1)
aggagaguccgcucagccagguugcagaagcggcuuagcguguguccuaaucuucucucugcguguagguaggccugugccgcaaacaagcuuaccaugggccagaucgugaccuucuuccaggaggucccccacgugaucgaggaggugaugaacaucguccugaucgcccucagcauccuggccgugcugaaggggcucuacaacuucgcgaccugcggccugguggggcuggucacguuccuccugcugugcggccgcuccugcaccaccagccucuacaaggggguguacgagcugcagacccuggagcucaacauggagacgcugaacaugaccaugccgcuguccugcaccaagaacaacagccaccacuacaucauggugggcaacgagaccggccucgagcugacgcugaccaacaccuccaucaucaaccacaaguucugcaaccucagcgacgcccacaagaagaaccuguacaaccacgcccugauguccaucaucagcaccuuccaccucuccauccccaacuucaaccaguacgaggccaugagcugcgacuucaacgggggcaagaucuccguccaguacaaccugagccacuccuacgccggggacgcggccagccacugcggcacgguggccaacggggugcugcagaccuucaugcggauggccuggggcggcuccuacaucgcgcucgacagcgggugcggcaagugggacugcaucaugaccuccuaccaguaccugaucauccagaacaccacgugggaggaccacugccaguucagccgccccucccccaucggguaccugggccuccugagccagcggacccgcgacaucuacaucagccggcgccugcucggcaccuucaccuggacgcuguccgacagcgaggggaaggacaccccgggcggguacugccugacccgguggaugcucaucgaggccgagcugaagugcuucggcaacaccgccgucgccaagugcaacgagaagcacgacgaggaguucugcgacaugcugcgccucuucgacuucaacaagcaggccauccagcggcugaagacggaggcgcagauguccauccagcugaucaacaaggccgugaacgcccucaucaacgaccagcugaucaugaagaaccaccuccgcgacaucaugugcauccccuacugcaacuacagcaaguacugguaccugaaccacaccaccaccggcaagacgucccugcccaagugcuggcuggugagcaacggcuccuaccucaacgagacccacuucagcgacgacaucgagcagcaggccgacaacaugaucaccgagaugcugcagaaggaguacauggagcggcaggggaagacgccccugggccucgucgaccuguucguguucuccaccagcuucuaccugaucuccaucuuccugcaccucgugaagaucccgacccaccgccacaucgucggcaagagcugccccaagccccaccggcugaaccacauggggaucugcuccugcgggcuguacaagcagcccggcgugccggugcgcuggaagcggugaggacuagucccuguucccagagcccacuuuuuuuucuuuuuuugaaauaaaauagccugucuuucagaucuaaaaaaaaaaaaaaaaaaaaaaaaaaaaaaaaaaaaaaaaaaaaaaaaaaaaaaaaaaaaaaaaaaaaaaaaaaaaaaaaaaaaaaaaaaaaaaaaaaaa

SEQ ID NO: 35646 - RNA, 1743 nt, Artificial Sequence
  mRNA product Design a-2 (A100) comprising derived and/or modified sequence from LASV(G502-SLE-2009;Clade IV)__AIT17126__GPCmut9 (opt1)
aggagaguccgcucagccagguugcagaagcggcuuagcguguguccuaaucuucucucugcguguagguaggccugugccgcaaacaagcuuaccaugggccagaucgugaccuucuuccaggaggucccccacgugaucgaggaggugaugaacaucguccugaucgcccucagcauccuggccgugcugaaggggcucuacaacuucgcgaccugcggccugguggggcugcucacguuccugcugcucugcggccgcuccugcaccaccgggcuguacaagggcgucuacgagcugcagacccucgagcugaacauggagacgcugaacaugaccaugccgcucagcugcaccaagaacaacucccaccacuacaucauggugggcaacgagaccgggcuggagcugacgcucaccaacaccagcaucaucaaccacaaguucugcaaccuguccgacgcccacaagaagaaccuguacgaccacgcccucaugagcaucaucuccaccuuccaccugagcauccccaacuucaaccaguacgaggccauguccugcgacuucaacggcgggaagaucagcgugcaguacaaccugucccacagcuacgccggcgacgcggccgaccacugcgggacggucgccaacggcgugcuccagaccuucaugcggauggccuggggcggguccuacaucgcgcuggacagcggcugcgggcggugggacugcaucaugaccuccuaccaguaccugaucauccagaacaccacgugggaggaccacugccaguucagccgccccucccccaucggcuaccucggccugcugagccagcggacccgcgacaucuacaucucccggcgccuccuggggaccuucaccuggacgcugagcgacagcgagggcaaggacacccccgggggcuacugccucacccgguggaugcugaucgaggccgagcugaagugcuucgggaacaccgccguggccaagugcaacgagaagcacgacgaggaguucugcgacaugcuccgccuguucgacuucaacaagcaggccauccagcggcugaaggcggaggcccagauguccauccagcucaucaacaaggccgucaacgcccugaucaacgaccagcuggugaugaagaaccaccuccgcgacaucaugugcauccccuacugcaacuacagccgguacugguaccugaaccacacgaccaccggccgcaccucccugcccaagugcuggcucgugagcaacggguccuaccugaacgagacgcacuucagcgacgacaucgagcagcaggccgacaacaugaucaccgagaugcugcagaaggaguacauggagcggcagggcaagaccccgcucgggcuggucgaccuguucguguucuccaccagcuucuaccugaucuccaucuuccuccaccuggugaagaucccgacgcaccgccacaucgucggcaagagcugccccaagccccaccggcugaaccacauggggaucugcuccugcggccucuacaagcagcccggcgugccggugaaguggaagcgcugaggacuagucccuguucccagagcccacuuuuuuuucuuuuuuugaaauaaaauagccugucuuucagaucuaaaaaaaaaaaaaaaaaaaaaaaaaaaaaaaaaaaaaaaaaaaaaaaaaaaaaaaaaaaaaaaaaaaaaaaaaaaaaaaaaaaaaaaaaaaaaaaaaaaa

SEQ ID NO: 35647 - RNA, 1743 nt, Artificial Sequence
  mRNA product Design a-2 (A100) comprising derived and/or modified sequence from LASV(G733-SLE-2010;Clade IV)__AIT17154__GPCmut9 (opt1)
aggagaguccgcucagccagguugcagaagcggcuuagcguguguccuaaucuucucucugcguguagguaggccugugccgcaaacaagcuuaccaugggccagaucgugaccuucuuccaggaggucccccacgugaucgaggaggugaugaacaucguccugaucgcccucagcauccuggccgugcugaaggggcucuacaacuucgcgaccugcggcaucguggggcuggucuccuuccugcuccugugcggccgcagcugcacgaccucccuguacaaggggguguacgagcuccagacccuggagcugaacauggagacccucaacaugacgaugccgcugagcugcaccaagaacaacucccaccacuacaucauggugggcaacgagaccggccuggagcucacccugacgaacaccagcaucaucaaccacaaguucugcaaccuguccgacgcccacaagaagaaccucuacgaccacgcccugaugagcaucaucuccaccuuccaccugagcauccccaacuucaaccaguacgaggccauguccugcgacuucaacgggggcaagaucagcguccaguacaaccucucccacagcuacgccggggacgcggccaaccacugcggcaccaucgccaacggggugcugcagacguucaugcggauggccuggggcggcuccuacaucgcgcuggacagcgggugcgaccggugggacugcaucaugaccuccuaccaguaccucaucauccagaacaccaccugggaggaccacugccaguucagccgccccucccccaucggcuaccuggggcugcucagccagcggacgcgcgacaucuacaucagccggcgccugcugggcaccuucaccuggacccucuccgacagcgagggcaaggacacgcccgggggcuacugccugacccgguggaugcugaucgaggccgagcucaagugcuucgggaacaccgccguggccaagugcaacgagaagcacgacgaggaguucugcgacaugcugcgccuguucgacuucaacaagcaggccauccagcggcucaaggcggaggcccagauguccauccagcugaucaacaaggccgucaacgcccugaucaacgaccagcucaucaugaagaaccaccuccgcgacaucaugugcauccccuacugcaacuacagcaaguacugguaccugaaccacaccacgaccgggaagaccucccugcccaagugcuggcuggugagcaacggcuccuaccugaacgagacccacuucagcgacgacaucgagcagcaggccgacaacaugaucacggagaugcuccagaaggaguacauggagcggcagggcaagaccccgcuggggcugguggaccucuucgucuucuccaccagcuucuaccugaucuccaucuuccugcaccuggugaagaucccgacccaccgccacguggucggcaagagcugccccaagccccaccggcucaaccacauggggaucugcuccugcggccuguacgggcagcccggcgugccggugaaguggaagcgcugaggacuagucccuguucccagagcccacuuuuuuuucuuuuuuugaaauaaaauagccugucuuucagaucuaaaaaaaaaaaaaaaaaaaaaaaaaaaaaaaaaaaaaaaaaaaaaaaaaaaaaaaaaaaaaaaaaaaaaaaaaaaaaaaaaaaaaaaaaaaaaaaaaaaa

SEQ ID NO: 35648 - RNA, 1743 nt, Artificial Sequence
  mRNA product Design a-2 (A100) comprising derived and/or modified sequence from MOPV/LASV reassortant(IGS-1;Clade IV)__AFY05576__GPCmut9 (opt1)
aggagaguccgcucagccagguugcagaagcggcuuagcguguguccuaaucuucucucugcguguagguaggccugugccgcaaacaagcuuaccaugggccagaucgugaccuucuuccaggaggucccccacgugaucgaggaggugaugaacaucguccugaucgcccucagcgugcuggccgugcugaaggggcucuacaacuucgcgaccugcggccuggucgggcuggugacguuccuccugcugugcggccgcuccugcaccaccagccucuacaaggggguguacgagcugcagacccuggagcucaacauggagacgcugaacaugaccaugccgcuguccugcaccaagaacaacagccaccacuacaucauggucggcaacgagaccggccucgagcugacgcugaccaacaccuccaucaucaaccacaaguucugcaaccucagcgacgcccacaagaagaaccuguacgaccacgcccugauguccaucaucagcaccuuccaccucuccauccccaacuucaaccaguacgaggccaugagcugcgacuucaacgggggcaagaucuccgugcaguacaaccugagccacuccuacgccggggacgcggccaaccacugcggcacgguggccaacgggguccugcagaccuucaugcggauggccuggggcggcagcuacaucgcgcucgacuccgggugcggcaacugggacugcaucaugaccagcuaccaguaccugaucauccagaacaccacgugggaggaccacugccaguucucccggcccagccccaucggguaccugggccuccugucccagcgcacccgggacaucuacaucagccgccggcugcucggcaccuucaccuggacgcugagcgacuccgagggggaggacaccccgggcggguacugccugacccgcuggaugcucaucgaggccgagcugaagugcuucggcaacaccgccguggccaagugcaacgagaagcacgacgaggaguucugcgacaugcugcggcuguucgacuucaacaagcaggccauccagcgccugaaggcggaggcccagaugagcauccagcugaucaacaaggccgugaacgcccucaucaacgaccagcugaucaugaagaaccaccuccgggacaucaugugcauccccuacugcaacuacuccaaguacugguaccucaaccacacgaccaccggccgcaccagccugcccaagugcuggcuggucuccaacggcagcuaccucaacgagacgcacuucuccgacgacaucgagcagcaggccgacaacaugaucaccgagaugcugcagaaggaguacauggagcggcaggggaagacgccccugggccucguggaccuguucguguucagcaccuccuucuaccugaucagcaucuuccugcaccucgucaagaucccgacccaccgccacaucguggggaaguccugccccaagccccaccggcugaaccacaugggcaucugcagcugcgggcuguacaagcagcccggcgugccggucaaguggaagcgcugaggacuagucccuguucccagagcccacuuuuuuuucuuuuuuugaaauaaaauagccugucuuucagaucuaaaaaaaaaaaaaaaaaaaaaaaaaaaaaaaaaaaaaaaaaaaaaaaaaaaaaaaaaaaaaaaaaaaaaaaaaaaaaaaaaaaaaaaaaaaaaaaaaaaa

SEQ ID NO: 35649 - RNA, 1743 nt, Artificial Sequence
  mRNA product Design a-2 (A100) comprising derived and/or modified sequence from LASV(LM765-SLE-2012;Clade IV)__AIT17814__GPCmut9 (opt1)
aggagaguccgcucagccagguugcagaagcggcuuagcguguguccuaaucuucucucugcguguagguaggccugugccgcaaacaagcuuaccaugggccagaucgugaccuucuuccaggaggucccccacgugaucgaggaggugaugaacaucguccugaucgcccucagcauccuggccgugcugaaggggcucuacaacuucgcgaccugcggccugguggggcuggucacguuccuccugcugugcggccgcuccugcaccaccagccucuacaaggggguguacgagcugcagacccuggagcucaacauggagacgcugaacaugaccaugccgcuguccugcaccaagaacaacagccaccacuacaucauggugggcaacgagaccggccucgagcugacgcugaccaacaccuccaucaucgaccacaaguucugcaaccucagcgacgcccaccggaagaaccuguacgaccacgcccugauguccaucaucagcaccuuccaccucuccauccccaacuucaaccaguacgaggccaugagcugcgacuucaacgggggcaagaucuccguccaguacaaccugagccacuccuacgccaaggacgcggccgaccacugcgggacgguggccaacggcgugcugcagaccuucaugcgcauggccuggggcgggagcuacaucgcgcucgacuccggcugcgggcgcugggacugcaucaugaccagcuaccaguaccugaucauccagaacaccacgugggaggaccacugccaguucucccggcccagccccaucggcuaccuggggcuccugucccagcgcacccgggacaucuacaucagccgccggcugcucggcaccuucaccuggacgcugagcgacuccgagggcaaggacacccccgggggcuacugccugacccgcuggaugcucaucgaggccgagcugaagugcuucgggaacaccgccgucgccaagugcaacgagaagcacgacgaggaguucugcgacaugcugcggcuguucgacuucaacaagcaggccauccagcgccugaaggcggaggcccagaugagcauccagcugaucaacaaggccgugaacgcccucaucaacgaccagcugaucaugaagaaccaccuccgggacaucaugugcauccccuacugcaacuacuccaaguacugguaccucaaccacacgaccaccgggaagaccagccugcccaagugcuggcugguguccaacggcagcuaccucaacgagacgcacuucuccgacgacaucgagcagcaggccgacaacaugaucaccgagaugcugcagaaggaguacauggagcgccagggcaagaccccgcuggggcucgucgaccuguucguguucagcaccuccuucuaccugaucagcaucuuccugcaccucgugaagaucccgacgcaccggcacaucgucggcaagcccugccccaagccccaccgccugaaccacauggggaucugcuccugcggccuguacaagcagccgggggugcccgugaaguggaagcggugaggacuagucccuguucccagagcccacuuuuuuuucuuuuuuugaaauaaaauagccugucuuucagaucuaaaaaaaaaaaaaaaaaaaaaaaaaaaaaaaaaaaaaaaaaaaaaaaaaaaaaaaaaaaaaaaaaaaaaaaaaaaaaaaaaaaaaaaaaaaaaaaaaaaa

SEQ ID NO: 35650 - RNA, 1743 nt, Artificial Sequence
  mRNA product Design a-2 (A100) comprising derived and/or modified sequence from LASV(LM776-SLE-2012;Clade IV)__AIT17824__GPCmut9 (opt1)
aggagaguccgcucagccagguugcagaagcggcuuagcguguguccuaaucuucucucugcguguagguaggccugugccgcaaacaagcuuaccaugggccagaucgugaccuucuuccaggaggucccccacgugaucgaggaggugaugaacaucguccugaucgcccucagcauccuggccgugcugaaggggcucuacaacuucgcgaccugcggccugguggggcuggucacguuccuccugcugugcggccgcuccugcaccaccagcguguacaaggggguguacgagcuccagacccuggagcugaacauggagacgcucaacaugaccaugccgcuguccugcaccaagaacaacagccaccacuacaucauggucggcaacgagaccggccuggagcucacgcugaccaacaccuccaucaucaaccacaaguucugcaaccugagcgacgcccacaagaagaaccucuacgaccacgcccugauguccaucaucagcaccuuccaccuguccauccccaacuucaaccaguacgaggccaugagcugcgacuucaacgggggcaagaucuccgugcaguacaaccucagccacuccuacgccggggacgcggccaaccacugcggcacgguggccaacgggguccugcagaccuucaugcggauggccuggggcggcagcuacaucgcgcuggacuccgggugcggcaagugggacugcaucaugaccagcuaccaguaccucaucauccagaacaccacgugggaggaccacugccaguucucccgccccagccccaucggguaccugggccugcucucccagcggacccgcgacaucuacaucagccggcgccugcugggcaccuucaccuggacgcucagcgacuccgaggggaaggacaccccgggcggguacugccugacccgguggaugcugaucgaggccgagcucaagugcuucggcaacaccgccguggccaagugcaacgagaagcacgacgaggaguucugcgacaugcugcgccuguucgacuucaacaagcaggccauccagcggcucaaggcggaggcccagaugagcauccagcugaucaacaaggccgugaacgcccugaucaacgaccagcucaucaugaagaaccaccuccgcgacaucaugugcauccccuacugcaacuacuccaaguacugguaccugaaccacacgaccaccggcaagaccagccugcccaagugcuggcuggucuccaacggcagcuaccugaacgagacgcacuucuccgacgacaucgagcagcaggccgacaacaugaucaccgagaugcuccagaaggaguacauggagcggcaggggaagacgccccugggccugguggaccucuucguguucagcaccuccuucuaccugaucagcaucuuccugcaccuggucaagaucccgacccaccgccacaucguggggaaguccugccccaagccccaccggcucaaccacaugggcaucugcagcugcgggcuguacaagcagcccggcgugccgguccgcuggaagcggugaggacuagucccuguucccagagcccacuuuuuuuucuuuuuuugaaauaaaauagccugucuuucagaucuaaaaaaaaaaaaaaaaaaaaaaaaaaaaaaaaaaaaaaaaaaaaaaaaaaaaaaaaaaaaaaaaaaaaaaaaaaaaaaaaaaaaaaaaaaaaaaaaaaaa

SEQ ID NO: 35651 - RNA, 1743 nt, Artificial Sequence
  mRNA product Design a-2 (A100) comprising derived and/or modified sequence from LASV(Mad39;Clade IV)__ANH09722__GPCmut9 (opt1)
aggagaguccgcucagccagguugcagaagcggcuuagcguguguccuaaucuucucucugcguguagguaggccugugccgcaaacaagcuuaccaugggccagaucgugaccuucuuccaggaggucccccacgugaucgaggaggugaugaacaucguccugaucgcccucagcauccuggccgugcugaaggggcucuacaacguggcgaccugcggccugaucgggcuggucacguuccuccugcugugcggccgcuccugcaccaccacccucuacaaggggguguacgagcugcaggcccuggagcucaacauggagacgcugaacaugaccaugccgcugagcugcaccaagaacaacucccaccacuacauccgggugggcaacgagaccggccucgagcugacgcugaccaacaccagccucaucaaccacaaguucugcaaccuguccgacgcccacaagaagaaccuguacgaccacgcccucaugagcaucaucuccaccuuccaccugagcauccccaacuucaaccaguacgaggccauguccugcgacuucaacgacgggaagaucagcguccaguacaaccugucccacacguacgcgggcgacaccgccaaccacugcgggaccguggccaacggcgugcuccagaccuucaugcgcauggccuggggcgggagcuacaucgcgcuggacuccggcugcgggggcugggacugcaucaugacgagcuaccaguaccugaucauccagaacaccaccugggaggaccacugccaguucucccggcccagccccaucggguaccucggccugcugucccagcggacccgcgacaucuacaucagccggcgccuccugggcacguucaccuggacccuguccgacagcgaggggaaggacaccccgggcggguacugccucacgcgguggaugcugaucgaggccgagcugaagugcuucggcaacaccgccgucgccaagugcaacgagaagcacgacgaggaguucugcgacaugcuccgccuguucgacuucaacaagcaggccauccagcggcugaaggcggaggcccagaugagcauccagcucaucaacaaggccgugaacgcccugaucaacgaccagcugaucaugaagaaccaccuccgcgacaucaugugcauccccuacugcaacuacuccaaguacugguaccugaaccacaccgugaccggcaagacgagccugcccaagugcuggcucgucuccaacggcagcuaccugaacgagacccacuucuccgacgacaucgagcagcaggccgacaacaugaucaccgagaugcugcagaaggaguacauggagcggcaggggaagacgccccucggccugguggaccuguucguguucagcaccuccuucuaccugaucagcaucuuccuccaccuggucaagaucccgacccaccgccacgugguggggaagcccugccccaagccccaccggcugaaccacaugggcaucugcuccugcggguucuacaagcagccgggcguccccgugcgcuggaagcggugaggacuagucccuguucccagagcccacuuuuuuuucuuuuuuugaaauaaaauagccugucuuucagaucuaaaaaaaaaaaaaaaaaaaaaaaaaaaaaaaaaaaaaaaaaaaaaaaaaaaaaaaaaaaaaaaaaaaaaaaaaaaaaaaaaaaaaaaaaaaaaaaaaaaa

SEQ ID NO: 35652 - RNA, 1743 nt, Artificial Sequence
  mRNA product Design a-2 (A100) comprising derived and/or modified sequence from LASV(Z0947-SLE-2011;Clade IV)__AIT17840__GPCmut9 (opt1)
aggagaguccgcucagccagguugcagaagcggcuuagcguguguccuaaucuucucucugcguguagguaggccugugccgcaaacaagcuuaccaugggccagaucgugaccuucuuccaggaggucccccacgugaucgaggaggugaugaacaucguccugaucgcccucagcauccuggccgugcugaaggggcucuacaacuucgcgaccugcggccugguggggcuggucacguuccuccugcugugcggccgcuccugcaccaucagccucuacaaggggguguacgagcugcagacccuggagcucaacauggagacccugaacaugacgaugccgcuguccugcaccaagaacaacagccaccacuacaucauggugggcaacgagaccggccucgagcugacccugacgaacaccuccaucaucaaccacaaguucugcaaccucagcgacgcccacaagaagaaccuguacgaccacgcccugauguccaucaucagcaccuuccaccucuccauccccaacuucaaccaguacgaggccaugagcugcgacuucaacgggggcaagaucuccguccaguacaaccugagccacuccuacgccggggacgcggccaaccacugcggcaccguggccaacggggugcugcagacguucaugcggauggccuggggcggcagcuacaucgcgcucgacuccgggugcgaccggugggacugcaucaugaccagcuaccaguaccugaucauccagaacaccaccugggaggaccacugccaguucucccgccccagccccaucggcuaccuggggcuccugucccagcggacgcgcgacaucuacaucagccggcgccugcucggcaccuucaccuggacccugagcgacuccgagggcaaggacacgcccgggggcuacugccugacccgguggaugcucaucgaggccgagcugaagugcuucgggaacaccgccgucgccaagugcaacgagaagcacgacgaggaguucugcgacaugcugcgccucuucgacuucaacaagcaggccauccagcggcugaaggcggaggcccagaugagcauccagcugaucaacaaggccgugaacgcccucaucaacgaccagcugaucaugaagaaccaccuccgcgacaucaugugcauccccuacugcaacuacuccaaguacugguaccugaaccacaccacgaccgggaagaccagccugcccaagugcuggcugguguccaacggcagcuaccucaacgagacccacuucuccgacgacaucgagcagcaggccgacaacaugaucacggagaugcugcagaaggaguacauggagcggcagggcaagaccccgcuggggcucgucgaccuguucguguucagcaccuccuucuaccugaucagcaucuuccugcaccucgugaagaucccgacccaccgccacaucgucggcaagcccugccccaagccccaccggcugaaccacauggggaucugcuccugcggccuguacaagcagccgggggugcccgugaaguggaagcgcugaggacuagucccuguucccagagcccacuuuuuuuucuuuuuuugaaauaaaauagccugucuuucagaucuaaaaaaaaaaaaaaaaaaaaaaaaaaaaaaaaaaaaaaaaaaaaaaaaaaaaaaaaaaaaaaaaaaaaaaaaaaaaaaaaaaaaaaaaaaaaaaaaaaaa

SEQ ID NO: 35653 - RNA, 1743 nt, Artificial Sequence
  mRNA product Design a-2 (A100) comprising derived and/or modified sequence from LASV(Josiah;Clade IV)__NP_694870__GPCmut9 (opt1)
aggagaguccgcucagccagguugcagaagcggcuuagcguguguccuaaucuucucucugcguguagguaggccugugccgcaaacaagcuuaccaugggccagaucgugaccuucuuccaggaggucccccacgugaucgaggaggugaugaacaucguccugaucgcccucagcgugcuggccgugcugaaggggcucuacaacuucgcgaccugcggccuggucgggcuggugacguuccuccugcugugcggccgcuccugcaccaccagccucuacaaggggguguacgagcugcagacccuggagcucaacauggagacgcugaacaugaccaugccgcuguccugcaccaagaacaacagccaccacuacaucauggucggcaacgagaccggccucgagcugacgcugaccaacaccuccaucaucaaccacaaguucugcaaccucagcgacgcccacaagaagaaccuguacgaccacgcccugauguccaucaucagcaccuuccaccucuccauccccaacuucaaccaguacgaggccaugagcugcgacuucaacgggggcaagaucuccgugcaguacaaccugagccacuccuacgccggggacgcggccaaccacugcggcacgguggccaacgggguccugcagaccuucaugcggauggccuggggcggcagcuacaucgcgcucgacuccgggugcggcaacugggacugcaucaugaccagcuaccaguaccugaucauccagaacaccacgugggaggaccacugccaguucucccgccccagccccaucggguaccugggccuccugucccagcggacccgcgacaucuacaucagccggcgccugcucggcaccuucaccuggacgcugagcgacuccgaggggaaggacaccccgggcggguacugccugacccgguggaugcucaucgaggccgagcugaagugcuucggcaacaccgccguggccaagugcaacgagaagcacgacgaggaguucugcgacaugcugcgccucuucgacuucaacaagcaggccauccagcggcugaaggcggaggcccagaugagcauccagcugaucaacaaggccgugaacgcccucaucaacgaccagcugaucaugaagaaccaccuccgcgacaucaugugcauccccuacugcaacuacuccaaguacugguaccugaaccacacgaccaccgggcggaccagccugcccaagugcuggcuggucuccaacggcagcuaccucaacgagacgcacuucuccgacgacaucgagcagcaggccgacaacaugaucaccgagaugcugcagaaggaguacauggagcgccagggcaagacgccccuggggcugguggaccucuucguguucagcaccuccuucuaccugaucagcaucuuccugcaccucgucaagaucccgacccaccggcacaucgugggcaaguccugccccaagccccaccgccugaaccacauggggaucugcagcugcggccuguacaagcagcccggggugccggucaaguggaagcggugaggacuagucccuguucccagagcccacuuuuuuuucuuuuuuugaaauaaaauagccugucuuucagaucuaaaaaaaaaaaaaaaaaaaaaaaaaaaaaaaaaaaaaaaaaaaaaaaaaaaaaaaaaaaaaaaaaaaaaaaaaaaaaaaaaaaaaaaaaaaaaaaaaaaa

SEQ ID NO: 35654 - RNA, 1740 nt, Artificial Sequence
  mRNA product Design a-2 (A100) comprising derived and/or modified sequence from LASV(LP;Clade I)__AAF86701__GPCmut9 (opt1)
aggagaguccgcucagccagguugcagaagcggcuuagcguguguccuaaucuucucucugcguguagguaggccugugccgcaaacaagcuuaccaugggccagaucaucaccuucuuccaggaggugccccacgucaucgaggaggugaugaacaucgugcugaucgcccucagccugcuggccauccucaaggggcuguacaacaucgcgaccugcggcaucaucgggcuggucgccuuccucuuccugugcggcaaguccugcagccugacgcucaagggcggguacgagcugcagacccuggagcucaacauggagacccugaacaugaccaugccgcuguccugcacgaagaacagcucccaccacuacauccgcgugggcaacgagaccgggcucgagcugacccugaccaacacgagcaucaucaaccacaaguucugcaaccucuccgacgcccacaagaagaaccuguacgaccacgcccugaugagcaucaucuccaccuuccaccucagcauccccaacuucaaccaguacgaggccauguccugcgacuucaacggcgggaagaucagcgugcaguacaaccugucccacagcuacgcgggcgacgccgccgagcacugcgggaccgucgccaacggcgugcugcagaccuucaugcggauggcguggggcgggcgcuacaucgcccucgacuccggcugcgggaacugggacugcaucaugacgagcuaccaguaccugaucauccagaacaccaccugggaggaccacugccaguucucccggcccagccccaucggcuaccugggccuccugucccagcgcacccgggacaucuacaucagccgccggcugcucgggacguucaccuggacccugagcgacuccgagggcaacgagacccccgggggcuacugccugacgcgcuggaugcucaucgaggccgagcugaagugcuucgggaacaccgccguggccaagugcaacgagaagcacgacgaggaguucugcgacaugcugcggcuguucgacuucaacaagcaggcgauccgccggcugaaggccgaggcccagaugagcauccagcugaucaacaaggccgucaacgcccucaucaacgaccagcugaucaugaagaaccaccuccgcgacaucaugugcauccccuacugcaacuacuccaaguacugguaccucaaccacaccagcuccggccggaccagccugcccaagugcuggcugaucuccaacggcagcuaccucaacgagacgcaguucuccgacgacaucgagcagcaggcggacaacaugaucaccgagaugcugcagaaggaguacaucgagcgccaggggaagaccccgcugggccugguggacaucuucaucuucagcaccuccuucuaccucaucagcaucuuccugcaccugaucaagaucccgacgcaccggcacaucguggggaagcccugccccaagccccaccgccucaaccacaugggcgucugcuccugcgggcuguacaagcacccgggcgugcccaccaaguggaagcggugaggacuagucccuguucccagagcccacuuuuuuuucuuuuuuugaaauaaaauagccugucuuucagaucuaaaaaaaaaaaaaaaaaaaaaaaaaaaaaaaaaaaaaaaaaaaaaaaaaaaaaaaaaaaaaaaaaaaaaaaaaaaaaaaaaaaaaaaaaaaaaaaaaaaa

SEQ ID NO: 35655 - RNA, 1740 nt, Artificial Sequence
  mRNA product Design a-2 (A100) comprising derived and/or modified sequence from LASV(803213;Clade II)__AAF86703__GPCmut9 (opt1)
aggagaguccgcucagccagguugcagaagcggcuuagcguguguccuaaucuucucucugcguguagguaggccugugccgcaaacaagcuuaccaugggccagaucaucaccuucuuccaggaggugccccacgucaucgaggaggugaugaacaucgugcugaucgcccucagccugcuggccauccucaaggggaucuacaacgucgcgaccugcggccuguucgggcugaucuccuuccuccugcugugcggccgcagcugcuccgugacguacaaggggguguacgagcuccagacccuggagcugaacauggccaaccucaacaugaccaugccgcugagcugcaccaagaacaacucccaccacuacaucauggucggcaacgagacgggccuggagcucacccugaccaacaccagcaucaucaaccacaaguucugcaaccuguccgacgcccacaagaagaaccucuacgaccacgcccugaugagcaucaucuccacguuccaccugagcauccccaacuucaaccaguacgaggccauguccugcgacuucaacgggggcaagaucagcgugcaguacaaccucucccacagcuucgcgguggacgccgccaaccacugcgggaccaucgccaacggcguccugcagaccuucaugcggauggcguggggcggguccuacaucgcccuggacagcggcugcgggaacugggacugcaucaugaccuccuaccaguaccucaucauccagaacacgaccugggaggaccacugccaguucagccgccccucccccaucggcuaccuggggcugcucagccagcggacccgcgacaucuacaucagccggcgccugcugggcaccuucacguggacccucuccgacagcgagggcaacgaggcccccgggggcuacugccugacccgguggaugcugaucgaggccgagcucaagugcuucgggaacaccgccguggcgaagugcaacgagaagcacgacgaggaguucugcgacaugcugcgccuguucgacuucaacaagcaggccaucaagcggcucaagacggaggcccagauguccauccagcugaucaacaaggccgugaacgcccugaucaacgaccagcucaucaugaagaaccaccuccgcgacaucaugugcauccccuacugcaacuacagccgguacugguaccugaaccacaccgucaccggcaagaccucccugccccgcugcuggcuggugagcaacggguccuaccugaacgagacgcacuucagcgacgacaucgagcagcaggcggacaacaugaucaccgagaugcuccagaaggaguacauggaccggcagggcaagaccccgcugggccugguggaccuguucgucuucuccaccagcuucuaccucaucuccaucuuccugcaccuggugaagaucccgacgcaccgccacaucguggggaagcccugccccaagccccaccggcucaaccacaugggcaucugcagcugcgggcuguacaagcacccgggcguccccgugaaguggaagcgcugaggacuagucccuguucccagagcccacuuuuuuuucuuuuuuugaaauaaaauagccugucuuucagaucuaaaaaaaaaaaaaaaaaaaaaaaaaaaaaaaaaaaaaaaaaaaaaaaaaaaaaaaaaaaaaaaaaaaaaaaaaaaaaaaaaaaaaaaaaaaaaaaaaaaa

SEQ ID NO: 35656 - RNA, 1740 nt, Artificial Sequence
  mRNA product Design a-2 (A100) comprising derived and/or modified sequence from LASV(GA391;Clade III)__CAA36645__GPCmut9 (opt1)
aggagaguccgcucagccagguugcagaagcggcuuagcguguguccuaaucuucucucugcguguagguaggccugugccgcaaacaagcuuaccaugggccagaucgugaccuucuuccaggaggucccccacgugaucgaggaggugaugaacaucguccugaucgcccucagcauccuggccauccugaaggggcucuacaacguggcgaccugcggccugaucgggcuggugacguuccuccugcuguccggccgcagcugcucccucaucuacaaggggaccuacgagcugcagacccuggagcucaacauggagacccugaacaugacgaugccgcugagcugcaccaagaacaacucccaccacuacauccgggucggcaacgagaccggccucgagcugacccugacgaacaccagcauccucaaccacaaguucugcaaccuguccgacgcccacaagcgcaaccuguacgaccacagccucauguccaucaucagcaccuuccaccuguccauccccaacuucaaccaguacgaggccaugagcugcgacuucaacgggggcaagaucaccgugcaguacaaccugucccacagcuucgccguggacgccgcggggcacugcggcacgcucgccaacgggguccugcagaccuucaugcggauggccuggggcggcuccuacaucgcccuggacagcgggugcggcaacugggacugcaucaugaccuccuaccaguaccucaucauccagaacaccacgugggacgaccacugccaguucagccgccccucccccaucggguaccugggccugcucagccagcggacccgcgacaucuacaucagccggcgccugcugggcaccuucaccuggacgcucuccgacagcgaggggaacgagaccccgggcggguacugccugacccgguggaugcugaucgaggcggagcucaagugcuucggcaacaccgccguggccaagugcaacgagaagcacgacgaggaguucugcgacaugcugcgccuguucgacuucaacaagcaggccauccggcgccucaagacggaggcccagauguccauccagcugaucaacaaggcggugaacgcccugaucaacgaccagcucaucaugaagaaccaccuccgggacaucaugugcauccccuacugcaacuacagccgcuacugguaccugaaccacaccuccaccgggaagaccagccugccccggugcuggcugaucuccaacggcagcuaccugaacgagacgaaguucuccgacgacaucgagcagcaggccgacaacaugaucaccgagaugcugcagaaggaguacaucgaccgccagggcaagacgccccucgggcuggucgaccuguucguguucagcaccuccuucuaccucaucagcaucuuccugcaccuggugaagaucccgacccaccggcacaucgucggcaagcccugccccaagccccaccgccucaaccacauggggaucugcuccugcggccuguacaagcagccgggggugcccgugcgguggaagcgcugaggacuagucccuguucccagagcccacuuuuuuuucuuuuuuugaaauaaaauagccugucuuucagaucuaaaaaaaaaaaaaaaaaaaaaaaaaaaaaaaaaaaaaaaaaaaaaaaaaaaaaaaaaaaaaaaaaaaaaaaaaaaaaaaaaaaaaaaaaaaaaaaaaaaa

SEQ ID NO: 35657 - RNA, 1743 nt, Artificial Sequence
  mRNA product Design a-2 (A100) comprising derived and/or modified sequence from LASV(AV;Clade V)__CCA30314__GPCmut9 (opt1)
aggagaguccgcucagccagguugcagaagcggcuuagcguguguccuaaucuucucucugcguguagguaggccugugccgcaaacaagcuuaccaugggccagaucgugaccuucuuccaggaggucccccacgugaucgaggaggugaugaacaucguccugaucgcccucagcauccuggccgugcugaaggggcucuacaacaucgcgaccugcggccugaucgggcugaucacguuccuccugcugugcggccgcuccugcagcuccaaccucuacaaggggguguacgagcugcagagccuggaccucaacauggagacccugaacaugaccaugccgcuguccugcaccaagaacaacagccaccacuacauccgggucggcaacgacacgggccucgagcugacccugaccaacaccuccauccucaaccacaaguucugcaaccugagcgacgcccacaagaaggaccuguacgaccacgcccucauguccaucaucagcacguuccaccuguccauccccaacuucaaccaguacgaggccaugagcugcgacuucaacgggggcaagaucuccgugcaguacaaccugagccacuccuacgccaucgacgcggccaaccacugcgggaccguggccaacggcauccuccagaccuucaugcgcauggccuggggcgggagcuacaucgcgcuggacuccggcugcgggaacugggacugcaucaugaccagcuaccaguaccugaucauccagaacacgaccugggagaaccacugccaguucucccggcccagccccaucggcuaccucgggcugcugagccagcgcacccgggacaucuacaucucccgccggcuccugggcaccuucacguggacccugagcgacuccgagggcaacgccacccccgggggcuacugccucacccgcuggaugcugaucgaggccgagcugaagugcuucgggaacacggccgucgccaagugcaacgagaagcacgacgaggaguucugcgacaugcuccggcuguucgacuucaacaagcaggcgaucagccgccugaaguccgaggcccagaugagcauccagcucaucaacaaggccgugaacgcccugaucaacgaccagcugaucaugaagaaccaccuccgggacaucaugugcauccccuacugcaacuacuccaaguacugguaccugaaccacaccaucaccggcaagaccagccugcccaagugcuggcucguguccaacgggagcuaccugaacgagacgcacuucuccgacgacaucgagcagcaggccgacaacaugaucaccgagaugcugcagaaggaguacauggagcgccagggcaagaccccgcugggccucgucgaccuguucguguucagcaccuccuucuaccugaucagcaucuuccuccggcuggugaagaucccgacgcaccgccacaucgucgggaagcccugccccaagccccaccggcugaaccacaugggcaucugcuccugcgggcucuacaagcagccgggcgugcccgugcgcuggaagcggugaggacuagucccuguucccagagcccacuuuuuuuucuuuuuuugaaauaaaauagccugucuuucagaucuaaaaaaaaaaaaaaaaaaaaaaaaaaaaaaaaaaaaaaaaaaaaaaaaaaaaaaaaaaaaaaaaaaaaaaaaaaaaaaaaaaaaaaaaaaaaaaaaaaaa

SEQ ID NO: 35658 - RNA, 1740 nt, Artificial Sequence
  mRNA product Design a-2 (A100) comprising derived and/or modified sequence from LASV(Togo/2016/7082;Clade VI)__AMR44577__GPCmut9 (opt1)
aggagaguccgcucagccagguugcagaagcggcuuagcguguguccuaaucuucucucugcguguagguaggccugugccgcaaacaagcuuaccaugggccagaucaucaccuucuuccaggaggugccccacgucaucgaggaggugaugaacaucgugcugaucgcccucagccugcuggccauccucaagggggucuacaacguggcgaccugcggcaucaucgggcuggugacguuccuguuccucugcggccgcuccugcagccugaucuacaagggguccuacgagcugcagacccucgagcugaacauggagacccugaacaugaccaugccgcucagcugcacgaagaacuccagccaccacuacauccgggucggcaacgagaccggccuggagcugacccucaccaacacguccaucaucaaccacaaguucugcaaccugagcgacgcccacaagcgcaaccuguacgaccacgcccucauguccauccugagcaccuuccaccuguccauccccaacuucaaccaguacgaggccaugagcugcgacuucaacgggggcaagaucuccgugcaguacaaccucagccacgccuacgcgguggacgccgccgagcacugcgggaccgucgccaacggcgugcugcagaccuucaugcggauggcguggggcggguccuacaucgcccuggacagcggcugcgggaacugggacugcaucaugacguccuaccaguaccucaucauccagaacaccaccugggaggaccacugccaguucagccgccccucccccaucggcuaccuggggcugcucagccagcggacccgcgacaucuacaucagccggcgccugcugggcacguucaccuggacccucuccgacagcgagggcaacgagacccccgggggcuacugccugacgcgguggaugcugaucgaggccgagcucaagugcuucgggaacaccgccguggccaagugcaacgagaagcacgacgaggaguucugcgacaugcugcgccuguucgacuucaacaagcaggcgauccagcggcucaaguccgaggcccagaugagcauccagcugaucaacaaggccgucaacgcccugaucaacgaccagcucaucaugaagaaccaccuccgcgacaugaugugcauccccuacugcaacuacuccaaguacugguaccugaaccacaccagcuccggccggaccagccugcccaagugcuggcugguguccaacgggagcuaccugaacgagacgcacuucuccgacgacaucgagcagcaggccgacaacaugaucaccgagaugcuccagaaggaguacaucgaccgccagggcaagaccccgcugggccugguggaccuguucgucuucagcaccuccuucuaccucaucagcaucuuccugcaccugaucaagaucccgacgcaccggcacaucguggggaagcccugccccaagccccaccgccucaaccacaugggcaucugcuccugcgggcuguacaagcagccgggcgugcccacccgguggaagcgcugaggacuagucccuguucccagagcccacuuuuuuuucuuuuuuugaaauaaaauagccugucuuucagaucuaaaaaaaaaaaaaaaaaaaaaaaaaaaaaaaaaaaaaaaaaaaaaaaaaaaaaaaaaaaaaaaaaaaaaaaaaaaaaaaaaaaaaaaaaaaaaaaaaaaa

SEQ ID NO: 35659 - RNA, 1740 nt, Artificial Sequence
  mRNA product Design a-2 (A100) comprising derived and/or modified sequence from LASV(KAK-428;Clade n.d. (VII))__ANH09740__GPCmut9 (opt1)
aggagaguccgcucagccagguugcagaagcggcuuagcguguguccuaaucuucucucugcguguagguaggccugugccgcaaacaagcuuaccaugggccagaucgugaccuucuuccaggaggucccccacgugaucgaggaggugaugaacaucguccugaucgcccucagccugcuggccauccucaaggggcuguacaacuucgcgaccugcggcgugaucgggcugaucacguuccuccugcugugcggccgcuccugcagcgccaccuacaaggggcaguacgagcuccagacccuggagcugaacauggagucccucaacaugaccaugccgcugagcugcacgaagaacaacucccaccacuacauccgggccggcaacaacaccggccuggagcucacccugaccaacacgagcaucaucucccacaaguucugcaaccugagcgacgcccacaagaagaaccucuacgaccacacccugauguccaucaucaccaccuuccaccugagcauccccaacuucaaccaguacgaggccauguccugcgacuucaacgggggcaagaucagcauccaguacaaccucucccacagcuacgcgggggacgccgcccagcacugcggcacgguggccaacgggguccugcagaccuucaugcgcauggcguggggcggcuccuaccuggcccucgacagcgggugccggggcugggacugcaucaucuccagcuaccaguaccugaucauccagaacaccaccugggacgaccacugccaguucucccgccccagccccaucggguaccugggcuucgugagccagaagacgcgggacaucuacaucucccgccggcuccugggcaccuucaccuggacccugagcgacuccgaggggcacgacaugccgggcggguacugccucacgcgcuggaugcugaucgaggccgaccugaagugcuucggcaacaccgccguggccaagugcaacgagaagcacgacgaggaguucugcgacauguggcggcuguucgacuucaacaagcaggcgauccagcgccugaaggccgaggcccagaugaacauccagcugaucaacaaggccgucaacgcccucaucaacgaccagcugaugaugaagaaccaccuccgggacaucaugugcauccccuacugcaacuacagcaaguucugguaccucaacaacaccaccacggggcgcaccucccugccccggugcuggcugaucagcaacggcuccuaccucaacgagacccacuucagcgacgacaucgagcagcaggcggacaacaugaucaccgagaugcugcagaaggaguacauggaccgccagggcaagacgccccuggggcucguggaccuguucguguucuccaccagcuucuaccugaucaccaucuuccugcaccucgucaagaucccgacccaccggcacaucgugggcaagcccugccccaagccccaccgccugaaccacauggggaucugcuccugcggccuguacaagcagccgggggugcccguccgguggaagcgcugaggacuagucccuguucccagagcccacuuuuuuuucuuuuuuugaaauaaaauagccugucuuucagaucuaaaaaaaaaaaaaaaaaaaaaaaaaaaaaaaaaaaaaaaaaaaaaaaaaaaaaaaaaaaaaaaaaaaaaaaaaaaaaaaaaaaaaaaaaaaaaaaaaaaa

SEQ ID NO: 35660 - RNA, 1740 nt, Artificial Sequence; identical to SEQ ID NO: 35654
  mRNA product Design a-2 (A100) comprising derived and/or modified sequence from LASV(Pinneo-NIG-1969;Clade I)__AIT17836__GPCmut9 (opt1)

SEQ ID NO: 35661 - RNA, 1740 nt, Artificial Sequence
  mRNA product Design a-2 (A100) comprising derived and/or modified sequence from LASV(ISTH0009-NIG-2011;Clade II)__AIT17404__GPCmut9 (opt1)
aggagaguccgcucagccagguugcagaagcggcuuagcguguguccuaaucuucucucugcguguagguaggccugugccgcaaacaagcuuaccaugggccagaucaucaccuucuuccaggaggugccccacgucaucgaggaggugaugaacaucgugcugaucgcccucagccugcuggccauccucaaggggaucuacaacgucgcgaccugcggccuguucgggcugguguccuuccuccugcugugcggccgcagcugcuccacgaccuacaaggggguguacgagcuccagacccuggagcuggacauggccagccucaacaugaccaugccgcuguccugcacgaagaacaacagccaccacuacaucauggucggcaacgagaccggccuggagcucacccugaccaacacguccaucaucaaccacaaguucugcaaccugagcgacgcccacaagaagaaccucuacgaccacgcccugauguccaucaucagcaccuuccaccuguccauccccaacuucaaccaguacgaggccaugagcugcgacuucaacgggggcaagaucuccgugcaguacaaccucagccacgcguacgccguggacgccgccaaccacugcgggaccaucgcgaacggcguccugcagaccuucaugcggauggccuggggcggguccuacaucgcccuggacagcggcugcggguccugggacugcaucaugacgagcuaccaguaccucaucauccagaacaccaccugggaggaccacugccaguucucccgccccagccccaucggcuaccuggggcugcucagccagcggacccgcgacaucuacaucucccggcgccugcugggcacguucaccuggacccucagcgacuccgagggcaacgagacccccgggggcuacugccugacgcgguggaugcugaucgaggccgagcucaagugcuucgggaacaccgccguggcgaagugcaacgagaagcacgacgaggaguucugcgacaugcugcgccuguucgacuucaacaagcaggccauccggcgccucaagaccgaggcccagaugagcauccagcugaucaacaaggccgugaacgcccugaucaacgaccagcucaucaugaagaaccaccuccgggacaucaugugcaucccguacugcaacuacuccaaguacugguaccugaaccacaccgucacgggcaagaccagccugccccgcugcuggcugguguccaacgggagcuaccugaacgagacccacuucuccgacgacaucgagcagcaggcggacaacaugaucaccgagcuccugcagaaggaguacauggaccggcagggcaagacgccccugggccugguggaccucuucgucuucagcaccuccuucuaccugaucagcaucuuccugcaccucaucaagaucccgacccaccgccacaucaccgggaagcccugccccaagccccaccggcugaaccacaugggcaucugcuccugcgggcuguacaagcacccgggcgugcccgugaaguggaagcgcugaggacuagucccuguucccagagcccacuuuuuuuucuuuuuuugaaauaaaauagccugucuuucagaucuaaaaaaaaaaaaaaaaaaaaaaaaaaaaaaaaaaaaaaaaaaaaaaaaaaaaaaaaaaaaaaaaaaaaaaaaaaaaaaaaaaaaaaaaaaaaaaaaaaaa

SEQ ID NO: 35662 - RNA, 1740 nt, Artificial Sequence
  mRNA product Design a-2 (A100) comprising derived and/or modified sequence from LASV(ISTH2010-NIG-2012;Clade II)__AIT17482__GPCmut9 (opt1)
aggagaguccgcucagccagguugcagaagcggcuuagcguguguccuaaucuucucucugcguguagguaggccugugccgcaaacaagcuuaccaugggccagaucaucaccuucuuccaggaggugccccacgucaucgaggaggugaugaacaucgugcugaucgcccucagccugcuggccauccucaaggggaucuacaacgucgcgaccugcggccuguucgggcugguguccuuccuccugcugugcggccgcagcugcuccacgaccuacaaggggguguacgagcuccagacccuggagcuggacauggccagccucaacaugaccaugccgcuguccugcacgaagaacaacagccaccacuacaucauggucggcaacgagaccggccuggagcucacccugaccaacacguccaucaucaaccacaaguucugcaaccugagcgacgcccacaagaagaaccucuacgaccacgcccugauguccaucaucagcaccuuccaccuguccauccccaacuucaaccaguacgaggccaugagcugcgacuucaacgggggcaagaucuccgugcaguacaaccucagccacgcguacgccguggacgccgccaaccacugcgggaccaucgcgaacggcguccugcagaccuucaugcggauggccuggggcggguccuacaucgcccuggacagcggcugcggguccugggacugcaucaugacgagcuaccaguaccucaucauccagaacaucaccugggaggaccacugccaguucucccgccccagccccaucggcuaccuggggcugcucagccagcggacccgcgacaucuacaucucccggcgccugcugggcaccuucacguggacccucagcgacuccgagggcaacgagacccccgggggcuacugccugacccgguggaugcugaucgaggccgagcucaagugcuucgggaacacggccguggcgaagugcaacgagaagcacgacgaggaguucugcgacaugcugcgccuguucgacuucaacaagcaggccauccggcgccucaagaccgaggcccagaugagcauccagcugaucaacaaggccgugaacgcccugaucaacgaccagcucaucaugaagaaccaccuccgggacaucaugugcauccccuacugcaacuacuccaaguacugguaccugaaccacaccgucaccggcaagacgagccugccccgcugcuggcugguguccaacgggagcuaccugaacgagacccacuucuccgacgacaucgagcagcaggcggacaacaugaucaccgagcuccugcagaaggaguacaucgaccggcagggcaagaccccgcugggccugguggaccucuucgucuucagcacguccuucuaccugaucagcaucuuccugcaccucgugaagaucccgacccaccgccacguggucgggaagcccugccccaagccccaccggcugaaccacaugggcaucugcuccugcgggcuguacaagcacccgggcgugcccgugaaguggaagcgcugaggacuagucccuguucccagagcccacuuuuuuuucuuuuuuugaaauaaaauagccugucuuucagaucuaaaaaaaaaaaaaaaaaaaaaaaaaaaaaaaaaaaaaaaaaaaaaaaaaaaaaaaaaaaaaaaaaaaaaaaaaaaaaaaaaaaaaaaaaaaaaaaaaaaa

SEQ ID NO: 35663 - RNA, 1740 nt, Artificial Sequence
  mRNA product Design a-2 (A100) comprising derived and/or modified sequence from LASV(Lassa virus/H.sapiens-wt/NGA/2015/ISTH_0543;Clade II)__AVO03639__GPCmut9 (opt1)
aggagaguccgcucagccagguugcagaagcggcuuagcguguguccuaaucuucucucugcguguagguaggccugugccgcaaacaagcuuaccaugggccagaucaucaccuucuuccaggaggugccccacgucaucgaggaggugaugaacaucgugcugaucgcccucagccugcuggccauccucaaggggaucuacaacgucgcgaccugcggccuguucgggcugguguccuuccuccugcugugcggccgcagcugcuccacgaccuacaaggggguguacgagcuccagacccuggagcuggacauggccaaccucaacaugaccaugccgcugagcugcacgaagaacaacucccaccacuacaucauggucggcaacgagaccggccuggagcucacccugaccaacacgagcaucaucaaccacaaguucugcaaccuguccgacgcccacaagaagaaccucuacgaccacgcccugaugagcaucaucuccaccuuccaccugagcauccccaacuucaaccaguacgaggccauguccugcgacuucaacgggggcaagaucagcgugcaguacaaccucucccacaccuacgcgguggacgccgccaaccacugcgggaccaucgccaacggcguccugcagacguucaugcggauggcguggggcgggagcuacaucgcccuggacuccggcugcgggagcugggacugcaucaugaccuccuaccaguaccucgugauccagaacaccaccugggaggaccacugccaguucagccgccccucccccaucggcuaccuggggcugcucagccagcggacgcgcgacaucuacaucagccggcgccugcugggcaccuucaccuggacccucuccgacagcgagggcaacgagacgcccgggggcuacugccugacccgguggaugcugaucgaggccgagcucaagugcuucgggaacaccgccguggccaagugcaacgagaagcacgacgaggaguucugcgacaugcugcgccuguucgacuucaacaagcaggcgauccggcgccucaagaccgaggcccagauguccauccagcugaucaacaaggccgucaacgcccugaucaacgaccagcucaucaugaagaaccaccuccgggacaucaugugcauccccuacugcaacuacagcaaguacugguaccugaaccacacggugaccggcaagaccucccugccccgcugcuggcuggugagcaacggguccuaccugaacgagacccacuucagcgacgacaucgagcagcaggccgacaacaugaucacggagcuccugcagaaggaguacaucgaccggcagggcaagaccccgcugggccuggucgaccucuucguguucuccaccagcuucuaccugaucuccaucuuccugcaccucgugaagaucccgacccaccgccacaucacggggaagcccugccccaagccccaccggcugaaccacaugggcaucugcagcugcgggcuguacaagcacccgggcguccccgugaaguggaagcgcugaggacuagucccuguucccagagcccacuuuuuuuucuuuuuuugaaauaaaauagccugucuuucagaucuaaaaaaaaaaaaaaaaaaaaaaaaaaaaaaaaaaaaaaaaaaaaaaaaaaaaaaaaaaaaaaaaaaaaaaaaaaaaaaaaaaaaaaaaaaaaaaaaaaaa

SEQ ID NO: 35664 - RNA, 1740 nt, Artificial Sequence
  mRNA product Design a-2 (A100) comprising derived and/or modified sequence from LASV(Lassa virus/H.sapiens-wt/NGA/2016/ISTH_0009;Clade II)__AVO03571__GPCmut9 (opt1)
aggagaguccgcucagccagguugcagaagcggcuuagcguguguccuaaucuucucucugcguguagguaggccugugccgcaaacaagcuuaccaugggccagaucaucaccuucuuccaggaggugccccacgucaucgaggaggugaugaacaucgugcugaucgcccucagccugcuggccauccucaaggggaucuacaacgucgcgaccugcggccugcuggggcucguguccuuccugcugcucugcggccgcagcugcuccacgaccuacaaggggguguacgagcugcagacccuggagcucgacauggccagccugaacaugaccaugccgcuguccugcacgaagaacaacagccaccacuacaucauggucggcaacgagaccggccucgagcugacccugaccaacacguccaucaucaaccacaaguucugcaaccucagcgacgcccacaagaagaaccuguacgaccacgcccugauguccaucaucagcaccuuccaccucuccauccccaacuucaaccaguacgaggccaugagcugcgacuucaacgggggccggaucuccgugcaguacaaccugagccacuccuacgcgguggacgccgccaaccacugcgggaccaucgccaacggcguccugcagaccuucaugcgcauggcguggggcgggagcuacaucgcccucgacuccggcugcgggagcugggacugcaucaugacguccuaccaguaccugaucauccagaacaccaccugggaggaccacugccaguucagccggcccagccccaucggcuaccuggggcuccugucccagcgcacccgggacaucuacaucagccgccggcugcucggcacguucaccuggacccuguccgacagcgagggcaacgagacccccgggggcuacugccugacgcgcuggaugcucaucgaggccgagcugaagugcuucgggaacaccgccguggccaagugcaacgagaagcacgacgaggaguucugcgacaugcugcggcuguucgacuucaacaagcaggcgauccgccggcugaagaccgaggcccagauguccauccagcugaucaacaaggccgugaacgcccucaucaacgaccagcugaucaugaagaaccaccuccgcgacaucaugugcaucccguacugcaacuacagcaaguacugguaccucaaccacaccgucacgggcaagaccucccugccccggugcuggcuggugagcaacggguccuaccucaacgagacccacuucagcgacgacaucgagcagcaggccgacaacaugaucaccgagcugcugcagaaggaguacaucgaccgccagggcaagacgccccugggccucguggaccuguucgucuucuccaccagcuucuaccugaucuccaucuuccuccaccuggugaagaucccgacccaccggcacaucaccgggaagcccugccccaagccccaccgccugaaccacaugggcaucugcagcugcgggcucuacaaccacccgggcgugcccgucaaguggaagcggugaggacuagucccuguucccagagcccacuuuuuuuucuuuuuuugaaauaaaauagccugucuuucagaucuaaaaaaaaaaaaaaaaaaaaaaaaaaaaaaaaaaaaaaaaaaaaaaaaaaaaaaaaaaaaaaaaaaaaaaaaaaaaaaaaaaaaaaaaaaaaaaaaaaaa

SEQ ID NO: 35665 - RNA, 1740 nt, Artificial Sequence
  mRNA product Design a-2 (A100) comprising derived and/or modified sequence from LASV(Lassa virus/H.sapiens-wt/NGA/2016/ISTH_0017;Clade II)__AVO03567__GPCmut9 (opt1)
aggagaguccgcucagccagguugcagaagcggcuuagcguguguccuaaucuucucucugcguguagguaggccugugccgcaaacaagcuuaccaugggccagaucaucaccuucuuccaggaggugccccacgucaucgaggaggugaugaacaucgugcugaucgcccucagccugcuggccauccucaaggggaucuacaacgucgcgaccugcggccuguucgggcugguguccuuccuccugcugugcggccgcagcugcuccacgaccuacaaggggguguacgagcuccagacccuggagcuggacauggccagccucaacaugaccaugccgcuguccugcacgaagaacaacagccaccacuacaucauggucggcaacgagaccggccuggagcucacccugaccaacacguccaucaucaaccacaaguucugcaaccugagcgacgcccacaagaagaaccucuacgaccacgcccugauguccaucaucagcaccuuccaccuguccauccccaacuucaaccaguacgaggccaugagcugcgacuucaacgggggcaagaucuccgugcaguacaaccucagccacaccuacgcgaucgacgccgccaaccacugcgggaccaucgccaacggcgugcugcagacguucaugcggauggcguggggcggguccuacaucgcccuggacagcggcugcggguccugggacugcaucaugaccagcuaccaguaccucaucauccagaacaccaccugggaggaccacugccaguucucccgccccagccccaucggcuaccuggggcugcucagccagcggacgcgcgacaucuacaucucccggcgccugcugggcaccuucaccuggacccucagcgacuccgagggcaacgagacgcccgggggcuacugccugacccgguggaugcugaucgaggccgagcucaagugcuucgggaacaccgccgucgccaagugcaacgagaagcacgacgaggaguucugcgacaugcugcgccuguucgacuucaacaagcaggcgauccggcgccucaagaccgaggcccagaugagcauccagcugaucaacaaggccgugaacgcccugaucaacgaccagcucaucaugaagaaccaccuccgggacaucaugugcauccccuacugcaacuacuccaaguacugguaccugaaccacacggugaccggcaagaccagccugccccgcugcuggcuggucuccaacgggagcuaccugaacgagacccacuucuccgacgacaucgagcagcaggccgacaacaugaucacggagcuccugcagaaggaguacauggaccggcagggcaagaccccgcugggccugguggaccucuucguguucagcaccuccuucuaccugaucagcaucuuccugcaccucguccgcaucccgacccaccggcacgugaucgggaagcccugccccaagccccaccgccugaaccacaugggcaucugcuccugcgggcuguacaagcacccgggcgugcccgucaaguggaagcggugaggacuagucccuguucccagagcccacuuuuuuuucuuuuuuugaaauaaaauagccugucuuucagaucuaaaaaaaaaaaaaaaaaaaaaaaaaaaaaaaaaaaaaaaaaaaaaaaaaaaaaaaaaaaaaaaaaaaaaaaaaaaaaaaaaaaaaaaaaaaaaaaaaaaa

SEQ ID NO: 35666 - RNA, 1740 nt, Artificial Sequence
  mRNA product Design a-2 (A100) comprising derived and/or modified sequence from LASV(Lassa virus/H.sapiens-wt/NGA/2018/ISTH_0959;Clade II)__AVV65099__GPCmut9 (opt1)
aggagaguccgcucagccagguugcagaagcggcuuagcguguguccuaaucuucucucugcguguagguaggccugugccgcaaacaagcuuaccaugggccagaucaucaccuucuuccaggaggugccccacgucaucgaggaggugaugaacaucgugcugaucgcccucagccugcuggccauccucaaggggaucuacaacgucgugaccugcggccuguucgggcugguguccuuccuccugcugugcggccgcagcugcuccacgaccuacaagggggucuacgagcuccagacccuggagcuggacauggcgagccucaacaugaccaugccgcuguccugcacgaagaacaacagccaccacuacaucauggugggcaacgagaccggccuggagcucacccugaccaacacguccaucaucaaccacaaguucugcaaccugagcgacgcccacaagaagaaccucuacgaccacgcccugauguccaucaucagcaccuuccaccuguccauccccaacuucaaccaguacgaggccaugagcugcgacuucaacgggggcaagaucuccgugcaguacaaccucagccacgccuacgcgaucgacgccgccaaccacugcgggaccaucgccaacggcguccugcagaccuucaugcggauggcguggggcggguccuacaucgcccuggacagcggcugcggguccugggacugcaucaugacgagcuaccaguaccucaucauccagaacaccaccugggaggaccacugccaguucucccgccccagccccaucggcuaccuggggcugcucagccagcggacccgcgacaucuacaucucccggcgccugcugggcacguucaccuggacccucagcgacuccgagggcaacgagacccccgggggcuacugccugacgcgguggaugcugaucgaggccgagcucaagugcuucgggaacaccgccguggccaagugcaacgagaagcacgacgaggaguucugcgacaugcugcgccuguucgacuucaacaagcaggcgauccggcgccucaagaccgaggcccagaugagcauccagcugaucaacaaggccgugaacgcccugaucaacgaccagcucaucaugaagaaccaccuccgggacaucaugugcaucccguacugcaacuacuccaaguacugguaccugaaccacaccgucacgggcaagaccagccugccccgcugcuggcugguguccaacgggagcuaccugaacgagacccacuucuccgacgacaucgagcagcaggccgacaacaugaucaccgagcuccugcagaaggaguacaucgaccggcagggcaagacgccccugggccugguggaccucuucgucuucagcaccuccuucuaccugaucagcaucuuccugcaccucgugaagaucccgacccaccgccacgugaucgggaagcccugccccaagccccaccggcugaaccacaugggcaucugcuccugcgggcuguacaagcacccgggcguccccgugaaguggaagcgcugaggacuagucccuguucccagagcccacuuuuuuuucuuuuuuugaaauaaaauagccugucuuucagaucuaaaaaaaaaaaaaaaaaaaaaaaaaaaaaaaaaaaaaaaaaaaaaaaaaaaaaaaaaaaaaaaaaaaaaaaaaaaaaaaaaaaaaaaaaaaaaaaaaaaa

SEQ ID NO: 35667 - RNA, 1740 nt, Artificial Sequence
  mRNA product Design a-2 (A100) comprising derived and/or modified sequence from LASV(LASV003-NIG-2008;Clade II)__AIT17580__GPCmut9 (opt1)
aggagaguccgcucagccagguugcagaagcggcuuagcguguguccuaaucuucucucugcguguagguaggccugugccgcaaacaagcuuaccaugggccagaucaucaccuucuuccaggaggugccccacgucaucgaggaggugaugaacaucgugcugaucgcccucagccugcuggccauccucaaggggaucuacaacgucgcgaccugcggccuguucgggcugguguccuuccuccugcugugcggccgcagcugcuccacgaccuacaaggggguguacgagcuccagacccuggagcuggacauggccagccucaacaugaccaugccgcuguccugcacgaagaacaacagccaccacuacaucauggucggcaacgagaccggccuggagcucacccugaccaacacguccaucaucaaccacaaguucugcaaccugagcgacgcccacaagaagaaccucuacgaccacgcccugauguccaucaucagcaccuuccaccuguccauccccaacuucaaccaguacgaggccaugagcugcgacuucaacgggggcaagaucuccgugcaguacaaccucagccacaccuacgcgguggacgccgccaaccacugcgggaccaucgccaacggcguccugcagacguucaugcggauggcguggggcggguccuacaucgcccuggacagcggcugcggguccugggacugcaucaugaccagcuaccaguaccucaucauccagaacaccaccugggaggaccacugccaguucucccgccccagccccaucggcuaccuggggcugcucagccagcggacgcgcgacaucuacaucucccggcgccugcugggcaccuucaccuggacccucagcgacuccgagagcaacgagacgccgggcggguacugccugacccgguggaugcugaucgaggccgagcucaagugcuucggcaacaccgccguggccaagugcaacgagaagcacgacgaggaguucugcgacaugcugcgccuguucgacuucaacaagcaggcgauccggcgccucaaggccgaggcccagauguccauccagcugaucaacaaggccgugaacgcccugaucaacgaccagcucaucaugaagaaccaccuccgggacaucaugugcauccccuacugcaacuacagcaaguacugguaccugaaccacaccgucacggggcgcaccucccugccccggugcuggcuggugagcaacggcuccuaccugaacgagacccacuucagcgacgacaucgagcagcaggcggacaacaugaucaccgagcuccugcagaaggaguacauggaccgccaggggaagacgccccugggccugguggaccucuucgucuucuccaccagcuucuaccugaucuccaucuuccugcaccucgugaagaucccgacccaccggcacgugaucggcaagcccugccccaagccccaccgccugaaccacauggggaucugcagcugcggccuguacaagcacccggggguccccgugaaguggaagcggugaggacuagucccuguucccagagcccacuuuuuuuucuuuuuuugaaauaaaauagccugucuuucagaucuaaaaaaaaaaaaaaaaaaaaaaaaaaaaaaaaaaaaaaaaaaaaaaaaaaaaaaaaaaaaaaaaaaaaaaaaaaaaaaaaaaaaaaaaaaaaaaaaaaaa

SEQ ID NO: 35668 - RNA, 1740 nt, Artificial Sequence
  mRNA product Design a-2 (A100) comprising derived and/or modified sequence from LASV(LASV035-NIG-2009;Clade II)__AIT17588__GPCmut9 (opt1)
aggagaguccgcucagccagguugcagaagcggcuuagcguguguccuaaucuucucucugcguguagguaggccugugccgcaaacaagcuuaccaugggccagaucaucaccuucuuccaggaggugccccacgucaucgaggaggugaugaacaucgugcugaucgcccucagccugcuggccauccucaaggggaucuacaacgucgcgaccugcggccuguucgggcugguguccuuccuccugcugugcggccgcagcugcuccacgaccuacaaggggguguacgagcuccagacccuggagcuggacauggccagccucaacaugaccaugccgcuguccugcacgaagaacaacagccaccacuacaucauggucggcaacgagaccggccuggagcucacccugaccaacacguccaucaucaaccacaaguucugcaaccugagcgacgcccacaagaagaaccucuacgaccacgcccugauguccaucaucagcaccuuccaccuguccauccccaacuucaaccaguacgaggccaugagcugcgacuucaacgggggcaagaucuccgugcaguacaaccucagccacgcguacgccguggacgccgccaaccacugcgggaccaucgcgaacggcguccugcagaccuucaugcggauggccuggggcggguccuacaucgcccuggacagcggcugcggguccugggacugcaucaugacgagcuaccaguaccucaucauccagaacaccaccugggaggaccacugccaguucucccgccccagccccaucggcuaccuggggcugcucagccagcggacccgcgacaucuacaucucccggcgccugcugggcacguucaccuggacccucagcgacuccgagggcaacgagacccccgggggcuacugccugacgcgguggaugcugaucgaggccgagcucaagugcuucgggaacaccgccguggcgaagugcaacgagaagcacgacgaggaguucugcgacaugcugcgccuguucgacuucaacaagcaggccauccggcgccucaaggccgaggcccagaugagcauccagcugaucaacaaggccgugaacgcgcugaucaacgaccagcucaucaugaagaaccaccuccgggacaucaugugcauccccuacugcaacuacuccaaguacugguaccugaaccacaccgucaccggcaagacgagccugccccgcugcuggcugguguccaacgggagcuaccugaacgagacccacuucuccgacgacaucgagcagcaggccgacaacaugaucaccgagcuccugcagaaggaguacaucgaccggcagggcaagaccccgcugggccugguggaccucuucgucuucagcacguccuucuaccugaucagcaucuuccugcaccucgugaagaucccgacccaccgccacgugaucgggaagcccugccccaagccccaccggcugaaccacaugggcaucugcuccugcgggcuguacaagcacccgggcguccccgugaaguggaagcgcugaggacuagucccuguucccagagcccacuuuuuuuucuuuuuuugaaauaaaauagccugucuuucagaucuaaaaaaaaaaaaaaaaaaaaaaaaaaaaaaaaaaaaaaaaaaaaaaaaaaaaaaaaaaaaaaaaaaaaaaaaaaaaaaaaaaaaaaaaaaaaaaaaaaaa

SEQ ID NO: 35669 - RNA, 1740 nt, Artificial Sequence
  mRNA product Design a-2 (A100) comprising derived and/or modified sequence from LASV(LASV1000-NIG-2009;Clade II)__AIT17782__GPCmut9 (opt1)
aggagaguccgcucagccagguugcagaagcggcuuagcguguguccuaaucuucucucugcguguagguaggccugugccgcaaacaagcuuaccaugggccagaucaucaccuucuuccaggaggugccccacgucaucgaggaggugaugaacaucgugcugaucgcccucagccugcuggccauccucaaggggaucuacaacgucgcgaccugcggccuguucgggcugguguccuuccuccugcugugcggccgcagcugcuccacgaccuacaaggggguguacgagcuccagacccuggagcuggacauggccagccucaacaugaccaugccgcuguccugcacgaagaacaacagccaccacuacaucauggucggcaacgagaccggccuggagcucacccugaccaacacguccaucaucaaccacaaguucugcaaccugagcgacgcccacaagaagaaccucuacgaccacgcccugauguccaucaucagcaccuuccaccuguccauccccaacuucaaccaguacgaggccaugagcugcgacuucaacgggggcaagaucuccgugcaguacaaccucagccacaccuacgcgguggacgccgccaaccacugcgggaccaucgccaacggcguccugcagacguucaugcggauggcguggggcggguccuacaucgcccuggacagcggcugcggguccugggacugcaucaugaccagcuaccaguaccucaucauccagaacaccaccugggaggaccacugccaguucucccgccccagccccaucggcuaccuggggcugcucagccagcggacgcgcgacaucuacaucucccggcgccugcugggcaccuucaccuggacccucagcgacuccgagggcaacgagacgcccgggggcuacugccugacccgguggaugcugaucgaggccgagcucaagugcuucgggaacaccgccguggccaagugcaacgagaagcacgacgaggaguucugcgacaugcugcgccuguucgacuucaacaagcaggcgaucaagcggcucaagaccgaggcccagaugagcauccagcugaucaacaaggccgugaacgcccugaucaacgaccagcucaucaugaagaaccaccuccgcgacaucaugugcauccccuacugcaacuacuccaaguacugguaccugaaccacacggucaccggcaagaccagccugccccggugcuggcugguguccaacgggagcuaccugaacgagacccacuucuccgacgacaucgagcagcaggccgacaacaugaucacggagcuccugcagaaggaguacaucgaccgccagggcaagaccccgcugggccugguggaccucuucgucuucagcaccuccuucuaccugaucagcaucuuccugcaccucgugaagaucccgacccaccggcacguggucgggaagcccugccccaagccccaccgccugaaccacaugggcaucugcuccugcgggcuguacaagcacccgggcgugcccgugaaguggaagcggugaggacuagucccuguucccagagcccacuuuuuuuucuuuuuuugaaauaaaauagccugucuuucagaucuaaaaaaaaaaaaaaaaaaaaaaaaaaaaaaaaaaaaaaaaaaaaaaaaaaaaaaaaaaaaaaaaaaaaaaaaaaaaaaaaaaaaaaaaaaaaaaaaaaaa

SEQ ID NO: 35670 - RNA, 1740 nt, Artificial Sequence
  mRNA product Design a-2 (A100) comprising derived and/or modified sequence from LASV(LASV221-NIG-2010;Clade II)__AIT17624__GPCmut9 (opt1)
aggagaguccgcucagccagguugcagaagcggcuuagcguguguccuaaucuucucucugcguguagguaggccugugccgcaaacaagcuuaccaugggccagaucaucaccuucuuccaggaggugccccacgucaucgaggaggugaugaacaucgugcugaucgcccucagccugcuggccauccucaaggggaucuacaacgucgcgaccugcggccuguucgggcugguguccuuccuccugcugugcggccgcagcugcuccacgaccuacaaggggguguacgagcuccagacccuggagcuggacauggccagccucaacaugaccaugccgcuguccugcacgaagaacaacagccaccacuacaucauggucggcaacgagaccggccuggagcucacccugaccaacacguccaucaucaaccacaaguucugcaaccugagcgacgcccacaagaagaaccucuacgaccacgcccugauguccaucaucagcaccuuccaccuguccauccccaacuucaaccaguacgaggccaugagcugcgacuucaacgggggcaagaucuccgugcaguacaaccucagccacaccuacgcgaucgacgccgccaaccacugcgggaccaucgccaacggcgugcugcagacguucaugcggauggcguggggcggguccuacaucgcccuggacagcggcugcggguccugggacugcaucaugaccagcuaccaguaccucaucauccagaacaccaccugggaggaccacugccaguucucccgccccagccccaucggcuaccuggggcugcucagccagcggacgcgcgacaucuacaucucccggcgccugcugggcaccuucaccuggacccucagcgacuccgagggcaacgagacgcccgggggcuacugccugacccgguggaugcugaucgaggccgagcucaagugcuucgggaacaccgccgucgccaagugcaacgagaagcacgacgaggaguucugcgacaugcugcgccuguucgacuucaacaagcaggcgauccggcgccucaagaccgaggcccagaugagcauccagcugaucaacaaggccgugaacgcccugaucaacgaccagcucaucaugaagaaccaccuccgggacaucaugugcauccccuacugcaacuacuccaaguacugguaccugaaccacacggugaccggcaagaccagccugccccgcugcuggcuggucuccaacgggagcuaccugaacgagacccacuucuccgacgacaucgagcagcaggccgacaacaugaucacggagaugcuccagaaggaguacauggaccggcagggcaagaccccgcugggccugguggaccuguucguguucagcaccuccuucuaccucaucagcaucuuccugcaccuggucaagaucccgacccaccgccacgugaucgggaagcccugccccaagccccaccggcucaaccacaugggcaucugcuccugcgggcuguacaagcacccgggcgugcccgucaaguggaagcgcugaggacuagucccuguucccagagcccacuuuuuuuucuuuuuuugaaauaaaauagccugucuuucagaucuaaaaaaaaaaaaaaaaaaaaaaaaaaaaaaaaaaaaaaaaaaaaaaaaaaaaaaaaaaaaaaaaaaaaaaaaaaaaaaaaaaaaaaaaaaaaaaaaaaaa

SEQ ID NO: 35671 - RNA, 1740 nt, Artificial Sequence
  mRNA product Design a-2 (A100) comprising derived and/or modified sequence from LASV(LASV237-NIG-2010;Clade II)__AIT17638__GPCmut9 (opt1)
aggagaguccgcucagccagguugcagaagcggcuuagcguguguccuaaucuucucucugcguguagguaggccugugccgcaaacaagcuuaccaugggccagaucaucaccuucuuccaggaggugccccacgucaucgaggaggugaugaacaucgugcugaucgcccucagccugcuggccauccucaaggggaucuacaacgucgcgaccugcggccuguucgggcugguguccuuccuccugcugugcggccgcagcugcuccacgaccuacaaggggguguacgagcuccagacccuggagcuggacauggccagccucaacaugaccaugccgcuguccugcacgaagaacaacagccaccacuacaucauggucggcaacgagaccggccuggagcucacccugaccaacacguccaucaucaaccacaaguucugcaaccugagcgacgcccacaagaaggaccucuacgaccacgcccugauguccaucaucagcaccuuccaccuguccauccccaacuucaaccaguacgaggccaugagcugcgacuucaacgggggcaagaucuccgugcaguacaaccucagccacaccuacgcgguggacgccgccaaccacugcgggaccaucgccaacggcguccugcagacguucaugcggauggcguggggcggguccuacaucgcccuggacagcggcugcggguccugggacugcaucaugaccagcuaccaguaccucaucauccagaacaccaccugggaggaccacugccaguucucccgccccagccccaucggcuaccuggggcugcucagccagcggacgcgcgacaucuacaucucccggcgccugcugggcaccuucaccuggacccucagcgacuccgagggcaacgagacgcccgggggcuacugccugacccgguggaugcugaucgaggccgagcucaagugcuucgggaacaccgccguggccaagugcaacgagaagcacgacgaggaguucugcgacaugcugcgccuguucgacuucaacaagcaggcgauccggcgccucaagaccgaggcccagaugagcauccagcugaucaacaaggccgugaacgcccugaucaacgaccagcucaucaugaagaaccaccuccgggacaucaugugcauccccuacugcaacuacuccaaguacugguaccugaaccacacggucaccggcaagaccagccugccccgcugcuggcugguguccaacgggagcuaccugaacgagacccacuucuccgacgacaucgagcagcaggccgacaacaugaucacggagcuccugcagaaggaguacauggaccggcagggcaagaccccgcugggccugguggaccucuucgucuucagcaccuccuucuaccugaucagcaucuuccugcaccucaucaagaucccgacccaccgccacaucacggggaagcccugccccaagccccaccggcugaaccacaugggcaucugcuccugcgggcuguacaagcacccgggcgugcccgugaaguggaagcgcugaggacuagucccuguucccagagcccacuuuuuuuucuuuuuuugaaauaaaauagccugucuuucagaucuaaaaaaaaaaaaaaaaaaaaaaaaaaaaaaaaaaaaaaaaaaaaaaaaaaaaaaaaaaaaaaaaaaaaaaaaaaaaaaaaaaaaaaaaaaaaaaaaaaaa

SEQ ID NO: 35672 - RNA, 1740 nt, Artificial Sequence
  mRNA product Design a-2 (A100) comprising derived and/or modified sequence from LASV(LASV253-NIG-2011;Clade II)__AIT17670__GPCmut9 (opt1)
aggagaguccgcucagccagguugcagaagcggcuuagcguguguccuaaucuucucucugcguguagguaggccugugccgcaaacaagcuuaccaugggccagaucaucaccuucuuccaggaggugccccacgucaucgaggaggugaugaacaucgugcugaucgcccucagccugcuggccauccucaaggggaucuacaacgucgcgaccugcggccuguucgggcugguguccuuccuccugcugugcggccgcagcugcuccacgaccuacaaggggguguacgagcuccagacccuggagcuggacauggccagccucaacaugaccaugccgcuguccugcacgaagaacaacagccaccacuacaucauggucggcaacgagaccggccuggagcucacccugaccaacacguccaucaucaaccacaaguucugcaaccugagcgacgcccacaagaagaaccucuacgaccacgcccugauguccaucaucagcaccuuccaccuguccauccccaacuucaaccaguacgaggccaugagcugcgacuucaacgggggcaagaucuccgugcaguacaaccucagccacaccuacgcgguggacgccgccaaccacugcgggaccaucgccaacggcguccugcagacguucaugcggauggcguggggcggguccuacaucgcccuggacagcggcugcggguccugggacugcaucaugaccagcuaccaguaccucaucauccagaacaccaccugggaggaccacugccaguucucccgccccagccccaucggcuaccuggggcugcucagccagcggacgcgcgacaucuacaucucccggcgccugcugggcaccuucaccuggacccucagcgacuccgagggcaacgagacgcccgggggcuacugccugacccgguggaugcugaucgaggccgagcucaagugcuucgggaacaccgccguggccaagugcaacgagaagcacgacgaggaguucugcgacaugcugcgccuguucgacuucaacaagcaggcgauccggcgccucaaggccgaggcccagaugagcauccagcugaucaacaaggccgugaacgcccugaucaacgaccagcucaucaugaagaaccaccuccgggacaucaugugcaucccguacugcaacuacuccaaguacugguaccugaaccacaccgucacgggccgcaccagccugccccggugcuggcugguguccaacgggagcuaccugaacgagacccacuucuccgacgacaucgagcagcaggcggacaacaugaucaccgagcuccugcagaaggaguacaucgaccgccagggcaagacgccccugggccugguggaccucuucgucuucagcaccuccuucuaccugaucagcaucuuccugcaccucgugaagaucccgacccaccggcacaucaucgggaagcccugccccaagccccaccgccugaaccacaugggcaucugcuccugcgggcuguacaagcacccgggcgugcccgucaaguggaagcggugaggacuagucccuguucccagagcccacuuuuuuuucuuuuuuugaaauaaaauagccugucuuucagaucuaaaaaaaaaaaaaaaaaaaaaaaaaaaaaaaaaaaaaaaaaaaaaaaaaaaaaaaaaaaaaaaaaaaaaaaaaaaaaaaaaaaaaaaaaaaaaaaaaaaa

SEQ ID NO: 35673 - RNA, 1740 nt, Artificial Sequence
  mRNA product Design a-2 (A100) comprising derived and/or modified sequence from LASV(LASV254-NIG-2011;Clade II)__AIT17674__GPCmut9 (opt1)
aggagaguccgcucagccagguugcagaagcggcuuagcguguguccuaaucuucucucugcguguagguaggccugugccgcaaacaagcuuaccaugggccagaucaucaccuucuuccaggaggugccccacgucaucgaggaggugaugaacaucgugcugaucgcccucagccugcuggccauccucaaggggaucuacaacgucgcgaccugcggccuguucgggcugguguccuuccuccugcugugcggccgcagcugcuccacgaccuacaaggggguguacgagcuccagacccuggagcuggacaugaccaaccucaacaugacgaugccgcugagcugcaccaagaacaacucccaccacuacaucauggucggcaacgagaccggccuggagcucacccugacgaacaccagcaucaucaaccacaaguucugcaaccuguccgacgcccacaagaagaaccucuacaaccacgcccugaugagcaucaucuccaccuuccaccugagcauccccaacuucaaccaguacgaggccauguccugcgacuucaacgggggcaagaucagcgugcaguacaaccucucccacagcuacgccguggacgcggccaaccacugcgggaccaucgccaacggcguccugcagacguucaugcggauggccuggggcggguccuacaucgcgcuggacagcggcugcgggaacugggacugcaucaugaccuccuaccaguaccucaucauccagaacaccaccugggaggaccacugccaguucagccgccccucccccaucggcuaccuggggcugcucagccagcggacgcgcgacaucuacaucagccggcgccugcugggcaccuucaccuggacccucuccgacagcgagggcaacgagacgcccgggggcuacugccugacccgguggaugcugaucgaggccgagcucaagugcuucgggaacaccgccguggccaagugcaacgagaagcacgacgaggaguucugcgacaugcugcgccuguucgacuucaacaagcaggccauccggcgccucaagaccgaggcgcaggccaacauccagcugaucaacaaggccgugaacgcccugaucaacgaccagcucaucaugaagaaccaccuccgggacaucaugugcauccccuacugcaacuacuccaaguacugguaccugaaccacacggucaccggcaagaccagccugccccgcugcuggcugguguccaacgggagcuaccugaacgagacccacuucuccgacgacaucgagcagcaggccgacaacaugaucacggagcuccugcagaaggaguacauggaccggcagggcaagaccccgcugggccugguggaccucuucgucuucagcaccuccuucuaccugaucagcaucuuccugcaccucgugaagaucccgacccaccgccacgugaucgggaagcccugccccaagccccaccggcugaaccacaugggcaucugcuccugcgggcuguacaagcacccgggcguccccgugaaguggaagcgcugaggacuagucccuguucccagagcccacuuuuuuuucuuuuuuugaaauaaaauagccugucuuucagaucuaaaaaaaaaaaaaaaaaaaaaaaaaaaaaaaaaaaaaaaaaaaaaaaaaaaaaaaaaaaaaaaaaaaaaaaaaaaaaaaaaaaaaaaaaaaaaaaaaaaa

SEQ ID NO: 35674 - RNA, 1740 nt, Artificial Sequence
  mRNA product Design a-2 (A100) comprising derived and/or modified sequence from LASV(Nig08-A19;Clade III)__ADU56618__GPCmut9 (opt1)
aggagaguccgcucagccagguugcagaagcggcuuagcguguguccuaaucuucucucugcguguagguaggccugugccgcaaacaagcuuaccaugggccagaucgugaccuucuuccaggaggucccccacgugaucgaggaggugaugaacaucguccugaucgcccucagcauccuggccauccugaaggggcucuacaacaucgcgaccugcggccugaucgggcuggugacguuccuccugcuguccggccgcagcugcuccaugaccuacaaggggguguacgagcuccagacccuggagcugaacaugaacacccucaacaugacgaugccgcugagcugcaccaagaacaacucccaccacuacaucauggucggcaacgagaccggccuggagcucacccugacgaacaccagccugcuccaccacaaguucugcaaccuguccgacgcccacaagaagaaccuguacgaccacacccucaugagcaucaucuccaccuuccaccugagcauccccaacuucaaccaguacgaggccauguccugcgacuucaacgggggcaagaucacggugcaguacaaccugagccacuccuacgccaucgacgccgcgaaccacugcgggaccguggccaacggcguccuccagaccuucaugcggauggccuggggcgggagcuacaucgcccuggacuccggcugcgggaagugggacugcaucaugaccagcuaccaguaccugaucauccagaacacgaccugggaggaccacugccaguucucccgccccagccccaucggcuaccucgggcugcugucccagcggacccgcgacaucuacaucagccggcgccuccugggcaccuucacguggacccugagcgacuccgagggcaacgagacccccgggggcuacugccucacccgguggaugcugaucgaggcggagcugaagugcuucgggaacacggccguggccaagugcaacgagaagcacgacgaggaguucugcgacaugcuccgccuguucgacuucaacaagcaggccauccggcgccugaaggccgaggcgcagaugagcauccagcucaucaacaaggccgugaacgcccugaucaacgaccagcugaucaugaagaaccaccuccgggacaucaugugcauccccuacugcaacuacuccaaguacugguaccugaaccacaccagcaccggccgcaccucccugccccggugcuggcucgucagcaacggguccuaccugaacgagacgcacuucagcgacgacaucgagcagcaggccgacaacaugaucaccgagaugcugcagaaggaguaccuggaccgccagggcaagaccccgcucggccugguggaccuguucguguucuccaccagcuucuaccucaucuccaucuuccugcaccuggucaagaucccgacgcaccggcacaucguggggaagcccugccccaagccccaccgccucaaccacaugggcaucugcagcugcgggcuguacaagcagccgggcgugcccguccgguggaagcgcugaggacuagucccuguucccagagcccacuuuuuuuucuuuuuuugaaauaaaauagccugucuuucagaucuaaaaaaaaaaaaaaaaaaaaaaaaaaaaaaaaaaaaaaaaaaaaaaaaaaaaaaaaaaaaaaaaaaaaaaaaaaaaaaaaaaaaaaaaaaaaaaaaaaaa

SEQ ID NO: 35675 - RNA, 1743 nt, Artificial Sequence
  mRNA product Design a-2 (A100) comprising derived and/or modified sequence from LASV(G1180-SLE-2010;Clade IV)__AIT17168__GPCmut9 (opt1)
aggagaguccgcucagccagguugcagaagcggcuuagcguguguccuaaucuucucucugcguguagguaggccugugccgcaaacaagcuuaccaugggccagaucgugaccuucuuccaggaggucccccacgugaucgaggaggugaugaacaucguccugaucgcccucagcauccuggccgugcugaaggggcucuacaacuucgcgaccugcggccugguggggcugcucaccuuccugcugcucugcggccgcuccugcaccgccagccgguacaagggggucuacgagcugcagacccuggagcucaacauggagacccugaacaugacgaugccgcuguccugcaccaagaacaacagccaccacuacaucauggugggcaacgagaccggccucgagcugacccugacgaacaccuccaucaucaaccacaaguucugcaaccucagcgacgcccacaagaagaaccuguacgaccacgcccugauguccaucaucagcaccuuccaccucuccauccccaacuucaaccaguacgaggccaugagcugcgacuucaacgggggcaagaucuccgugcaguacaaccugagccacuccuacgcgggggacgccgccaaccacugcggcaccgucgccaacggggugcugcagacguucaugcgcauggcguggggcggcagcuacaucgcccucgacuccgggugcggcagcugggacugcaucaugaccuccuaccaguaccugaucauccagaacaccaccugggaggaccacugccaguucagccggcccucccccaucggguaccugggccuccugagccagcgcacgcgggacaucuacaucagccgccggcugcucggcaccuucaccuggacccuguccgacagcgaggggaaggacacgccgggcggguacugccugacccgcuggaugcucaucgaggccgagcugaagugcuucggcaacaccgccguggccaagugcaacgagaagcacgacgaggaguucugcgacaugcugcggcuguucgacuucaacaagcaggcgauccagcgccugaaggccgaggcccagauguccauccagcugaucaacaaggccgucaacgcccucaucaacgaccagcugaucaugaagaaccaccuccgggacaucaugugcauccccuacugcaacuacagcaaguacugguaccucaaccacaccacgaccgggaagaccucccugcccaagugcuggcuggugagcaacggcuccuaccucaacgagacccacuucagcgacgacaucgagcagcaggcggacaacaugaucacggagaugcugcagaaggaguacauggagcgccagggcaagacgccccuggggcugguggaccucuucgucuucuccaccagcuucuaccugaucuccaucuuccugcaccucgugaagaucccgacccaccggcacaucgugggcaagagcugccccaagccccaccgccugaaccacauggggaucugcuccugcggccuguacaagcagcccggggucccggugaaguggaagcggugaggacuagucccuguucccagagcccacuuuuuuuucuuuuuuugaaauaaaauagccugucuuucagaucuaaaaaaaaaaaaaaaaaaaaaaaaaaaaaaaaaaaaaaaaaaaaaaaaaaaaaaaaaaaaaaaaaaaaaaaaaaaaaaaaaaaaaaaaaaaaaaaaaaaa

SEQ ID NO: 35676 - RNA, 1743 nt, Artificial Sequence
  mRNA product Design a-2 (A100) comprising derived and/or modified sequence from LASV(G1442-SLE-2011;Clade IV)__AIT17180__GPCmut9 (opt1)
aggagaguccgcucagccagguugcagaagcggcuuagcguguguccuaaucuucucucugcguguagguaggccugugccgcaaacaagcuuaccaugggccagaucgugaccuucuuccaggaggucccccacgugaucgaggaggugaugaacaucguccugaucgcccucagcauccuggccgugcugaaggggcucuacaacguggcgaccugcggccugaucgggcuggucacguuccuccugcugugcggccgcuccugcaccaccacccucuacaaggggguguacgagcugcagacgcuggagcucaacauggagacccugaacaugaccaugccgcugagcugcaccaagaacaacucccaccacuacauccgggugggcaacgagacgggccucgagcugacccugaccaacaccagcaucaucaaccacaaguucugcaaccucuccgacgcccacaagaagaaccuguacgaccacgcccugaugagcaucaucuccacguuccaccucagcauccccaacuucaaccaguacgaggccauguccugcgacuucaacgggggcaagaucagcguccaguacaaccugucccacagcuacgccggggacgcggccaaccacugcggcaccguggccaacggggugcugcagaccuucaugcgcauggccuggggcggcuccuacaucgcgcucgacagcgggugcggcaacugggacugcaucaugaccuccuaccaguaccugaucauccagaacacgaccugggacgaccacugccaguucagccggcccucccccaucggguaccugggccuccugagccagcgcacccgggacgucuacaucucccgccggcugcucggcaccuucacguggacccugagcgacagcgaggggaaggacaccccgggcggguacugccugacccgcuggaugcucaucgaggccgagcugaagugcuucggcaacacggccguggccaagugcaacgagaagcacgacgaggaguucugcgacaugcugcggcuguucgacuucaacaagcaggccauccagcgccugaaggcggaggcccagauguccauccagcugaucaacaaggccgugaacgcccucaucaacgaccagcugaucaugaagaaccaccuccgggacaucaugugcauccccuacugcaacuacagcaaguacugguaccucaacaacaccgccaccgggaagaccucccugcccaagugcuggcugaucagcaacggcuccuaccucaacgagacgcacuucagcgacgacaucgagcaggaggcggacaacaugaucaccgagaugcugcagaaggaguacauggagcgccagggcaagacgccccuggggcuggucgaccucuucguguucuccaccagcuucuaccugaucuccaucuuccugcaccucgugaagaucccgacccaccggcacaucgucggcaagagcugccccaagccccaccgccugaaccacauggggaucugcuccugcggccuguacaagcagcccggggugccggugcgguggaagcgcugaggacuagucccuguucccagagcccacuuuuuuuucuuuuuuugaaauaaaauagccugucuuucagaucuaaaaaaaaaaaaaaaaaaaaaaaaaaaaaaaaaaaaaaaaaaaaaaaaaaaaaaaaaaaaaaaaaaaaaaaaaaaaaaaaaaaaaaaaaaaaaaaaaaaa

SEQ ID NO: 35677 - RNA, 1743 nt, Artificial Sequence
  mRNA product Design a-2 (A100) comprising derived and/or modified sequence from LASV(G3010-SLE-2013;Clade IV)__AIT17344__GPCmut9 (opt1)
aggagaguccgcucagccagguugcagaagcggcuuagcguguguccuaaucuucucucugcguguagguaggccugugccgcaaacaagcuuaccaugggccagaucgugaccuucuuccaggaggucccccacgugaucgaggaggugaugaacaucguccugaucgcccucagcauccuggccgugcugaaggggcucuacaacuucgcgaccugcggccugguggggcuggucacguuccuccugcugugcggccgcuccugcaccaccagccucuacaaggggguguacgagcugcagacccuggagcucaacauggagacgcugaacaugaccaugccgcuguccugcaccaagaacaacagccaccacuacaucauggugggcaacgagaccggccucgagcugacgcugaccaacaccuccaucaucaaccacaaguucugcaaccucagcgacgcccacaagaagaaccuguacaaccacgcccugauguccaucaucagcaccuuccaccucuccauccccaacuucaaccaguacgaggccaugagcugcgacuucaacgggggcaagaucuccguccaguacaaccugagccacuccuacgccggggacgcggccagccacugcggcacgguggccaacggggugcugcagaccuucaugcggauggccuggggcggcuccuacaucgcgcucgacagcgggugcggcaagugggacugcaucaugaccuccuaccaguaccugaucauccagaacaccacgugggaggaccacugccaguucagccgccccucccccaucggguaccugggccuccugagccagcggacccgcgacaucuacaucagccggcgccugcucggcaccuucaccuggacgcuguccgacagcgaggggaaggacaccccgggcggguacugccugacccgguggaugcucaucgaggccgagcugaagugcuucggcaacaccgccgucgccaagugcaacgagaagcacgacgaggaguucugcgacaugcugcgccucuucgacuucaacaagcaggccauccagcggcugaagacggaggcgcagauguccauccagcugaucaacaaggccgugaacgcccucaucaacgaccagcugaucaugaagaaccaccuccgcgacaucaugugcauccccuacugcaacuacagcaaguacugguaccugaaccacaccaccaccgggaagacgucccugcccaagugcuggcuggugagcaacggcuccuaccucaacgagacccacuucagcgacgacaucgagcagcaggccgacaacaugaucaccgagaugcugcagaaggaguacauggagcggcagggcaagacgccccuggggcuggucgaccucuucguguucuccaccagcuucuaccugaucuccaucuuccugcaccucgugaagaucccgacccaccgccacaucgucggcaagagcugccccaagccccaccggcugaaccacauggggaucugcuccugcggccuguacaagcagcccggggugccggugcgcuggaagcggugaggacuagucccuguucccagagcccacuuuuuuuucuuuuuuugaaauaaaauagccugucuuucagaucuaaaaaaaaaaaaaaaaaaaaaaaaaaaaaaaaaaaaaaaaaaaaaaaaaaaaaaaaaaaaaaaaaaaaaaaaaaaaaaaaaaaaaaaaaaaaaaaaaaaa

SEQ ID NO: 35678 - RNA, 1743 nt, Artificial Sequence
  mRNA product Design a-2 (A100) comprising derived and/or modified sequence from LASV(G502-SLE-2009;Clade IV)__AIT17126__GPCmut9 (opt1)
aggagaguccgcucagccagguugcagaagcggcuuagcguguguccuaaucuucucucugcguguagguaggccugugccgcaaacaagcuuaccaugggccagaucgugaccuucuuccaggaggucccccacgugaucgaggaggugaugaacaucguccugaucgcccucagcauccuggccgugcugaaggggcucuacaacuucgcgaccugcggccugguggggcugcucacguuccugcugcucugcggccgcuccugcaccaccgggcuguacaagggcgucuacgagcugcagacccucgagcugaacauggagacgcugaacaugaccaugccgcucagcugcaccaagaacaacucccaccacuacaucauggugggcaacgagaccgggcuggagcugacgcucaccaacaccagcaucaucaaccacaaguucugcaaccuguccgacgcccacaagaagaaccuguacgaccacgcccucaugagcaucaucuccaccuuccaccugagcauccccaacuucaaccaguacgaggccauguccugcgacuucaacggcgggaagaucagcgugcaguacaaccugucccacagcuacgccggcgacgcggccgaccacugcgggacggucgccaacggcgugcuccagaccuucaugcggauggccuggggcggguccuacaucgcgcuggacagcggcugcgggcgcugggacugcaucaugaccuccuaccaguaccugaucauccagaacaccacgugggaggaccacugccaguucagccggcccucccccaucggcuaccucggccugcugagccagcgcacccgggacaucuacaucucccgccggcuccuggggaccuucaccuggacgcugagcgacagcgagggcaaggacacccccgggggcuacugccucacccgcuggaugcugaucgaggccgagcugaagugcuucgggaacaccgccguggccaagugcaacgagaagcacgacgaggaguucugcgacaugcuccggcuguucgacuucaacaagcaggccauccagcgccugaaggcggaggcccagauguccauccagcucaucaacaaggccgucaacgcccugaucaacgaccagcuggugaugaagaaccaccuccgggacaucaugugcauccccuacugcaacuacagccgcuacugguaccugaaccacacgaccaccggccggaccucccugcccaagugcuggcucgugagcaacggcuccuaccugaacgagacgcacuucagcgacgacaucgagcagcaggccgacaacaugaucaccgagaugcugcagaaggaguacauggagcgccaggggaagaccccgcugggccucgucgaccuguucguguucuccaccagcuucuaccugaucuccaucuuccuccaccuggugaagaucccgacgcaccggcacaucgucggcaagagcugccccaagccccaccgccugaaccacauggggaucugcuccugcgggcucuacaagcagcccggcgugccggugaaguggaagcggugaggacuagucccuguucccagagcccacuuuuuuuucuuuuuuugaaauaaaauagccugucuuucagaucuaaaaaaaaaaaaaaaaaaaaaaaaaaaaaaaaaaaaaaaaaaaaaaaaaaaaaaaaaaaaaaaaaaaaaaaaaaaaaaaaaaaaaaaaaaaaaaaaaaaa

SEQ ID NO: 35679 - RNA, 1743 nt, Artificial Sequence
  mRNA product Design a-2 (A100) comprising derived and/or modified sequence from LASV(G733-SLE-2010;Clade IV)__AIT17154__GPCmut9 (opt1)
aggagaguccgcucagccagguugcagaagcggcuuagcguguguccuaaucuucucucugcguguagguaggccugugccgcaaacaagcuuaccaugggccagaucgugaccuucuuccaggaggucccccacgugaucgaggaggugaugaacaucguccugaucgcccucagcauccuggccgugcugaaggggcucuacaacuucgcgaccugcggcaucguggggcuggucuccuuccugcuccugugcggccgcagcugcacgaccucccuguacaaggggguguacgagcuccagacccuggagcugaacauggagacccucaacaugacgaugccgcugagcugcaccaagaacaacucccaccacuacaucauggugggcaacgagaccggccuggagcucacccugacgaacaccagcaucaucaaccacaaguucugcaaccuguccgacgcccacaagaagaaccucuacgaccacgcccugaugagcaucaucuccaccuuccaccugagcauccccaacuucaaccaguacgaggccauguccugcgacuucaacgggggcaagaucagcguccaguacaaccucucccacagcuacgccggggacgcggccaaccacugcggcaccaucgccaacggggugcugcagacguucaugcggauggccuggggcggcuccuacaucgcgcuggacagcgggugcgaccgcugggacugcaucaugaccuccuaccaguaccucaucauccagaacaccaccugggaggaccacugccaguucagccggcccucccccaucggcuaccuggggcugcucagccagcgcacgcgggacaucuacaucagccgccggcugcugggcaccuucaccuggacccucuccgacagcgagggcaaggacacgcccgggggcuacugccugacccgcuggaugcugaucgaggccgagcucaagugcuucgggaacaccgccguggccaagugcaacgagaagcacgacgaggaguucugcgacaugcugcggcuguucgacuucaacaagcaggccauccagcgccucaaggcggaggcccagauguccauccagcugaucaacaaggccgucaacgcccugaucaacgaccagcucaucaugaagaaccaccuccgggacaucaugugcauccccuacugcaacuacagcaaguacugguaccugaaccacaccacgaccggcaagaccucccugcccaagugcuggcuggugagcaacggguccuaccugaacgagacccacuucagcgacgacaucgagcagcaggccgacaacaugaucacggagaugcuccagaaggaguacauggagcgccagggcaagaccccgcugggccugguggaccuguucgucuucuccaccagcuucuaccucaucuccaucuuccugcaccuggugaagaucccgacccaccggcacguggucggcaagagcugccccaagccccaccgccucaaccacauggggaucugcuccugcgggcuguacggccagcccggggugccggugaaguggaagcggugaggacuagucccuguucccagagcccacuuuuuuuucuuuuuuugaaauaaaauagccugucuuucagaucuaaaaaaaaaaaaaaaaaaaaaaaaaaaaaaaaaaaaaaaaaaaaaaaaaaaaaaaaaaaaaaaaaaaaaaaaaaaaaaaaaaaaaaaaaaaaaaaaaaaa

SEQ ID NO: 35680 - RNA, 1743 nt, Artificial Sequence
  mRNA product Design a-2 (A100) comprising derived and/or modified sequence from MOPV/LASV reassortant(IGS-1;Clade IV)__AFY05576__GPCmut9 (opt1)
aggagaguccgcucagccagguugcagaagcggcuuagcguguguccuaaucuucucucugcguguagguaggccugugccgcaaacaagcuuaccaugggccagaucgugaccuucuuccaggaggucccccacgugaucgaggaggugaugaacaucguccugaucgcccucagcgugcuggccgugcugaaggggcucuacaacuucgcgaccugcggccuggucgggcuggugacguuccuccugcugugcggccgcuccugcaccaccagccucuacaaggggguguacgagcugcagacccuggagcucaacauggagacgcugaacaugaccaugccgcuguccugcaccaagaacaacagccaccacuacaucauggucggcaacgagaccggccucgagcugacgcugaccaacaccuccaucaucaaccacaaguucugcaaccucagcgacgcccacaagaagaaccuguacgaccacgcccugauguccaucaucagcaccuuccaccucuccauccccaacuucaaccaguacgaggccaugagcugcgacuucaacgggggcaagaucuccgugcaguacaaccugagccacuccuacgccggggacgcggccaaccacugcggcacgguggccaacgggguccugcagaccuucaugcggauggccuggggcggcagcuacaucgcgcucgacuccgggugcggcaacugggacugcaucaugaccagcuaccaguaccugaucauccagaacaccacgugggaggaccacugccaguucucccgccccagccccaucggguaccugggccuccugucccagcggacccgcgacaucuacaucagccggcgccugcucggcaccuucaccuggacgcugagcgacuccgagggggaggacaccccgggcggguacugccugacccgguggaugcucaucgaggccgagcugaagugcuucggcaacaccgccguggccaagugcaacgagaagcacgacgaggaguucugcgacaugcugcgccucuucgacuucaacaagcaggccauccagcggcugaaggcggaggcccagaugagcauccagcugaucaacaaggccgugaacgcccucaucaacgaccagcugaucaugaagaaccaccuccgcgacaucaugugcauccccuacugcaacuacuccaaguacugguaccugaaccacacgaccaccgggcggaccagccugcccaagugcuggcuggucuccaacggcagcuaccucaacgagacgcacuucuccgacgacaucgagcagcaggccgacaacaugaucaccgagaugcugcagaaggaguacauggagcgccagggcaagacgccccuggggcugguggaccucuucguguucagcaccuccuucuaccugaucagcaucuuccugcaccucgucaagaucccgacccaccggcacaucgugggcaaguccugccccaagccccaccgccugaaccacauggggaucugcagcugcggccuguacaagcagcccggggugccggucaaguggaagcggugaggacuagucccuguucccagagcccacuuuuuuuucuuuuuuugaaauaaaauagccugucuuucagaucuaaaaaaaaaaaaaaaaaaaaaaaaaaaaaaaaaaaaaaaaaaaaaaaaaaaaaaaaaaaaaaaaaaaaaaaaaaaaaaaaaaaaaaaaaaaaaaaaaaaa

SEQ ID NO: 35681 - RNA, 1743 nt, Artificial Sequence
  mRNA product Design a-2 (A100) comprising derived and/or modified sequence from LASV(LM765-SLE-2012;Clade IV)__AIT17814__GPCmut9 (opt1)
aggagaguccgcucagccagguugcagaagcggcuuagcguguguccuaaucuucucucugcguguagguaggccugugccgcaaacaagcuuaccaugggccagaucgugaccuucuuccaggaggucccccacgugaucgaggaggugaugaacaucguccugaucgcccucagcauccuggccgugcugaaggggcucuacaacuucgcgaccugcggccugguggggcuggucacguuccuccugcugugcggccgcuccugcaccaccagccucuacaaggggguguacgagcugcagacccuggagcucaacauggagacgcugaacaugaccaugccgcuguccugcaccaagaacaacagccaccacuacaucauggugggcaacgagaccggccucgagcugacgcugaccaacaccuccaucaucgaccacaaguucugcaaccucagcgacgcccaccggaagaaccuguacgaccacgcccugauguccaucaucagcaccuuccaccucuccauccccaacuucaaccaguacgaggccaugagcugcgacuucaacgggggcaagaucuccguccaguacaaccugagccacuccuacgccaaggacgcggccgaccacugcgggacgguggccaacggcgugcugcagaccuucaugcgcauggccuggggcgggagcuacaucgcgcucgacuccggcugcgggcggugggacugcaucaugaccagcuaccaguaccugaucauccagaacaccacgugggaggaccacugccaguucucccgccccagccccaucggcuaccuggggcuccugucccagcggacccgcgacaucuacaucagccggcgccugcucggcaccuucaccuggacgcugagcgacuccgagggcaaggacacccccgggggcuacugccugacccgguggaugcucaucgaggccgagcugaagugcuucgggaacaccgccgucgccaagugcaacgagaagcacgacgaggaguucugcgacaugcugcgccucuucgacuucaacaagcaggccauccagcggcugaaggcggaggcccagaugagcauccagcugaucaacaaggccgugaacgcccucaucaacgaccagcugaucaugaagaaccaccuccgcgacaucaugugcauccccuacugcaacuacuccaaguacugguaccugaaccacacgaccaccggcaagaccagccugcccaagugcuggcugguguccaacgggagcuaccucaacgagacgcacuucuccgacgacaucgagcagcaggccgacaacaugaucaccgagaugcugcagaaggaguacauggagcggcagggcaagaccccgcugggccuggucgaccucuucguguucagcaccuccuucuaccugaucagcaucuuccugcaccucgugaagaucccgacgcaccgccacaucgucgggaagcccugccccaagccccaccggcugaaccacaugggcaucugcuccugcgggcuguacaagcagccgggcgugcccgugaaguggaagcgcugaggacuagucccuguucccagagcccacuuuuuuuucuuuuuuugaaauaaaauagccugucuuucagaucuaaaaaaaaaaaaaaaaaaaaaaaaaaaaaaaaaaaaaaaaaaaaaaaaaaaaaaaaaaaaaaaaaaaaaaaaaaaaaaaaaaaaaaaaaaaaaaaaaaaa

SEQ ID NO: 35682 - RNA, 1743 nt, Artificial Sequence
  mRNA product Design a-2 (A100) comprising derived and/or modified sequence from LASV(LM776-SLE-2012;Clade IV)__AIT17824__GPCmut9 (opt1)
aggagaguccgcucagccagguugcagaagcggcuuagcguguguccuaaucuucucucugcguguagguaggccugugccgcaaacaagcuuaccaugggccagaucgugaccuucuuccaggaggucccccacgugaucgaggaggugaugaacaucguccugaucgcccucagcauccuggccgugcugaaggggcucuacaacuucgcgaccugcggccugguggggcuggucacguuccuccugcugugcggccgcuccugcaccaccagcguguacaaggggguguacgagcuccagacccuggagcugaacauggagacgcucaacaugaccaugccgcuguccugcaccaagaacaacagccaccacuacaucauggucggcaacgagaccggccuggagcucacgcugaccaacaccuccaucaucaaccacaaguucugcaaccugagcgacgcccacaagaagaaccucuacgaccacgcccugauguccaucaucagcaccuuccaccuguccauccccaacuucaaccaguacgaggccaugagcugcgacuucaacgggggcaagaucuccgugcaguacaaccucagccacuccuacgccggggacgcggccaaccacugcggcacgguggccaacgggguccugcagaccuucaugcggauggccuggggcggcagcuacaucgcgcuggacuccgggugcggcaagugggacugcaucaugaccagcuaccaguaccucaucauccagaacaccacgugggaggaccacugccaguucucccgccccagccccaucggguaccugggccugcucucccagcggacccgcgacaucuacaucagccggcgccugcugggcaccuucaccuggacgcucagcgacuccgaggggaaggacaccccgggcggguacugccugacccgguggaugcugaucgaggccgagcucaagugcuucggcaacaccgccguggccaagugcaacgagaagcacgacgaggaguucugcgacaugcugcgccuguucgacuucaacaagcaggccauccagcggcucaaggcggaggcccagaugagcauccagcugaucaacaaggccgugaacgcccugaucaacgaccagcucaucaugaagaaccaccuccgcgacaucaugugcauccccuacugcaacuacuccaaguacugguaccugaaccacacgaccaccgggaagaccagccugcccaagugcuggcuggucuccaacggcagcuaccugaacgagacgcacuucuccgacgacaucgagcagcaggccgacaacaugaucaccgagaugcuccagaaggaguacauggagcggcagggcaagacgccccuggggcugguggaccuguucguguucagcaccuccuucuaccucaucagcaucuuccugcaccuggucaagaucccgacccaccgccacaucgugggcaaguccugccccaagccccaccggcucaaccacauggggaucugcagcugcggccuguacaagcagcccggggugccgguccgcuggaagcggugaggacuagucccuguucccagagcccacuuuuuuuucuuuuuuugaaauaaaauagccugucuuucagaucuaaaaaaaaaaaaaaaaaaaaaaaaaaaaaaaaaaaaaaaaaaaaaaaaaaaaaaaaaaaaaaaaaaaaaaaaaaaaaaaaaaaaaaaaaaaaaaaaaaaa

SEQ ID NO: 35683 - RNA, 1743 nt, Artificial Sequence
  mRNA product Design a-2 (A100) comprising derived and/or modified sequence from LASV(Mad39;Clade IV)__ANH09722__GPCmut9 (opt1)
aggagaguccgcucagccagguugcagaagcggcuuagcguguguccuaaucuucucucugcguguagguaggccugugccgcaaacaagcuuaccaugggccagaucgugaccuucuuccaggaggucccccacgugaucgaggaggugaugaacaucguccugaucgcccucagcauccuggccgugcugaaggggcucuacaacguggcgaccugcggccugaucgggcuggucacguuccuccugcugugcggccgcuccugcaccaccacccucuacaaggggguguacgagcugcaggcccuggagcucaacauggagacgcugaacaugaccaugccgcugagcugcaccaagaacaacucccaccacuacauccgggugggcaacgagaccggccucgagcugacgcugaccaacaccagccucaucaaccacaaguucugcaaccuguccgacgcccacaagaagaaccuguacgaccacgcccucaugagcaucaucuccaccuuccaccugagcauccccaacuucaaccaguacgaggccauguccugcgacuucaacgacgggaagaucagcguccaguacaaccugucccacacguacgcgggcgacaccgccaaccacugcgggaccguggccaacggcgugcuccagaccuucaugcgcauggccuggggcgggagcuacaucgcgcuggacuccggcugcgggggcugggacugcaucaugacgagcuaccaguaccugaucauccagaacaccaccugggaggaccacugccaguucucccggcccagccccaucggguaccucggccugcugucccagcgcacccgggacaucuacaucagccgccggcuccugggcacguucaccuggacccuguccgacagcgaggggaaggacaccccgggcggguacugccucacgcgcuggaugcugaucgaggccgagcugaagugcuucggcaacaccgccgucgccaagugcaacgagaagcacgacgaggaguucugcgacaugcuccggcuguucgacuucaacaagcaggccauccagcgccugaaggcggaggcccagaugagcauccagcucaucaacaaggccgugaacgcccugaucaacgaccagcugaucaugaagaaccaccuccgggacaucaugugcauccccuacugcaacuacuccaaguacugguaccugaaccacaccgugaccgggaagacgagccugcccaagugcuggcucgucuccaacggcagcuaccugaacgagacccacuucuccgacgacaucgagcagcaggccgacaacaugaucaccgagaugcugcagaaggaguacauggagcgccagggcaagacgccccuggggcucguggaccuguucguguucagcaccuccuucuaccugaucagcaucuuccuccaccuggucaagaucccgacccaccggcacguggugggcaagcccugccccaagccccaccgccugaaccacauggggaucugcuccugcggcuucuacaagcagccggggguccccgugcgguggaagcgcugaggacuagucccuguucccagagcccacuuuuuuuucuuuuuuugaaauaaaauagccugucuuucagaucuaaaaaaaaaaaaaaaaaaaaaaaaaaaaaaaaaaaaaaaaaaaaaaaaaaaaaaaaaaaaaaaaaaaaaaaaaaaaaaaaaaaaaaaaaaaaaaaaaaaa

SEQ ID NO: 35684 - RNA, 1743 nt, Artificial Sequence
  mRNA product Design a-2 (A100) comprising derived and/or modified sequence from LASV(Z0947-SLE-2011;Clade IV)__AIT17840__GPCmut9 (opt1)
aggagaguccgcucagccagguugcagaagcggcuuagcguguguccuaaucuucucucugcguguagguaggccugugccgcaaacaagcuuaccaugggccagaucgugaccuucuuccaggaggucccccacgugaucgaggaggugaugaacaucguccugaucgcccucagcauccuggccgugcugaaggggcucuacaacuucgcgaccugcggccugguggggcuggucacguuccuccugcugugcggccgcuccugcaccaucagccucuacaaggggguguacgagcugcagacccuggagcucaacauggagacccugaacaugacgaugccgcuguccugcaccaagaacaacagccaccacuacaucauggugggcaacgagaccggccucgagcugacccugacgaacaccuccaucaucaaccacaaguucugcaaccucagcgacgcccacaagaagaaccuguacgaccacgcccugauguccaucaucagcaccuuccaccucuccauccccaacuucaaccaguacgaggccaugagcugcgacuucaacgggggcaagaucuccguccaguacaaccugagccacuccuacgccggggacgcggccaaccacugcggcaccguggccaacggggugcugcagacguucaugcggauggccuggggcggcagcuacaucgcgcucgacuccgggugcgaccgcugggacugcaucaugaccagcuaccaguaccugaucauccagaacaccaccugggaggaccacugccaguucucccggcccagccccaucggcuaccuggggcuccugucccagcgcacgcgggacaucuacaucagccgccggcugcucggcaccuucaccuggacccugagcgacuccgagggcaaggacacgcccgggggcuacugccugacccgcuggaugcucaucgaggccgagcugaagugcuucgggaacaccgccgucgccaagugcaacgagaagcacgacgaggaguucugcgacaugcugcggcuguucgacuucaacaagcaggccauccagcgccugaaggcggaggcccagaugagcauccagcugaucaacaaggccgugaacgcccucaucaacgaccagcugaucaugaagaaccaccuccgggacaucaugugcauccccuacugcaacuacuccaaguacugguaccucaaccacaccacgaccggcaagaccagccugcccaagugcuggcugguguccaacgggagcuaccucaacgagacccacuucuccgacgacaucgagcagcaggccgacaacaugaucacggagaugcugcagaaggaguacauggagcgccagggcaagaccccgcugggccuggucgaccucuucguguucagcaccuccuucuaccugaucagcaucuuccugcaccucgugaagaucccgacccaccggcacaucgucgggaagcccugccccaagccccaccgccugaaccacaugggcaucugcuccugcgggcuguacaagcagccgggcgugcccgugaaguggaagcggugaggacuagucccuguucccagagcccacuuuuuuuucuuuuuuugaaauaaaauagccugucuuucagaucuaaaaaaaaaaaaaaaaaaaaaaaaaaaaaaaaaaaaaaaaaaaaaaaaaaaaaaaaaaaaaaaaaaaaaaaaaaaaaaaaaaaaaaaaaaaaaaaaaaaa

SEQ ID NO: 35685 - RNA, 1743 nt, Artificial Sequence
  mRNA product Design a-2 (A100) comprising derived and/or modified sequence from LASV(Josiah;Clade IV)__NP_694870__GPCmut9 (opt4)
aggagaguccgcucagccagguugcagaagcggcuuagcguguguccuaaucuucucucugcguguagguaggccugugccgcaaacaagcuuaccaugggccagaucgugaccuucuuccaggaggugccccacgugaucgaggaggugaugaacaucgugcugaucgcccugagcgugcuggccgugcugaagggccuguacaacuucgccaccugcggccuggugggccuggugaccuuccugcugcugugcggcagaagcugcaccaccagccuguacaagggcguguacgagcugcagacccuggagcugaacauggagacccugaacaugaccaugccccugagcugcaccaagaacaacagccaccacuacaucauggugggcaacgagaccggccuggagcugacccugaccaacaccagcaucaucaaccacaaguucugcaaccugagcgacgcccacaagaagaaccuguacgaccacgcccugaugagcaucaucagcaccuuccaccugagcauccccaacuucaaccaguacgaggccaugagcugcgacuucaacggcggcaagaucagcgugcaguacaaccugagccacagcuacgccggcgacgccgccaaccacugcggcaccguggccaacggcgugcugcagaccuucaugagaauggccuggggcggcagcuacaucgcccuggacagcggcugcggcaacugggacugcaucaugaccagcuaccaguaccugaucauccagaacaccaccugggaggaccacugccaguucagcagacccagccccaucggcuaccugggccugcugagccagagaaccagagacaucuacaucagcagaagacugcugggcaccuucaccuggacccugagcgacagcgagggcaaggacacccccggcggcuacugccugaccagauggaugcugaucgaggccgagcugaagugcuucggcaacaccgccguggccaagugcaacgagaagcacgacgaggaguucugcgacaugcugagacuguucgacuucaacaagcaggccauccagagacugaaggccgaggcccagaugagcauccagcugaucaacaaggccgugaacgcccugaucaacgaccagcugaucaugaagaaccaccugagagacaucaugugcauccccuacugcaacuacagcaaguacugguaccugaaccacaccaccaccggcagaaccagccugcccaagugcuggcuggugagcaacggcagcuaccugaacgagacccacuucagcgacgacaucgagcagcaggccgacaacaugaucaccgagaugcugcagaaggaguacauggagagacagggcaagaccccccugggccugguggaccuguucguguucagcaccagcuucuaccugaucagcaucuuccugcaccuggugaagauccccacccacagacacaucgugggcaagagcugccccaagccccacagacugaaccacaugggcaucugcagcugcggccuguacaagcagcccggcgugcccgugaaguggaagagaugaggacuagucccuguucccagagcccacuuuuuuuucuuuuuuugaaauaaaauagccugucuuucagaucuaaaaaaaaaaaaaaaaaaaaaaaaaaaaaaaaaaaaaaaaaaaaaaaaaaaaaaaaaaaaaaaaaaaaaaaaaaaaaaaaaaaaaaaaaaaaaaaaaaaa

SEQ ID NO: 35686 - RNA, 1740 nt, Artificial Sequence
  mRNA product Design a-2 (A100) comprising derived and/or modified sequence from LASV(LP;Clade I)__AAF86701__GPCmut9 (opt4)
aggagaguccgcucagccagguugcagaagcggcuuagcguguguccuaaucuucucucugcguguagguaggccugugccgcaaacaagcuuaccaugggccagaucaucaccuucuuccaggaggugccccacgugaucgaggaggugaugaacaucgugcugaucgcccugagccugcuggccauccugaagggccuguacaacaucgccaccugcggcaucaucggccugguggccuuccuguuccugugcggcaagagcugcagccugacccugaagggcggcuacgagcugcagacccuggagcugaacauggagacccugaacaugaccaugccccugagcugcaccaagaacagcagccaccacuacaucagagugggcaacgagaccggccuggagcugacccugaccaacaccagcaucaucaaccacaaguucugcaaccugagcgacgcccacaagaagaaccuguacgaccacgcccugaugagcaucaucagcaccuuccaccugagcauccccaacuucaaccaguacgaggccaugagcugcgacuucaacggcggcaagaucagcgugcaguacaaccugagccacagcuacgccggcgacgccgccgagcacugcggcaccguggccaacggcgugcugcagaccuucaugagaauggccuggggcggcagauacaucgcccuggacagcggcugcggcaacugggacugcaucaugaccagcuaccaguaccugaucauccagaacaccaccugggaggaccacugccaguucagcagacccagccccaucggcuaccugggccugcugagccagagaaccagagacaucuacaucagcagaagacugcugggcaccuucaccuggacccugagcgacagcgagggcaacgagacccccggcggcuacugccugaccagauggaugcugaucgaggccgagcugaagugcuucggcaacaccgccguggccaagugcaacgagaagcacgacgaggaguucugcgacaugcugagacuguucgacuucaacaagcaggccaucagaagacugaaggccgaggcccagaugagcauccagcugaucaacaaggccgugaacgcccugaucaacgaccagcugaucaugaagaaccaccugagagacaucaugugcauccccuacugcaacuacagcaaguacugguaccugaaccacaccagcagcggcagaaccagccugcccaagugcuggcugaucagcaacggcagcuaccugaacgagacccaguucagcgacgacaucgagcagcaggccgacaacaugaucaccgagaugcugcagaaggaguacaucgagagacagggcaagaccccccugggccugguggacaucuucaucuucagcaccagcuucuaccugaucagcaucuuccugcaccugaucaagauccccacccacagacacaucgugggcaagcccugccccaagccccacagacugaaccacaugggcgugugcagcugcggccuguacaagcaccccggcgugcccaccaaguggaagagaugaggacuagucccuguucccagagcccacuuuuuuuucuuuuuuugaaauaaaauagccugucuuucagaucuaaaaaaaaaaaaaaaaaaaaaaaaaaaaaaaaaaaaaaaaaaaaaaaaaaaaaaaaaaaaaaaaaaaaaaaaaaaaaaaaaaaaaaaaaaaaaaaaaaaa

SEQ ID NO: 35687 - RNA, 1740 nt, Artificial Sequence
  mRNA product Design a-2 (A100) comprising derived and/or modified sequence from LASV(803213;Clade II)__AAF86703__GPCmut9 (opt4)
aggagaguccgcucagccagguugcagaagcggcuuagcguguguccuaaucuucucucugcguguagguaggccugugccgcaaacaagcuuaccaugggccagaucaucaccuucuuccaggaggugccccacgugaucgaggaggugaugaacaucgugcugaucgcccugagccugcuggccauccugaagggcaucuacaacguggccaccugcggccuguucggccugaucagcuuccugcugcugugcggcagaagcugcagcgugaccuacaagggcguguacgagcugcagacccuggagcugaacauggccaaccugaacaugaccaugccccugagcugcaccaagaacaacagccaccacuacaucauggugggcaacgagaccggccuggagcugacccugaccaacaccagcaucaucaaccacaaguucugcaaccugagcgacgcccacaagaagaaccuguacgaccacgcccugaugagcaucaucagcaccuuccaccugagcauccccaacuucaaccaguacgaggccaugagcugcgacuucaacggcggcaagaucagcgugcaguacaaccugagccacagcuucgccguggacgccgccaaccacugcggcaccaucgccaacggcgugcugcagaccuucaugagaauggccuggggcggcagcuacaucgcccuggacagcggcugcggcaacugggacugcaucaugaccagcuaccaguaccugaucauccagaacaccaccugggaggaccacugccaguucagcagacccagccccaucggcuaccugggccugcugagccagagaaccagagacaucuacaucagcagaagacugcugggcaccuucaccuggacccugagcgacagcgagggcaacgaggcccccggcggcuacugccugaccagauggaugcugaucgaggccgagcugaagugcuucggcaacaccgccguggccaagugcaacgagaagcacgacgaggaguucugcgacaugcugagacuguucgacuucaacaagcaggccaucaagagacugaagaccgaggcccagaugagcauccagcugaucaacaaggccgugaacgcccugaucaacgaccagcugaucaugaagaaccaccugagagacaucaugugcauccccuacugcaacuacagcagauacugguaccugaaccacaccgugaccggcaagaccagccugcccagaugcuggcuggugagcaacggcagcuaccugaacgagacccacuucagcgacgacaucgagcagcaggccgacaacaugaucaccgagaugcugcagaaggaguacauggacagacagggcaagaccccccugggccugguggaccuguucguguucagcaccagcuucuaccugaucagcaucuuccugcaccuggugaagauccccacccacagacacaucgugggcaagcccugccccaagccccacagacugaaccacaugggcaucugcagcugcggccuguacaagcaccccggcgugcccgugaaguggaagagaugaggacuagucccuguucccagagcccacuuuuuuuucuuuuuuugaaauaaaauagccugucuuucagaucuaaaaaaaaaaaaaaaaaaaaaaaaaaaaaaaaaaaaaaaaaaaaaaaaaaaaaaaaaaaaaaaaaaaaaaaaaaaaaaaaaaaaaaaaaaaaaaaaaaaa

SEQ ID NO: 35688 - RNA, 1740 nt, Artificial Sequence
  mRNA product Design a-2 (A100) comprising derived and/or modified sequence from LASV(GA391;Clade III)__CAA36645__GPCmut9 (opt4)
aggagaguccgcucagccagguugcagaagcggcuuagcguguguccuaaucuucucucugcguguagguaggccugugccgcaaacaagcuuaccaugggccagaucgugaccuucuuccaggaggugccccacgugaucgaggaggugaugaacaucgugcugaucgcccugagcauccuggccauccugaagggccuguacaacguggccaccugcggccugaucggccuggugaccuuccugcugcugagcggcagaagcugcagccugaucuacaagggcaccuacgagcugcagacccuggagcugaacauggagacccugaacaugaccaugccccugagcugcaccaagaacaacagccaccacuacaucagagugggcaacgagaccggccuggagcugacccugaccaacaccagcauccugaaccacaaguucugcaaccugagcgacgcccacaagagaaaccuguacgaccacagccugaugagcaucaucagcaccuuccaccugagcauccccaacuucaaccaguacgaggccaugagcugcgacuucaacggcggcaagaucaccgugcaguacaaccugagccacagcuucgccguggacgccgccggccacugcggcacccuggccaacggcgugcugcagaccuucaugagaauggccuggggcggcagcuacaucgcccuggacagcggcugcggcaacugggacugcaucaugaccagcuaccaguaccugaucauccagaacaccaccugggacgaccacugccaguucagcagacccagccccaucggcuaccugggccugcugagccagagaaccagagacaucuacaucagcagaagacugcugggcaccuucaccuggacccugagcgacagcgagggcaacgagacccccggcggcuacugccugaccagauggaugcugaucgaggccgagcugaagugcuucggcaacaccgccguggccaagugcaacgagaagcacgacgaggaguucugcgacaugcugagacuguucgacuucaacaagcaggccaucagaagacugaagaccgaggcccagaugagcauccagcugaucaacaaggccgugaacgcccugaucaacgaccagcugaucaugaagaaccaccugagagacaucaugugcauccccuacugcaacuacagcagauacugguaccugaaccacaccagcaccggcaagaccagccugcccagaugcuggcugaucagcaacggcagcuaccugaacgagaccaaguucagcgacgacaucgagcagcaggccgacaacaugaucaccgagaugcugcagaaggaguacaucgacagacagggcaagaccccccugggccugguggaccuguucguguucagcaccagcuucuaccugaucagcaucuuccugcaccuggugaagauccccacccacagacacaucgugggcaagcccugccccaagccccacagacugaaccacaugggcaucugcagcugcggccuguacaagcagcccggcgugcccgugagauggaagagaugaggacuagucccuguucccagagcccacuuuuuuuucuuuuuuugaaauaaaauagccugucuuucagaucuaaaaaaaaaaaaaaaaaaaaaaaaaaaaaaaaaaaaaaaaaaaaaaaaaaaaaaaaaaaaaaaaaaaaaaaaaaaaaaaaaaaaaaaaaaaaaaaaaaaa

SEQ ID NO: 35689 - RNA, 1743 nt, Artificial Sequence
  mRNA product Design a-2 (A100) comprising derived and/or modified sequence from LASV(AV;Clade V)__CCA30314__GPCmut9 (opt4)
aggagaguccgcucagccagguugcagaagcggcuuagcguguguccuaaucuucucucugcguguagguaggccugugccgcaaacaagcuuaccaugggccagaucgugaccuucuuccaggaggugccccacgugaucgaggaggugaugaacaucgugcugaucgcccugagcauccuggccgugcugaagggccuguacaacaucgccaccugcggccugaucggccugaucaccuuccugcugcugugcggcagaagcugcagcagcaaccuguacaagggcguguacgagcugcagagccuggaccugaacauggagacccugaacaugaccaugccccugagcugcaccaagaacaacagccaccacuacaucagagugggcaacgacaccggccuggagcugacccugaccaacaccagcauccugaaccacaaguucugcaaccugagcgacgcccacaagaaggaccuguacgaccacgcccugaugagcaucaucagcaccuuccaccugagcauccccaacuucaaccaguacgaggccaugagcugcgacuucaacggcggcaagaucagcgugcaguacaaccugagccacagcuacgccaucgacgccgccaaccacugcggcaccguggccaacggcauccugcagaccuucaugagaauggccuggggcggcagcuacaucgcccuggacagcggcugcggcaacugggacugcaucaugaccagcuaccaguaccugaucauccagaacaccaccugggagaaccacugccaguucagcagacccagccccaucggcuaccugggccugcugagccagagaaccagagacaucuacaucagcagaagacugcugggcaccuucaccuggacccugagcgacagcgagggcaacgccacccccggcggcuacugccugaccagauggaugcugaucgaggccgagcugaagugcuucggcaacaccgccguggccaagugcaacgagaagcacgacgaggaguucugcgacaugcugagacuguucgacuucaacaagcaggccaucagcagacugaagagcgaggcccagaugagcauccagcugaucaacaaggccgugaacgcccugaucaacgaccagcugaucaugaagaaccaccugagagacaucaugugcauccccuacugcaacuacagcaaguacugguaccugaaccacaccaucaccggcaagaccagccugcccaagugcuggcuggugagcaacggcagcuaccugaacgagacccacuucagcgacgacaucgagcagcaggccgacaacaugaucaccgagaugcugcagaaggaguacauggagagacagggcaagaccccccugggccugguggaccuguucguguucagcaccagcuucuaccugaucagcaucuuccugagacuggugaagauccccacccacagacacaucgugggcaagcccugccccaagccccacagacugaaccacaugggcaucugcagcugcggccuguacaagcagcccggcgugcccgugagauggaagagaugaggacuagucccuguucccagagcccacuuuuuuuucuuuuuuugaaauaaaauagccugucuuucagaucuaaaaaaaaaaaaaaaaaaaaaaaaaaaaaaaaaaaaaaaaaaaaaaaaaaaaaaaaaaaaaaaaaaaaaaaaaaaaaaaaaaaaaaaaaaaaaaaaaaaa

SEQ ID NO: 35690 - RNA, 1740 nt, Artificial Sequence
  mRNA product Design a-2 (A100) comprising derived and/or modified sequence from LASV(Togo/2016/7082;Clade VI)__AMR44577__GPCmut9 (opt4)
aggagaguccgcucagccagguugcagaagcggcuuagcguguguccuaaucuucucucugcguguagguaggccugugccgcaaacaagcuuaccaugggccagaucaucaccuucuuccaggaggugccccacgugaucgaggaggugaugaacaucgugcugaucgcccugagccugcuggccauccugaagggcguguacaacguggccaccugcggcaucaucggccuggugaccuuccuguuccugugcggcagaagcugcagccugaucuacaagggcagcuacgagcugcagacccuggagcugaacauggagacccugaacaugaccaugccccugagcugcaccaagaacagcagccaccacuacaucagagugggcaacgagaccggccuggagcugacccugaccaacaccagcaucaucaaccacaaguucugcaaccugagcgacgcccacaagagaaaccuguacgaccacgcccugaugagcauccugagcaccuuccaccugagcauccccaacuucaaccaguacgaggccaugagcugcgacuucaacggcggcaagaucagcgugcaguacaaccugagccacgccuacgccguggacgccgccgagcacugcggcaccguggccaacggcgugcugcagaccuucaugagaauggccuggggcggcagcuacaucgcccuggacagcggcugcggcaacugggacugcaucaugaccagcuaccaguaccugaucauccagaacaccaccugggaggaccacugccaguucagcagacccagccccaucggcuaccugggccugcugagccagagaaccagagacaucuacaucagcagaagacugcugggcaccuucaccuggacccugagcgacagcgagggcaacgagacccccggcggcuacugccugaccagauggaugcugaucgaggccgagcugaagugcuucggcaacaccgccguggccaagugcaacgagaagcacgacgaggaguucugcgacaugcugagacuguucgacuucaacaagcaggccauccagagacugaagagcgaggcccagaugagcauccagcugaucaacaaggccgugaacgcccugaucaacgaccagcugaucaugaagaaccaccugagagacaugaugugcauccccuacugcaacuacagcaaguacugguaccugaaccacaccagcagcggcagaaccagccugcccaagugcuggcuggugagcaacggcagcuaccugaacgagacccacuucagcgacgacaucgagcagcaggccgacaacaugaucaccgagaugcugcagaaggaguacaucgacagacagggcaagaccccccugggccugguggaccuguucguguucagcaccagcuucuaccugaucagcaucuuccugcaccugaucaagauccccacccacagacacaucgugggcaagcccugccccaagccccacagacugaaccacaugggcaucugcagcugcggccuguacaagcagcccggcgugcccaccagauggaagagaugaggacuagucccuguucccagagcccacuuuuuuuucuuuuuuugaaauaaaauagccugucuuucagaucuaaaaaaaaaaaaaaaaaaaaaaaaaaaaaaaaaaaaaaaaaaaaaaaaaaaaaaaaaaaaaaaaaaaaaaaaaaaaaaaaaaaaaaaaaaaaaaaaaaaa

SEQ ID NO: 35691 - RNA, 1740 nt, Artificial Sequence
  mRNA product Design a-2 (A100) comprising derived and/or modified sequence from LASV(KAK-428;Clade n.d. (VII))__ANH09740__GPCmut9 (opt4)
aggagaguccgcucagccagguugcagaagcggcuuagcguguguccuaaucuucucucugcguguagguaggccugugccgcaaacaagcuuaccaugggccagaucgugaccuucuuccaggaggugccccacgugaucgaggaggugaugaacaucgugcugaucgcccugagccugcuggccauccugaagggccuguacaacuucgccaccugcggcgugaucggccugaucaccuuccugcugcugugcggcagaagcugcagcgccaccuacaagggccaguacgagcugcagacccuggagcugaacauggagagccugaacaugaccaugccccugagcugcaccaagaacaacagccaccacuacaucagagccggcaacaacaccggccuggagcugacccugaccaacaccagcaucaucagccacaaguucugcaaccugagcgacgcccacaagaagaaccuguacgaccacacccugaugagcaucaucaccaccuuccaccugagcauccccaacuucaaccaguacgaggccaugagcugcgacuucaacggcggcaagaucagcauccaguacaaccugagccacagcuacgccggcgacgccgcccagcacugcggcaccguggccaacggcgugcugcagaccuucaugagaauggccuggggcggcagcuaccuggcccuggacagcggcugcagaggcugggacugcaucaucagcagcuaccaguaccugaucauccagaacaccaccugggacgaccacugccaguucagcagacccagccccaucggcuaccugggcuucgugagccagaagaccagagacaucuacaucagcagaagacugcugggcaccuucaccuggacccugagcgacagcgagggccacgacaugcccggcggcuacugccugaccagauggaugcugaucgaggccgaccugaagugcuucggcaacaccgccguggccaagugcaacgagaagcacgacgaggaguucugcgacauguggagacuguucgacuucaacaagcaggccauccagagacugaaggccgaggcccagaugaacauccagcugaucaacaaggccgugaacgcccugaucaacgaccagcugaugaugaagaaccaccugagagacaucaugugcauccccuacugcaacuacagcaaguucugguaccugaacaacaccaccaccggcagaaccagccugcccagaugcuggcugaucagcaacggcagcuaccugaacgagacccacuucagcgacgacaucgagcagcaggccgacaacaugaucaccgagaugcugcagaaggaguacauggacagacagggcaagaccccccugggccugguggaccuguucguguucagcaccagcuucuaccugaucaccaucuuccugcaccuggugaagauccccacccacagacacaucgugggcaagcccugccccaagccccacagacugaaccacaugggcaucugcagcugcggccuguacaagcagcccggcgugcccgugagauggaagagaugaggacuagucccuguucccagagcccacuuuuuuuucuuuuuuugaaauaaaauagccugucuuucagaucuaaaaaaaaaaaaaaaaaaaaaaaaaaaaaaaaaaaaaaaaaaaaaaaaaaaaaaaaaaaaaaaaaaaaaaaaaaaaaaaaaaaaaaaaaaaaaaaaaaaa

SEQ ID NO: 35692 - RNA, 1740 nt, Artificial Sequence; identical to SEQ ID NO: 35686
  mRNA product Design a-2 (A100) comprising derived and/or modified sequence from LASV(Pinneo-NIG-1969;Clade I)__AIT17836__GPCmut9 (opt4)

SEQ ID NO: 35693 - RNA, 1740 nt, Artificial Sequence
  mRNA product Design a-2 (A100) comprising derived and/or modified sequence from LASV(ISTH0009-NIG-2011;Clade II)__AIT17404__GPCmut9 (opt4)
aggagaguccgcucagccagguugcagaagcggcuuagcguguguccuaaucuucucucugcguguagguaggccugugccgcaaacaagcuuaccaugggccagaucaucaccuucuuccaggaggugccccacgugaucgaggaggugaugaacaucgugcugaucgcccugagccugcuggccauccugaagggcaucuacaacguggccaccugcggccuguucggccuggugagcuuccugcugcugugcggcagaagcugcagcaccaccuacaagggcguguacgagcugcagacccuggagcuggacauggccagccugaacaugaccaugccccugagcugcaccaagaacaacagccaccacuacaucauggugggcaacgagaccggccuggagcugacccugaccaacaccagcaucaucaaccacaaguucugcaaccugagcgacgcccacaagaagaaccuguacgaccacgcccugaugagcaucaucagcaccuuccaccugagcauccccaacuucaaccaguacgaggccaugagcugcgacuucaacggcggcaagaucagcgugcaguacaaccugagccacgccuacgccguggacgccgccaaccacugcggcaccaucgccaacggcgugcugcagaccuucaugagaauggccuggggcggcagcuacaucgcccuggacagcggcugcggcagcugggacugcaucaugaccagcuaccaguaccugaucauccagaacaccaccugggaggaccacugccaguucagcagacccagccccaucggcuaccugggccugcugagccagagaaccagagacaucuacaucagcagaagacugcugggcaccuucaccuggacccugagcgacagcgagggcaacgagacccccggcggcuacugccugaccagauggaugcugaucgaggccgagcugaagugcuucggcaacaccgccguggccaagugcaacgagaagcacgacgaggaguucugcgacaugcugagacuguucgacuucaacaagcaggccaucagaagacugaagaccgaggcccagaugagcauccagcugaucaacaaggccgugaacgcccugaucaacgaccagcugaucaugaagaaccaccugagagacaucaugugcauccccuacugcaacuacagcaaguacugguaccugaaccacaccgugaccggcaagaccagccugcccagaugcuggcuggugagcaacggcagcuaccugaacgagacccacuucagcgacgacaucgagcagcaggccgacaacaugaucaccgagcugcugcagaaggaguacauggacagacagggcaagaccccccugggccugguggaccuguucguguucagcaccagcuucuaccugaucagcaucuuccugcaccugaucaagauccccacccacagacacaucaccggcaagcccugccccaagccccacagacugaaccacaugggcaucugcagcugcggccuguacaagcaccccggcgugcccgugaaguggaagagaugaggacuagucccuguucccagagcccacuuuuuuuucuuuuuuugaaauaaaauagccugucuuucagaucuaaaaaaaaaaaaaaaaaaaaaaaaaaaaaaaaaaaaaaaaaaaaaaaaaaaaaaaaaaaaaaaaaaaaaaaaaaaaaaaaaaaaaaaaaaaaaaaaaaaa

SEQ ID NO: 35694 - RNA, 1740 nt, Artificial Sequence
  mRNA product Design a-2 (A100) comprising derived and/or modified sequence from LASV(ISTH2010-NIG-2012;Clade II)__AIT17482__GPCmut9 (opt4)
aggagaguccgcucagccagguugcagaagcggcuuagcguguguccuaaucuucucucugcguguagguaggccugugccgcaaacaagcuuaccaugggccagaucaucaccuucuuccaggaggugccccacgugaucgaggaggugaugaacaucgugcugaucgcccugagccugcuggccauccugaagggcaucuacaacguggccaccugcggccuguucggccuggugagcuuccugcugcugugcggcagaagcugcagcaccaccuacaagggcguguacgagcugcagacccuggagcuggacauggccagccugaacaugaccaugccccugagcugcaccaagaacaacagccaccacuacaucauggugggcaacgagaccggccuggagcugacccugaccaacaccagcaucaucaaccacaaguucugcaaccugagcgacgcccacaagaagaaccuguacgaccacgcccugaugagcaucaucagcaccuuccaccugagcauccccaacuucaaccaguacgaggccaugagcugcgacuucaacggcggcaagaucagcgugcaguacaaccugagccacgccuacgccguggacgccgccaaccacugcggcaccaucgccaacggcgugcugcagaccuucaugagaauggccuggggcggcagcuacaucgcccuggacagcggcugcggcagcugggacugcaucaugaccagcuaccaguaccugaucauccagaacaucaccugggaggaccacugccaguucagcagacccagccccaucggcuaccugggccugcugagccagagaaccagagacaucuacaucagcagaagacugcugggcaccuucaccuggacccugagcgacagcgagggcaacgagacccccggcggcuacugccugaccagauggaugcugaucgaggccgagcugaagugcuucggcaacaccgccguggccaagugcaacgagaagcacgacgaggaguucugcgacaugcugagacuguucgacuucaacaagcaggccaucagaagacugaagaccgaggcccagaugagcauccagcugaucaacaaggccgugaacgcccugaucaacgaccagcugaucaugaagaaccaccugagagacaucaugugcauccccuacugcaacuacagcaaguacugguaccugaaccacaccgugaccggcaagaccagccugcccagaugcuggcuggugagcaacggcagcuaccugaacgagacccacuucagcgacgacaucgagcagcaggccgacaacaugaucaccgagcugcugcagaaggaguacaucgacagacagggcaagaccccccugggccugguggaccuguucguguucagcaccagcuucuaccugaucagcaucuuccugcaccuggugaagauccccacccacagacacguggugggcaagcccugccccaagccccacagacugaaccacaugggcaucugcagcugcggccuguacaagcaccccggcgugcccgugaaguggaagagaugaggacuagucccuguucccagagcccacuuuuuuuucuuuuuuugaaauaaaauagccugucuuucagaucuaaaaaaaaaaaaaaaaaaaaaaaaaaaaaaaaaaaaaaaaaaaaaaaaaaaaaaaaaaaaaaaaaaaaaaaaaaaaaaaaaaaaaaaaaaaaaaaaaaaa

SEQ ID NO: 35695 - RNA, 1740 nt, Artificial Sequence
  mRNA product Design a-2 (A100) comprising derived and/or modified sequence from LASV(Lassa virus/H.sapiens-wt/NGA/2015/ISTH_0543;Clade II)__AVO03639__GPCmut9 (opt4)
aggagaguccgcucagccagguugcagaagcggcuuagcguguguccuaaucuucucucugcguguagguaggccugugccgcaaacaagcuuaccaugggccagaucaucaccuucuuccaggaggugccccacgugaucgaggaggugaugaacaucgugcugaucgcccugagccugcuggccauccugaagggcaucuacaacguggccaccugcggccuguucggccuggugagcuuccugcugcugugcggcagaagcugcagcaccaccuacaagggcguguacgagcugcagacccuggagcuggacauggccaaccugaacaugaccaugccccugagcugcaccaagaacaacagccaccacuacaucauggugggcaacgagaccggccuggagcugacccugaccaacaccagcaucaucaaccacaaguucugcaaccugagcgacgcccacaagaagaaccuguacgaccacgcccugaugagcaucaucagcaccuuccaccugagcauccccaacuucaaccaguacgaggccaugagcugcgacuucaacggcggcaagaucagcgugcaguacaaccugagccacaccuacgccguggacgccgccaaccacugcggcaccaucgccaacggcgugcugcagaccuucaugagaauggccuggggcggcagcuacaucgcccuggacagcggcugcggcagcugggacugcaucaugaccagcuaccaguaccuggugauccagaacaccaccugggaggaccacugccaguucagcagacccagccccaucggcuaccugggccugcugagccagagaaccagagacaucuacaucagcagaagacugcugggcaccuucaccuggacccugagcgacagcgagggcaacgagacccccggcggcuacugccugaccagauggaugcugaucgaggccgagcugaagugcuucggcaacaccgccguggccaagugcaacgagaagcacgacgaggaguucugcgacaugcugagacuguucgacuucaacaagcaggccaucagaagacugaagaccgaggcccagaugagcauccagcugaucaacaaggccgugaacgcccugaucaacgaccagcugaucaugaagaaccaccugagagacaucaugugcauccccuacugcaacuacagcaaguacugguaccugaaccacaccgugaccggcaagaccagccugcccagaugcuggcuggugagcaacggcagcuaccugaacgagacccacuucagcgacgacaucgagcagcaggccgacaacaugaucaccgagcugcugcagaaggaguacaucgacagacagggcaagaccccccugggccugguggaccuguucguguucagcaccagcuucuaccugaucagcaucuuccugcaccuggugaagauccccacccacagacacaucaccggcaagcccugccccaagccccacagacugaaccacaugggcaucugcagcugcggccuguacaagcaccccggcgugcccgugaaguggaagagaugaggacuagucccuguucccagagcccacuuuuuuuucuuuuuuugaaauaaaauagccugucuuucagaucuaaaaaaaaaaaaaaaaaaaaaaaaaaaaaaaaaaaaaaaaaaaaaaaaaaaaaaaaaaaaaaaaaaaaaaaaaaaaaaaaaaaaaaaaaaaaaaaaaaaa

SEQ ID NO: 35696 - RNA, 1740 nt, Artificial Sequence
  mRNA product Design a-2 (A100) comprising derived and/or modified sequence from LASV(Lassa virus/H.sapiens-wt/NGA/2016/ISTH_0009;Clade II)__AVO03571__GPCmut9 (opt4)
aggagaguccgcucagccagguugcagaagcggcuuagcguguguccuaaucuucucucugcguguagguaggccugugccgcaaacaagcuuaccaugggccagaucaucaccuucuuccaggaggugccccacgugaucgaggaggugaugaacaucgugcugaucgcccugagccugcuggccauccugaagggcaucuacaacguggccaccugcggccugcugggccuggugagcuuccugcugcugugcggcagaagcugcagcaccaccuacaagggcguguacgagcugcagacccuggagcuggacauggccagccugaacaugaccaugccccugagcugcaccaagaacaacagccaccacuacaucauggugggcaacgagaccggccuggagcugacccugaccaacaccagcaucaucaaccacaaguucugcaaccugagcgacgcccacaagaagaaccuguacgaccacgcccugaugagcaucaucagcaccuuccaccugagcauccccaacuucaaccaguacgaggccaugagcugcgacuucaacggcggcagaaucagcgugcaguacaaccugagccacagcuacgccguggacgccgccaaccacugcggcaccaucgccaacggcgugcugcagaccuucaugagaauggccuggggcggcagcuacaucgcccuggacagcggcugcggcagcugggacugcaucaugaccagcuaccaguaccugaucauccagaacaccaccugggaggaccacugccaguucagcagacccagccccaucggcuaccugggccugcugagccagagaaccagagacaucuacaucagcagaagacugcugggcaccuucaccuggacccugagcgacagcgagggcaacgagacccccggcggcuacugccugaccagauggaugcugaucgaggccgagcugaagugcuucggcaacaccgccguggccaagugcaacgagaagcacgacgaggaguucugcgacaugcugagacuguucgacuucaacaagcaggccaucagaagacugaagaccgaggcccagaugagcauccagcugaucaacaaggccgugaacgcccugaucaacgaccagcugaucaugaagaaccaccugagagacaucaugugcauccccuacugcaacuacagcaaguacugguaccugaaccacaccgugaccggcaagaccagccugcccagaugcuggcuggugagcaacggcagcuaccugaacgagacccacuucagcgacgacaucgagcagcaggccgacaacaugaucaccgagcugcugcagaaggaguacaucgacagacagggcaagaccccccugggccugguggaccuguucguguucagcaccagcuucuaccugaucagcaucuuccugcaccuggugaagauccccacccacagacacaucaccggcaagcccugccccaagccccacagacugaaccacaugggcaucugcagcugcggccuguacaaccaccccggcgugcccgugaaguggaagagaugaggacuagucccuguucccagagcccacuuuuuuuucuuuuuuugaaauaaaauagccugucuuucagaucuaaaaaaaaaaaaaaaaaaaaaaaaaaaaaaaaaaaaaaaaaaaaaaaaaaaaaaaaaaaaaaaaaaaaaaaaaaaaaaaaaaaaaaaaaaaaaaaaaaaa

SEQ ID NO: 35697 - RNA, 1740 nt, Artificial Sequence
  mRNA product Design a-2 (A100) comprising derived and/or modified sequence from LASV(Lassa virus/H.sapiens-wt/NGA/2016/ISTH_0017;Clade II)__AVO03567__GPCmut9 (opt4)
aggagaguccgcucagccagguugcagaagcggcuuagcguguguccuaaucuucucucugcguguagguaggccugugccgcaaacaagcuuaccaugggccagaucaucaccuucuuccaggaggugccccacgugaucgaggaggugaugaacaucgugcugaucgcccugagccugcuggccauccugaagggcaucuacaacguggccaccugcggccuguucggccuggugagcuuccugcugcugugcggcagaagcugcagcaccaccuacaagggcguguacgagcugcagacccuggagcuggacauggccagccugaacaugaccaugccccugagcugcaccaagaacaacagccaccacuacaucauggugggcaacgagaccggccuggagcugacccugaccaacaccagcaucaucaaccacaaguucugcaaccugagcgacgcccacaagaagaaccuguacgaccacgcccugaugagcaucaucagcaccuuccaccugagcauccccaacuucaaccaguacgaggccaugagcugcgacuucaacggcggcaagaucagcgugcaguacaaccugagccacaccuacgccaucgacgccgccaaccacugcggcaccaucgccaacggcgugcugcagaccuucaugagaauggccuggggcggcagcuacaucgcccuggacagcggcugcggcagcugggacugcaucaugaccagcuaccaguaccugaucauccagaacaccaccugggaggaccacugccaguucagcagacccagccccaucggcuaccugggccugcugagccagagaaccagagacaucuacaucagcagaagacugcugggcaccuucaccuggacccugagcgacagcgagggcaacgagacccccggcggcuacugccugaccagauggaugcugaucgaggccgagcugaagugcuucggcaacaccgccguggccaagugcaacgagaagcacgacgaggaguucugcgacaugcugagacuguucgacuucaacaagcaggccaucagaagacugaagaccgaggcccagaugagcauccagcugaucaacaaggccgugaacgcccugaucaacgaccagcugaucaugaagaaccaccugagagacaucaugugcauccccuacugcaacuacagcaaguacugguaccugaaccacaccgugaccggcaagaccagccugcccagaugcuggcuggugagcaacggcagcuaccugaacgagacccacuucagcgacgacaucgagcagcaggccgacaacaugaucaccgagcugcugcagaaggaguacauggacagacagggcaagaccccccugggccugguggaccuguucguguucagcaccagcuucuaccugaucagcaucuuccugcaccuggugagaauccccacccacagacacgugaucggcaagcccugccccaagccccacagacugaaccacaugggcaucugcagcugcggccuguacaagcaccccggcgugcccgugaaguggaagagaugaggacuagucccuguucccagagcccacuuuuuuuucuuuuuuugaaauaaaauagccugucuuucagaucuaaaaaaaaaaaaaaaaaaaaaaaaaaaaaaaaaaaaaaaaaaaaaaaaaaaaaaaaaaaaaaaaaaaaaaaaaaaaaaaaaaaaaaaaaaaaaaaaaaaa

SEQ ID NO: 35698 - RNA, 1740 nt, Artificial Sequence
  mRNA product Design a-2 (A100) comprising derived and/or modified sequence from LASV(Lassa virus/H.sapiens-wt/NGA/2018/ISTH_0959;Clade II)__AVV65099__GPCmut9 (opt4)
aggagaguccgcucagccagguugcagaagcggcuuagcguguguccuaaucuucucucugcguguagguaggccugugccgcaaacaagcuuaccaugggccagaucaucaccuucuuccaggaggugccccacgugaucgaggaggugaugaacaucgugcugaucgcccugagccugcuggccauccugaagggcaucuacaacguggugaccugcggccuguucggccuggugagcuuccugcugcugugcggcagaagcugcagcaccaccuacaagggcguguacgagcugcagacccuggagcuggacauggccagccugaacaugaccaugccccugagcugcaccaagaacaacagccaccacuacaucauggugggcaacgagaccggccuggagcugacccugaccaacaccagcaucaucaaccacaaguucugcaaccugagcgacgcccacaagaagaaccuguacgaccacgcccugaugagcaucaucagcaccuuccaccugagcauccccaacuucaaccaguacgaggccaugagcugcgacuucaacggcggcaagaucagcgugcaguacaaccugagccacgccuacgccaucgacgccgccaaccacugcggcaccaucgccaacggcgugcugcagaccuucaugagaauggccuggggcggcagcuacaucgcccuggacagcggcugcggcagcugggacugcaucaugaccagcuaccaguaccugaucauccagaacaccaccugggaggaccacugccaguucagcagacccagccccaucggcuaccugggccugcugagccagagaaccagagacaucuacaucagcagaagacugcugggcaccuucaccuggacccugagcgacagcgagggcaacgagacccccggcggcuacugccugaccagauggaugcugaucgaggccgagcugaagugcuucggcaacaccgccguggccaagugcaacgagaagcacgacgaggaguucugcgacaugcugagacuguucgacuucaacaagcaggccaucagaagacugaagaccgaggcccagaugagcauccagcugaucaacaaggccgugaacgcccugaucaacgaccagcugaucaugaagaaccaccugagagacaucaugugcauccccuacugcaacuacagcaaguacugguaccugaaccacaccgugaccggcaagaccagccugcccagaugcuggcuggugagcaacggcagcuaccugaacgagacccacuucagcgacgacaucgagcagcaggccgacaacaugaucaccgagcugcugcagaaggaguacaucgacagacagggcaagaccccccugggccugguggaccuguucguguucagcaccagcuucuaccugaucagcaucuuccugcaccuggugaagauccccacccacagacacgugaucggcaagcccugccccaagccccacagacugaaccacaugggcaucugcagcugcggccuguacaagcaccccggcgugcccgugaaguggaagagaugaggacuagucccuguucccagagcccacuuuuuuuucuuuuuuugaaauaaaauagccugucuuucagaucuaaaaaaaaaaaaaaaaaaaaaaaaaaaaaaaaaaaaaaaaaaaaaaaaaaaaaaaaaaaaaaaaaaaaaaaaaaaaaaaaaaaaaaaaaaaaaaaaaaaa

SEQ ID NO: 35699 - RNA, 1740 nt, Artificial Sequence
  mRNA product Design a-2 (A100) comprising derived and/or modified sequence from LASV(LASV003-NIG-2008;Clade II)__AIT17580__GPCmut9 (opt4)
aggagaguccgcucagccagguugcagaagcggcuuagcguguguccuaaucuucucucugcguguagguaggccugugccgcaaacaagcuuaccaugggccagaucaucaccuucuuccaggaggugccccacgugaucgaggaggugaugaacaucgugcugaucgcccugagccugcuggccauccugaagggcaucuacaacguggccaccugcggccuguucggccuggugagcuuccugcugcugugcggcagaagcugcagcaccaccuacaagggcguguacgagcugcagacccuggagcuggacauggccagccugaacaugaccaugccccugagcugcaccaagaacaacagccaccacuacaucauggugggcaacgagaccggccuggagcugacccugaccaacaccagcaucaucaaccacaaguucugcaaccugagcgacgcccacaagaagaaccuguacgaccacgcccugaugagcaucaucagcaccuuccaccugagcauccccaacuucaaccaguacgaggccaugagcugcgacuucaacggcggcaagaucagcgugcaguacaaccugagccacaccuacgccguggacgccgccaaccacugcggcaccaucgccaacggcgugcugcagaccuucaugagaauggccuggggcggcagcuacaucgcccuggacagcggcugcggcagcugggacugcaucaugaccagcuaccaguaccugaucauccagaacaccaccugggaggaccacugccaguucagcagacccagccccaucggcuaccugggccugcugagccagagaaccagagacaucuacaucagcagaagacugcugggcaccuucaccuggacccugagcgacagcgagagcaacgagacccccggcggcuacugccugaccagauggaugcugaucgaggccgagcugaagugcuucggcaacaccgccguggccaagugcaacgagaagcacgacgaggaguucugcgacaugcugagacuguucgacuucaacaagcaggccaucagaagacugaaggccgaggcccagaugagcauccagcugaucaacaaggccgugaacgcccugaucaacgaccagcugaucaugaagaaccaccugagagacaucaugugcauccccuacugcaacuacagcaaguacugguaccugaaccacaccgugaccggcagaaccagccugcccagaugcuggcuggugagcaacggcagcuaccugaacgagacccacuucagcgacgacaucgagcagcaggccgacaacaugaucaccgagcugcugcagaaggaguacauggacagacagggcaagaccccccugggccugguggaccuguucguguucagcaccagcuucuaccugaucagcaucuuccugcaccuggugaagauccccacccacagacacgugaucggcaagcccugccccaagccccacagacugaaccacaugggcaucugcagcugcggccuguacaagcaccccggcgugcccgugaaguggaagagaugaggacuagucccuguucccagagcccacuuuuuuuucuuuuuuugaaauaaaauagccugucuuucagaucuaaaaaaaaaaaaaaaaaaaaaaaaaaaaaaaaaaaaaaaaaaaaaaaaaaaaaaaaaaaaaaaaaaaaaaaaaaaaaaaaaaaaaaaaaaaaaaaaaaaa

SEQ ID NO: 35700 - RNA, 1740 nt, Artificial Sequence
  mRNA product Design a-2 (A100) comprising derived and/or modified sequence from LASV(LASV035-NIG-2009;Clade II)__AIT17588__GPCmut9 (opt4)
aggagaguccgcucagccagguugcagaagcggcuuagcguguguccuaaucuucucucugcguguagguaggccugugccgcaaacaagcuuaccaugggccagaucaucaccuucuuccaggaggugccccacgugaucgaggaggugaugaacaucgugcugaucgcccugagccugcuggccauccugaagggcaucuacaacguggccaccugcggccuguucggccuggugagcuuccugcugcugugcggcagaagcugcagcaccaccuacaagggcguguacgagcugcagacccuggagcuggacauggccagccugaacaugaccaugccccugagcugcaccaagaacaacagccaccacuacaucauggugggcaacgagaccggccuggagcugacccugaccaacaccagcaucaucaaccacaaguucugcaaccugagcgacgcccacaagaagaaccuguacgaccacgcccugaugagcaucaucagcaccuuccaccugagcauccccaacuucaaccaguacgaggccaugagcugcgacuucaacggcggcaagaucagcgugcaguacaaccugagccacgccuacgccguggacgccgccaaccacugcggcaccaucgccaacggcgugcugcagaccuucaugagaauggccuggggcggcagcuacaucgcccuggacagcggcugcggcagcugggacugcaucaugaccagcuaccaguaccugaucauccagaacaccaccugggaggaccacugccaguucagcagacccagccccaucggcuaccugggccugcugagccagagaaccagagacaucuacaucagcagaagacugcugggcaccuucaccuggacccugagcgacagcgagggcaacgagacccccggcggcuacugccugaccagauggaugcugaucgaggccgagcugaagugcuucggcaacaccgccguggccaagugcaacgagaagcacgacgaggaguucugcgacaugcugagacuguucgacuucaacaagcaggccaucagaagacugaaggccgaggcccagaugagcauccagcugaucaacaaggccgugaacgcccugaucaacgaccagcugaucaugaagaaccaccugagagacaucaugugcauccccuacugcaacuacagcaaguacugguaccugaaccacaccgugaccggcaagaccagccugcccagaugcuggcuggugagcaacggcagcuaccugaacgagacccacuucagcgacgacaucgagcagcaggccgacaacaugaucaccgagcugcugcagaaggaguacaucgacagacagggcaagaccccccugggccugguggaccuguucguguucagcaccagcuucuaccugaucagcaucuuccugcaccuggugaagauccccacccacagacacgugaucggcaagcccugccccaagccccacagacugaaccacaugggcaucugcagcugcggccuguacaagcaccccggcgugcccgugaaguggaagagaugaggacuagucccuguucccagagcccacuuuuuuuucuuuuuuugaaauaaaauagccugucuuucagaucuaaaaaaaaaaaaaaaaaaaaaaaaaaaaaaaaaaaaaaaaaaaaaaaaaaaaaaaaaaaaaaaaaaaaaaaaaaaaaaaaaaaaaaaaaaaaaaaaaaaa

SEQ ID NO: 35701 - RNA, 1740 nt, Artificial Sequence
  mRNA product Design a-2 (A100) comprising derived and/or modified sequence from LASV(LASV1000-NIG-2009;Clade II)__AIT17782__GPCmut9 (opt4)
aggagaguccgcucagccagguugcagaagcggcuuagcguguguccuaaucuucucucugcguguagguaggccugugccgcaaacaagcuuaccaugggccagaucaucaccuucuuccaggaggugccccacgugaucgaggaggugaugaacaucgugcugaucgcccugagccugcuggccauccugaagggcaucuacaacguggccaccugcggccuguucggccuggugagcuuccugcugcugugcggcagaagcugcagcaccaccuacaagggcguguacgagcugcagacccuggagcuggacauggccagccugaacaugaccaugccccugagcugcaccaagaacaacagccaccacuacaucauggugggcaacgagaccggccuggagcugacccugaccaacaccagcaucaucaaccacaaguucugcaaccugagcgacgcccacaagaagaaccuguacgaccacgcccugaugagcaucaucagcaccuuccaccugagcauccccaacuucaaccaguacgaggccaugagcugcgacuucaacggcggcaagaucagcgugcaguacaaccugagccacaccuacgccguggacgccgccaaccacugcggcaccaucgccaacggcgugcugcagaccuucaugagaauggccuggggcggcagcuacaucgcccuggacagcggcugcggcagcugggacugcaucaugaccagcuaccaguaccugaucauccagaacaccaccugggaggaccacugccaguucagcagacccagccccaucggcuaccugggccugcugagccagagaaccagagacaucuacaucagcagaagacugcugggcaccuucaccuggacccugagcgacagcgagggcaacgagacccccggcggcuacugccugaccagauggaugcugaucgaggccgagcugaagugcuucggcaacaccgccguggccaagugcaacgagaagcacgacgaggaguucugcgacaugcugagacuguucgacuucaacaagcaggccaucaagagacugaagaccgaggcccagaugagcauccagcugaucaacaaggccgugaacgcccugaucaacgaccagcugaucaugaagaaccaccugagagacaucaugugcauccccuacugcaacuacagcaaguacugguaccugaaccacaccgugaccggcaagaccagccugcccagaugcuggcuggugagcaacggcagcuaccugaacgagacccacuucagcgacgacaucgagcagcaggccgacaacaugaucaccgagcugcugcagaaggaguacaucgacagacagggcaagaccccccugggccugguggaccuguucguguucagcaccagcuucuaccugaucagcaucuuccugcaccuggugaagauccccacccacagacacguggugggcaagcccugccccaagccccacagacugaaccacaugggcaucugcagcugcggccuguacaagcaccccggcgugcccgugaaguggaagagaugaggacuagucccuguucccagagcccacuuuuuuuucuuuuuuugaaauaaaauagccugucuuucagaucuaaaaaaaaaaaaaaaaaaaaaaaaaaaaaaaaaaaaaaaaaaaaaaaaaaaaaaaaaaaaaaaaaaaaaaaaaaaaaaaaaaaaaaaaaaaaaaaaaaaa

SEQ ID NO: 35702 - RNA, 1740 nt, Artificial Sequence
  mRNA product Design a-2 (A100) comprising derived and/or modified sequence from LASV(LASV221-NIG-2010;Clade II)__AIT17624__GPCmut9 (opt4)
aggagaguccgcucagccagguugcagaagcggcuuagcguguguccuaaucuucucucugcguguagguaggccugugccgcaaacaagcuuaccaugggccagaucaucaccuucuuccaggaggugccccacgugaucgaggaggugaugaacaucgugcugaucgcccugagccugcuggccauccugaagggcaucuacaacguggccaccugcggccuguucggccuggugagcuuccugcugcugugcggcagaagcugcagcaccaccuacaagggcguguacgagcugcagacccuggagcuggacauggccagccugaacaugaccaugccccugagcugcaccaagaacaacagccaccacuacaucauggugggcaacgagaccggccuggagcugacccugaccaacaccagcaucaucaaccacaaguucugcaaccugagcgacgcccacaagaagaaccuguacgaccacgcccugaugagcaucaucagcaccuuccaccugagcauccccaacuucaaccaguacgaggccaugagcugcgacuucaacggcggcaagaucagcgugcaguacaaccugagccacaccuacgccaucgacgccgccaaccacugcggcaccaucgccaacggcgugcugcagaccuucaugagaauggccuggggcggcagcuacaucgcccuggacagcggcugcggcagcugggacugcaucaugaccagcuaccaguaccugaucauccagaacaccaccugggaggaccacugccaguucagcagacccagccccaucggcuaccugggccugcugagccagagaaccagagacaucuacaucagcagaagacugcugggcaccuucaccuggacccugagcgacagcgagggcaacgagacccccggcggcuacugccugaccagauggaugcugaucgaggccgagcugaagugcuucggcaacaccgccguggccaagugcaacgagaagcacgacgaggaguucugcgacaugcugagacuguucgacuucaacaagcaggccaucagaagacugaagaccgaggcccagaugagcauccagcugaucaacaaggccgugaacgcccugaucaacgaccagcugaucaugaagaaccaccugagagacaucaugugcauccccuacugcaacuacagcaaguacugguaccugaaccacaccgugaccggcaagaccagccugcccagaugcuggcuggugagcaacggcagcuaccugaacgagacccacuucagcgacgacaucgagcagcaggccgacaacaugaucaccgagaugcugcagaaggaguacauggacagacagggcaagaccccccugggccugguggaccuguucguguucagcaccagcuucuaccugaucagcaucuuccugcaccuggugaagauccccacccacagacacgugaucggcaagcccugccccaagccccacagacugaaccacaugggcaucugcagcugcggccuguacaagcaccccggcgugcccgugaaguggaagagaugaggacuagucccuguucccagagcccacuuuuuuuucuuuuuuugaaauaaaauagccugucuuucagaucuaaaaaaaaaaaaaaaaaaaaaaaaaaaaaaaaaaaaaaaaaaaaaaaaaaaaaaaaaaaaaaaaaaaaaaaaaaaaaaaaaaaaaaaaaaaaaaaaaaaa

SEQ ID NO: 35703 - RNA, 1740 nt, Artificial Sequence
  mRNA product Design a-2 (A100) comprising derived and/or modified sequence from LASV(LASV237-NIG-2010;Clade II)__AIT17638__GPCmut9 (opt4)
aggagaguccgcucagccagguugcagaagcggcuuagcguguguccuaaucuucucucugcguguagguaggccugugccgcaaacaagcuuaccaugggccagaucaucaccuucuuccaggaggugccccacgugaucgaggaggugaugaacaucgugcugaucgcccugagccugcuggccauccugaagggcaucuacaacguggccaccugcggccuguucggccuggugagcuuccugcugcugugcggcagaagcugcagcaccaccuacaagggcguguacgagcugcagacccuggagcuggacauggccagccugaacaugaccaugccccugagcugcaccaagaacaacagccaccacuacaucauggugggcaacgagaccggccuggagcugacccugaccaacaccagcaucaucaaccacaaguucugcaaccugagcgacgcccacaagaaggaccuguacgaccacgcccugaugagcaucaucagcaccuuccaccugagcauccccaacuucaaccaguacgaggccaugagcugcgacuucaacggcggcaagaucagcgugcaguacaaccugagccacaccuacgccguggacgccgccaaccacugcggcaccaucgccaacggcgugcugcagaccuucaugagaauggccuggggcggcagcuacaucgcccuggacagcggcugcggcagcugggacugcaucaugaccagcuaccaguaccugaucauccagaacaccaccugggaggaccacugccaguucagcagacccagccccaucggcuaccugggccugcugagccagagaaccagagacaucuacaucagcagaagacugcugggcaccuucaccuggacccugagcgacagcgagggcaacgagacccccggcggcuacugccugaccagauggaugcugaucgaggccgagcugaagugcuucggcaacaccgccguggccaagugcaacgagaagcacgacgaggaguucugcgacaugcugagacuguucgacuucaacaagcaggccaucagaagacugaagaccgaggcccagaugagcauccagcugaucaacaaggccgugaacgcccugaucaacgaccagcugaucaugaagaaccaccugagagacaucaugugcauccccuacugcaacuacagcaaguacugguaccugaaccacaccgugaccggcaagaccagccugcccagaugcuggcuggugagcaacggcagcuaccugaacgagacccacuucagcgacgacaucgagcagcaggccgacaacaugaucaccgagcugcugcagaaggaguacauggacagacagggcaagaccccccugggccugguggaccuguucguguucagcaccagcuucuaccugaucagcaucuuccugcaccugaucaagauccccacccacagacacaucaccggcaagcccugccccaagccccacagacugaaccacaugggcaucugcagcugcggccuguacaagcaccccggcgugcccgugaaguggaagagaugaggacuagucccuguucccagagcccacuuuuuuuucuuuuuuugaaauaaaauagccugucuuucagaucuaaaaaaaaaaaaaaaaaaaaaaaaaaaaaaaaaaaaaaaaaaaaaaaaaaaaaaaaaaaaaaaaaaaaaaaaaaaaaaaaaaaaaaaaaaaaaaaaaaaa

SEQ ID NO: 35704 - RNA, 1740 nt, Artificial Sequence
  mRNA product Design a-2 (A100) comprising derived and/or modified sequence from LASV(LASV253-NIG-2011;Clade II)__AIT17670__GPCmut9 (opt4)
aggagaguccgcucagccagguugcagaagcggcuuagcguguguccuaaucuucucucugcguguagguaggccugugccgcaaacaagcuuaccaugggccagaucaucaccuucuuccaggaggugccccacgugaucgaggaggugaugaacaucgugcugaucgcccugagccugcuggccauccugaagggcaucuacaacguggccaccugcggccuguucggccuggugagcuuccugcugcugugcggcagaagcugcagcaccaccuacaagggcguguacgagcugcagacccuggagcuggacauggccagccugaacaugaccaugccccugagcugcaccaagaacaacagccaccacuacaucauggugggcaacgagaccggccuggagcugacccugaccaacaccagcaucaucaaccacaaguucugcaaccugagcgacgcccacaagaagaaccuguacgaccacgcccugaugagcaucaucagcaccuuccaccugagcauccccaacuucaaccaguacgaggccaugagcugcgacuucaacggcggcaagaucagcgugcaguacaaccugagccacaccuacgccguggacgccgccaaccacugcggcaccaucgccaacggcgugcugcagaccuucaugagaauggccuggggcggcagcuacaucgcccuggacagcggcugcggcagcugggacugcaucaugaccagcuaccaguaccugaucauccagaacaccaccugggaggaccacugccaguucagcagacccagccccaucggcuaccugggccugcugagccagagaaccagagacaucuacaucagcagaagacugcugggcaccuucaccuggacccugagcgacagcgagggcaacgagacccccggcggcuacugccugaccagauggaugcugaucgaggccgagcugaagugcuucggcaacaccgccguggccaagugcaacgagaagcacgacgaggaguucugcgacaugcugagacuguucgacuucaacaagcaggccaucagaagacugaaggccgaggcccagaugagcauccagcugaucaacaaggccgugaacgcccugaucaacgaccagcugaucaugaagaaccaccugagagacaucaugugcauccccuacugcaacuacagcaaguacugguaccugaaccacaccgugaccggcagaaccagccugcccagaugcuggcuggugagcaacggcagcuaccugaacgagacccacuucagcgacgacaucgagcagcaggccgacaacaugaucaccgagcugcugcagaaggaguacaucgacagacagggcaagaccccccugggccugguggaccuguucguguucagcaccagcuucuaccugaucagcaucuuccugcaccuggugaagauccccacccacagacacaucaucggcaagcccugccccaagccccacagacugaaccacaugggcaucugcagcugcggccuguacaagcaccccggcgugcccgugaaguggaagagaugaggacuagucccuguucccagagcccacuuuuuuuucuuuuuuugaaauaaaauagccugucuuucagaucuaaaaaaaaaaaaaaaaaaaaaaaaaaaaaaaaaaaaaaaaaaaaaaaaaaaaaaaaaaaaaaaaaaaaaaaaaaaaaaaaaaaaaaaaaaaaaaaaaaaa

SEQ ID NO: 35705 - RNA, 1740 nt, Artificial Sequence
  mRNA product Design a-2 (A100) comprising derived and/or modified sequence from LASV(LASV254-NIG-2011;Clade II)__AIT17674__GPCmut9 (opt4)
aggagaguccgcucagccagguugcagaagcggcuuagcguguguccuaaucuucucucugcguguagguaggccugugccgcaaacaagcuuaccaugggccagaucaucaccuucuuccaggaggugccccacgugaucgaggaggugaugaacaucgugcugaucgcccugagccugcuggccauccugaagggcaucuacaacguggccaccugcggccuguucggccuggugagcuuccugcugcugugcggcagaagcugcagcaccaccuacaagggcguguacgagcugcagacccuggagcuggacaugaccaaccugaacaugaccaugccccugagcugcaccaagaacaacagccaccacuacaucauggugggcaacgagaccggccuggagcugacccugaccaacaccagcaucaucaaccacaaguucugcaaccugagcgacgcccacaagaagaaccuguacaaccacgcccugaugagcaucaucagcaccuuccaccugagcauccccaacuucaaccaguacgaggccaugagcugcgacuucaacggcggcaagaucagcgugcaguacaaccugagccacagcuacgccguggacgccgccaaccacugcggcaccaucgccaacggcgugcugcagaccuucaugagaauggccuggggcggcagcuacaucgcccuggacagcggcugcggcaacugggacugcaucaugaccagcuaccaguaccugaucauccagaacaccaccugggaggaccacugccaguucagcagacccagccccaucggcuaccugggccugcugagccagagaaccagagacaucuacaucagcagaagacugcugggcaccuucaccuggacccugagcgacagcgagggcaacgagacccccggcggcuacugccugaccagauggaugcugaucgaggccgagcugaagugcuucggcaacaccgccguggccaagugcaacgagaagcacgacgaggaguucugcgacaugcugagacuguucgacuucaacaagcaggccaucagaagacugaagaccgaggcccaggccaacauccagcugaucaacaaggccgugaacgcccugaucaacgaccagcugaucaugaagaaccaccugagagacaucaugugcauccccuacugcaacuacagcaaguacugguaccugaaccacaccgugaccggcaagaccagccugcccagaugcuggcuggugagcaacggcagcuaccugaacgagacccacuucagcgacgacaucgagcagcaggccgacaacaugaucaccgagcugcugcagaaggaguacauggacagacagggcaagaccccccugggccugguggaccuguucguguucagcaccagcuucuaccugaucagcaucuuccugcaccuggugaagauccccacccacagacacgugaucggcaagcccugccccaagccccacagacugaaccacaugggcaucugcagcugcggccuguacaagcaccccggcgugcccgugaaguggaagagaugaggacuagucccuguucccagagcccacuuuuuuuucuuuuuuugaaauaaaauagccugucuuucagaucuaaaaaaaaaaaaaaaaaaaaaaaaaaaaaaaaaaaaaaaaaaaaaaaaaaaaaaaaaaaaaaaaaaaaaaaaaaaaaaaaaaaaaaaaaaaaaaaaaaaa

SEQ ID NO: 35706 - RNA, 1740 nt, Artificial Sequence
  mRNA product Design a-2 (A100) comprising derived and/or modified sequence from LASV(Nig08-A19;Clade III)__ADU56618__GPCmut9 (opt4)
aggagaguccgcucagccagguugcagaagcggcuuagcguguguccuaaucuucucucugcguguagguaggccugugccgcaaacaagcuuaccaugggccagaucgugaccuucuuccaggaggugccccacgugaucgaggaggugaugaacaucgugcugaucgcccugagcauccuggccauccugaagggccuguacaacaucgccaccugcggccugaucggccuggugaccuuccugcugcugagcggcagaagcugcagcaugaccuacaagggcguguacgagcugcagacccuggagcugaacaugaacacccugaacaugaccaugccccugagcugcaccaagaacaacagccaccacuacaucauggugggcaacgagaccggccuggagcugacccugaccaacaccagccugcugcaccacaaguucugcaaccugagcgacgcccacaagaagaaccuguacgaccacacccugaugagcaucaucagcaccuuccaccugagcauccccaacuucaaccaguacgaggccaugagcugcgacuucaacggcggcaagaucaccgugcaguacaaccugagccacagcuacgccaucgacgccgccaaccacugcggcaccguggccaacggcgugcugcagaccuucaugagaauggccuggggcggcagcuacaucgcccuggacagcggcugcggcaagugggacugcaucaugaccagcuaccaguaccugaucauccagaacaccaccugggaggaccacugccaguucagcagacccagccccaucggcuaccugggccugcugagccagagaaccagagacaucuacaucagcagaagacugcugggcaccuucaccuggacccugagcgacagcgagggcaacgagacccccggcggcuacugccugaccagauggaugcugaucgaggccgagcugaagugcuucggcaacaccgccguggccaagugcaacgagaagcacgacgaggaguucugcgacaugcugagacuguucgacuucaacaagcaggccaucagaagacugaaggccgaggcccagaugagcauccagcugaucaacaaggccgugaacgcccugaucaacgaccagcugaucaugaagaaccaccugagagacaucaugugcauccccuacugcaacuacagcaaguacugguaccugaaccacaccagcaccggcagaaccagccugcccagaugcuggcuggugagcaacggcagcuaccugaacgagacccacuucagcgacgacaucgagcagcaggccgacaacaugaucaccgagaugcugcagaaggaguaccuggacagacagggcaagaccccccugggccugguggaccuguucguguucagcaccagcuucuaccugaucagcaucuuccugcaccuggugaagauccccacccacagacacaucgugggcaagcccugccccaagccccacagacugaaccacaugggcaucugcagcugcggccuguacaagcagcccggcgugcccgugagauggaagagaugaggacuagucccuguucccagagcccacuuuuuuuucuuuuuuugaaauaaaauagccugucuuucagaucuaaaaaaaaaaaaaaaaaaaaaaaaaaaaaaaaaaaaaaaaaaaaaaaaaaaaaaaaaaaaaaaaaaaaaaaaaaaaaaaaaaaaaaaaaaaaaaaaaaaa

SEQ ID NO: 35707 - RNA, 1743 nt, Artificial Sequence
  mRNA product Design a-2 (A100) comprising derived and/or modified sequence from LASV(G1180-SLE-2010;Clade IV)__AIT17168__GPCmut9 (opt4)
aggagaguccgcucagccagguugcagaagcggcuuagcguguguccuaaucuucucucugcguguagguaggccugugccgcaaacaagcuuaccaugggccagaucgugaccuucuuccaggaggugccccacgugaucgaggaggugaugaacaucgugcugaucgcccugagcauccuggccgugcugaagggccuguacaacuucgccaccugcggccuggugggccugcugaccuuccugcugcugugcggcagaagcugcaccgccagcagauacaagggcguguacgagcugcagacccuggagcugaacauggagacccugaacaugaccaugccccugagcugcaccaagaacaacagccaccacuacaucauggugggcaacgagaccggccuggagcugacccugaccaacaccagcaucaucaaccacaaguucugcaaccugagcgacgcccacaagaagaaccuguacgaccacgcccugaugagcaucaucagcaccuuccaccugagcauccccaacuucaaccaguacgaggccaugagcugcgacuucaacggcggcaagaucagcgugcaguacaaccugagccacagcuacgccggcgacgccgccaaccacugcggcaccguggccaacggcgugcugcagaccuucaugagaauggccuggggcggcagcuacaucgcccuggacagcggcugcggcagcugggacugcaucaugaccagcuaccaguaccugaucauccagaacaccaccugggaggaccacugccaguucagcagacccagccccaucggcuaccugggccugcugagccagagaaccagagacaucuacaucagcagaagacugcugggcaccuucaccuggacccugagcgacagcgagggcaaggacacccccggcggcuacugccugaccagauggaugcugaucgaggccgagcugaagugcuucggcaacaccgccguggccaagugcaacgagaagcacgacgaggaguucugcgacaugcugagacuguucgacuucaacaagcaggccauccagagacugaaggccgaggcccagaugagcauccagcugaucaacaaggccgugaacgcccugaucaacgaccagcugaucaugaagaaccaccugagagacaucaugugcauccccuacugcaacuacagcaaguacugguaccugaaccacaccaccaccggcaagaccagccugcccaagugcuggcuggugagcaacggcagcuaccugaacgagacccacuucagcgacgacaucgagcagcaggccgacaacaugaucaccgagaugcugcagaaggaguacauggagagacagggcaagaccccccugggccugguggaccuguucguguucagcaccagcuucuaccugaucagcaucuuccugcaccuggugaagauccccacccacagacacaucgugggcaagagcugccccaagccccacagacugaaccacaugggcaucugcagcugcggccuguacaagcagcccggcgugcccgugaaguggaagagaugaggacuagucccuguucccagagcccacuuuuuuuucuuuuuuugaaauaaaauagccugucuuucagaucuaaaaaaaaaaaaaaaaaaaaaaaaaaaaaaaaaaaaaaaaaaaaaaaaaaaaaaaaaaaaaaaaaaaaaaaaaaaaaaaaaaaaaaaaaaaaaaaaaaaa

SEQ ID NO: 35708 - RNA, 1743 nt, Artificial Sequence
  mRNA product Design a-2 (A100) comprising derived and/or modified sequence from LASV(G1442-SLE-2011;Clade IV)__AIT17180__GPCmut9 (opt4)
aggagaguccgcucagccagguugcagaagcggcuuagcguguguccuaaucuucucucugcguguagguaggccugugccgcaaacaagcuuaccaugggccagaucgugaccuucuuccaggaggugccccacgugaucgaggaggugaugaacaucgugcugaucgcccugagcauccuggccgugcugaagggccuguacaacguggccaccugcggccugaucggccuggugaccuuccugcugcugugcggcagaagcugcaccaccacccuguacaagggcguguacgagcugcagacccuggagcugaacauggagacccugaacaugaccaugccccugagcugcaccaagaacaacagccaccacuacaucagagugggcaacgagaccggccuggagcugacccugaccaacaccagcaucaucaaccacaaguucugcaaccugagcgacgcccacaagaagaaccuguacgaccacgcccugaugagcaucaucagcaccuuccaccugagcauccccaacuucaaccaguacgaggccaugagcugcgacuucaacggcggcaagaucagcgugcaguacaaccugagccacagcuacgccggcgacgccgccaaccacugcggcaccguggccaacggcgugcugcagaccuucaugagaauggccuggggcggcagcuacaucgcccuggacagcggcugcggcaacugggacugcaucaugaccagcuaccaguaccugaucauccagaacaccaccugggacgaccacugccaguucagcagacccagccccaucggcuaccugggccugcugagccagagaaccagagacguguacaucagcagaagacugcugggcaccuucaccuggacccugagcgacagcgagggcaaggacacccccggcggcuacugccugaccagauggaugcugaucgaggccgagcugaagugcuucggcaacaccgccguggccaagugcaacgagaagcacgacgaggaguucugcgacaugcugagacuguucgacuucaacaagcaggccauccagagacugaaggccgaggcccagaugagcauccagcugaucaacaaggccgugaacgcccugaucaacgaccagcugaucaugaagaaccaccugagagacaucaugugcauccccuacugcaacuacagcaaguacugguaccugaacaacaccgccaccggcaagaccagccugcccaagugcuggcugaucagcaacggcagcuaccugaacgagacccacuucagcgacgacaucgagcaggaggccgacaacaugaucaccgagaugcugcagaaggaguacauggagagacagggcaagaccccccugggccugguggaccuguucguguucagcaccagcuucuaccugaucagcaucuuccugcaccuggugaagauccccacccacagacacaucgugggcaagagcugccccaagccccacagacugaaccacaugggcaucugcagcugcggccuguacaagcagcccggcgugcccgugagauggaagagaugaggacuagucccuguucccagagcccacuuuuuuuucuuuuuuugaaauaaaauagccugucuuucagaucuaaaaaaaaaaaaaaaaaaaaaaaaaaaaaaaaaaaaaaaaaaaaaaaaaaaaaaaaaaaaaaaaaaaaaaaaaaaaaaaaaaaaaaaaaaaaaaaaaaaa

SEQ ID NO: 35709 - RNA, 1743 nt, Artificial Sequence
  mRNA product Design a-2 (A100) comprising derived and/or modified sequence from LASV(G3010-SLE-2013;Clade IV)__AIT17344__GPCmut9 (opt4)
aggagaguccgcucagccagguugcagaagcggcuuagcguguguccuaaucuucucucugcguguagguaggccugugccgcaaacaagcuuaccaugggccagaucgugaccuucuuccaggaggugccccacgugaucgaggaggugaugaacaucgugcugaucgcccugagcauccuggccgugcugaagggccuguacaacuucgccaccugcggccuggugggccuggugaccuuccugcugcugugcggcagaagcugcaccaccagccuguacaagggcguguacgagcugcagacccuggagcugaacauggagacccugaacaugaccaugccccugagcugcaccaagaacaacagccaccacuacaucauggugggcaacgagaccggccuggagcugacccugaccaacaccagcaucaucaaccacaaguucugcaaccugagcgacgcccacaagaagaaccuguacaaccacgcccugaugagcaucaucagcaccuuccaccugagcauccccaacuucaaccaguacgaggccaugagcugcgacuucaacggcggcaagaucagcgugcaguacaaccugagccacagcuacgccggcgacgccgccagccacugcggcaccguggccaacggcgugcugcagaccuucaugagaauggccuggggcggcagcuacaucgcccuggacagcggcugcggcaagugggacugcaucaugaccagcuaccaguaccugaucauccagaacaccaccugggaggaccacugccaguucagcagacccagccccaucggcuaccugggccugcugagccagagaaccagagacaucuacaucagcagaagacugcugggcaccuucaccuggacccugagcgacagcgagggcaaggacacccccggcggcuacugccugaccagauggaugcugaucgaggccgagcugaagugcuucggcaacaccgccguggccaagugcaacgagaagcacgacgaggaguucugcgacaugcugagacuguucgacuucaacaagcaggccauccagagacugaagaccgaggcccagaugagcauccagcugaucaacaaggccgugaacgcccugaucaacgaccagcugaucaugaagaaccaccugagagacaucaugugcauccccuacugcaacuacagcaaguacugguaccugaaccacaccaccaccggcaagaccagccugcccaagugcuggcuggugagcaacggcagcuaccugaacgagacccacuucagcgacgacaucgagcagcaggccgacaacaugaucaccgagaugcugcagaaggaguacauggagagacagggcaagaccccccugggccugguggaccuguucguguucagcaccagcuucuaccugaucagcaucuuccugcaccuggugaagauccccacccacagacacaucgugggcaagagcugccccaagccccacagacugaaccacaugggcaucugcagcugcggccuguacaagcagcccggcgugcccgugagauggaagagaugaggacuagucccuguucccagagcccacuuuuuuuucuuuuuuugaaauaaaauagccugucuuucagaucuaaaaaaaaaaaaaaaaaaaaaaaaaaaaaaaaaaaaaaaaaaaaaaaaaaaaaaaaaaaaaaaaaaaaaaaaaaaaaaaaaaaaaaaaaaaaaaaaaaaa

SEQ ID NO: 35710 - RNA, 1743 nt, Artificial Sequence
  mRNA product Design a-2 (A100) comprising derived and/or modified sequence from LASV(G502-SLE-2009;Clade IV)__AIT17126__GPCmut9 (opt4)
aggagaguccgcucagccagguugcagaagcggcuuagcguguguccuaaucuucucucugcguguagguaggccugugccgcaaacaagcuuaccaugggccagaucgugaccuucuuccaggaggugccccacgugaucgaggaggugaugaacaucgugcugaucgcccugagcauccuggccgugcugaagggccuguacaacuucgccaccugcggccuggugggccugcugaccuuccugcugcugugcggcagaagcugcaccaccggccuguacaagggcguguacgagcugcagacccuggagcugaacauggagacccugaacaugaccaugccccugagcugcaccaagaacaacagccaccacuacaucauggugggcaacgagaccggccuggagcugacccugaccaacaccagcaucaucaaccacaaguucugcaaccugagcgacgcccacaagaagaaccuguacgaccacgcccugaugagcaucaucagcaccuuccaccugagcauccccaacuucaaccaguacgaggccaugagcugcgacuucaacggcggcaagaucagcgugcaguacaaccugagccacagcuacgccggcgacgccgccgaccacugcggcaccguggccaacggcgugcugcagaccuucaugagaauggccuggggcggcagcuacaucgcccuggacagcggcugcggcagaugggacugcaucaugaccagcuaccaguaccugaucauccagaacaccaccugggaggaccacugccaguucagcagacccagccccaucggcuaccugggccugcugagccagagaaccagagacaucuacaucagcagaagacugcugggcaccuucaccuggacccugagcgacagcgagggcaaggacacccccggcggcuacugccugaccagauggaugcugaucgaggccgagcugaagugcuucggcaacaccgccguggccaagugcaacgagaagcacgacgaggaguucugcgacaugcugagacuguucgacuucaacaagcaggccauccagagacugaaggccgaggcccagaugagcauccagcugaucaacaaggccgugaacgcccugaucaacgaccagcuggugaugaagaaccaccugagagacaucaugugcauccccuacugcaacuacagcagauacugguaccugaaccacaccaccaccggcagaaccagccugcccaagugcuggcuggugagcaacggcagcuaccugaacgagacccacuucagcgacgacaucgagcagcaggccgacaacaugaucaccgagaugcugcagaaggaguacauggagagacagggcaagaccccccugggccugguggaccuguucguguucagcaccagcuucuaccugaucagcaucuuccugcaccuggugaagauccccacccacagacacaucgugggcaagagcugccccaagccccacagacugaaccacaugggcaucugcagcugcggccuguacaagcagcccggcgugcccgugaaguggaagagaugaggacuagucccuguucccagagcccacuuuuuuuucuuuuuuugaaauaaaauagccugucuuucagaucuaaaaaaaaaaaaaaaaaaaaaaaaaaaaaaaaaaaaaaaaaaaaaaaaaaaaaaaaaaaaaaaaaaaaaaaaaaaaaaaaaaaaaaaaaaaaaaaaaaaa

SEQ ID NO: 35711 - RNA, 1743 nt, Artificial Sequence
  mRNA product Design a-2 (A100) comprising derived and/or modified sequence from LASV(G733-SLE-2010;Clade IV)__AIT17154__GPCmut9 (opt4)
aggagaguccgcucagccagguugcagaagcggcuuagcguguguccuaaucuucucucugcguguagguaggccugugccgcaaacaagcuuaccaugggccagaucgugaccuucuuccaggaggugccccacgugaucgaggaggugaugaacaucgugcugaucgcccugagcauccuggccgugcugaagggccuguacaacuucgccaccugcggcaucgugggccuggugagcuuccugcugcugugcggcagaagcugcaccaccagccuguacaagggcguguacgagcugcagacccuggagcugaacauggagacccugaacaugaccaugccccugagcugcaccaagaacaacagccaccacuacaucauggugggcaacgagaccggccuggagcugacccugaccaacaccagcaucaucaaccacaaguucugcaaccugagcgacgcccacaagaagaaccuguacgaccacgcccugaugagcaucaucagcaccuuccaccugagcauccccaacuucaaccaguacgaggccaugagcugcgacuucaacggcggcaagaucagcgugcaguacaaccugagccacagcuacgccggcgacgccgccaaccacugcggcaccaucgccaacggcgugcugcagaccuucaugagaauggccuggggcggcagcuacaucgcccuggacagcggcugcgacagaugggacugcaucaugaccagcuaccaguaccugaucauccagaacaccaccugggaggaccacugccaguucagcagacccagccccaucggcuaccugggccugcugagccagagaaccagagacaucuacaucagcagaagacugcugggcaccuucaccuggacccugagcgacagcgagggcaaggacacccccggcggcuacugccugaccagauggaugcugaucgaggccgagcugaagugcuucggcaacaccgccguggccaagugcaacgagaagcacgacgaggaguucugcgacaugcugagacuguucgacuucaacaagcaggccauccagagacugaaggccgaggcccagaugagcauccagcugaucaacaaggccgugaacgcccugaucaacgaccagcugaucaugaagaaccaccugagagacaucaugugcauccccuacugcaacuacagcaaguacugguaccugaaccacaccaccaccggcaagaccagccugcccaagugcuggcuggugagcaacggcagcuaccugaacgagacccacuucagcgacgacaucgagcagcaggccgacaacaugaucaccgagaugcugcagaaggaguacauggagagacagggcaagaccccccugggccugguggaccuguucguguucagcaccagcuucuaccugaucagcaucuuccugcaccuggugaagauccccacccacagacacguggugggcaagagcugccccaagccccacagacugaaccacaugggcaucugcagcugcggccuguacggccagcccggcgugcccgugaaguggaagagaugaggacuagucccuguucccagagcccacuuuuuuuucuuuuuuugaaauaaaauagccugucuuucagaucuaaaaaaaaaaaaaaaaaaaaaaaaaaaaaaaaaaaaaaaaaaaaaaaaaaaaaaaaaaaaaaaaaaaaaaaaaaaaaaaaaaaaaaaaaaaaaaaaaaaa

SEQ ID NO: 35712 - RNA, 1743 nt, Artificial Sequence
  mRNA product Design a-2 (A100) comprising derived and/or modified sequence from MOPV/LASV reassortant(IGS-1;Clade IV)__AFY05576__GPCmut9 (opt4)
aggagaguccgcucagccagguugcagaagcggcuuagcguguguccuaaucuucucucugcguguagguaggccugugccgcaaacaagcuuaccaugggccagaucgugaccuucuuccaggaggugccccacgugaucgaggaggugaugaacaucgugcugaucgcccugagcgugcuggccgugcugaagggccuguacaacuucgccaccugcggccuggugggccuggugaccuuccugcugcugugcggcagaagcugcaccaccagccuguacaagggcguguacgagcugcagacccuggagcugaacauggagacccugaacaugaccaugccccugagcugcaccaagaacaacagccaccacuacaucauggugggcaacgagaccggccuggagcugacccugaccaacaccagcaucaucaaccacaaguucugcaaccugagcgacgcccacaagaagaaccuguacgaccacgcccugaugagcaucaucagcaccuuccaccugagcauccccaacuucaaccaguacgaggccaugagcugcgacuucaacggcggcaagaucagcgugcaguacaaccugagccacagcuacgccggcgacgccgccaaccacugcggcaccguggccaacggcgugcugcagaccuucaugagaauggccuggggcggcagcuacaucgcccuggacagcggcugcggcaacugggacugcaucaugaccagcuaccaguaccugaucauccagaacaccaccugggaggaccacugccaguucagcagacccagccccaucggcuaccugggccugcugagccagagaaccagagacaucuacaucagcagaagacugcugggcaccuucaccuggacccugagcgacagcgagggcgaggacacccccggcggcuacugccugaccagauggaugcugaucgaggccgagcugaagugcuucggcaacaccgccguggccaagugcaacgagaagcacgacgaggaguucugcgacaugcugagacuguucgacuucaacaagcaggccauccagagacugaaggccgaggcccagaugagcauccagcugaucaacaaggccgugaacgcccugaucaacgaccagcugaucaugaagaaccaccugagagacaucaugugcauccccuacugcaacuacagcaaguacugguaccugaaccacaccaccaccggcagaaccagccugcccaagugcuggcuggugagcaacggcagcuaccugaacgagacccacuucagcgacgacaucgagcagcaggccgacaacaugaucaccgagaugcugcagaaggaguacauggagagacagggcaagaccccccugggccugguggaccuguucguguucagcaccagcuucuaccugaucagcaucuuccugcaccuggugaagauccccacccacagacacaucgugggcaagagcugccccaagccccacagacugaaccacaugggcaucugcagcugcggccuguacaagcagcccggcgugcccgugaaguggaagagaugaggacuagucccuguucccagagcccacuuuuuuuucuuuuuuugaaauaaaauagccugucuuucagaucuaaaaaaaaaaaaaaaaaaaaaaaaaaaaaaaaaaaaaaaaaaaaaaaaaaaaaaaaaaaaaaaaaaaaaaaaaaaaaaaaaaaaaaaaaaaaaaaaaaaa

SEQ ID NO: 35713 - RNA, 1743 nt, Artificial Sequence
  mRNA product Design a-2 (A100) comprising derived and/or modified sequence from LASV(LM765-SLE-2012;Clade IV)__AIT17814__GPCmut9 (opt4)
aggagaguccgcucagccagguugcagaagcggcuuagcguguguccuaaucuucucucugcguguagguaggccugugccgcaaacaagcuuaccaugggccagaucgugaccuucuuccaggaggugccccacgugaucgaggaggugaugaacaucgugcugaucgcccugagcauccuggccgugcugaagggccuguacaacuucgccaccugcggccuggugggccuggugaccuuccugcugcugugcggcagaagcugcaccaccagccuguacaagggcguguacgagcugcagacccuggagcugaacauggagacccugaacaugaccaugccccugagcugcaccaagaacaacagccaccacuacaucauggugggcaacgagaccggccuggagcugacccugaccaacaccagcaucaucgaccacaaguucugcaaccugagcgacgcccacagaaagaaccuguacgaccacgcccugaugagcaucaucagcaccuuccaccugagcauccccaacuucaaccaguacgaggccaugagcugcgacuucaacggcggcaagaucagcgugcaguacaaccugagccacagcuacgccaaggacgccgccgaccacugcggcaccguggccaacggcgugcugcagaccuucaugagaauggccuggggcggcagcuacaucgcccuggacagcggcugcggcagaugggacugcaucaugaccagcuaccaguaccugaucauccagaacaccaccugggaggaccacugccaguucagcagacccagccccaucggcuaccugggccugcugagccagagaaccagagacaucuacaucagcagaagacugcugggcaccuucaccuggacccugagcgacagcgagggcaaggacacccccggcggcuacugccugaccagauggaugcugaucgaggccgagcugaagugcuucggcaacaccgccguggccaagugcaacgagaagcacgacgaggaguucugcgacaugcugagacuguucgacuucaacaagcaggccauccagagacugaaggccgaggcccagaugagcauccagcugaucaacaaggccgugaacgcccugaucaacgaccagcugaucaugaagaaccaccugagagacaucaugugcauccccuacugcaacuacagcaaguacugguaccugaaccacaccaccaccggcaagaccagccugcccaagugcuggcuggugagcaacggcagcuaccugaacgagacccacuucagcgacgacaucgagcagcaggccgacaacaugaucaccgagaugcugcagaaggaguacauggagagacagggcaagaccccccugggccugguggaccuguucguguucagcaccagcuucuaccugaucagcaucuuccugcaccuggugaagauccccacccacagacacaucgugggcaagcccugccccaagccccacagacugaaccacaugggcaucugcagcugcggccuguacaagcagcccggcgugcccgugaaguggaagagaugaggacuagucccuguucccagagcccacuuuuuuuucuuuuuuugaaauaaaauagccugucuuucagaucuaaaaaaaaaaaaaaaaaaaaaaaaaaaaaaaaaaaaaaaaaaaaaaaaaaaaaaaaaaaaaaaaaaaaaaaaaaaaaaaaaaaaaaaaaaaaaaaaaaaa

SEQ ID NO: 35714 - RNA, 1743 nt, Artificial Sequence
  mRNA product Design a-2 (A100) comprising derived and/or modified sequence from LASV(LM776-SLE-2012;Clade IV)__AIT17824__GPCmut9 (opt4)
aggagaguccgcucagccagguugcagaagcggcuuagcguguguccuaaucuucucucugcguguagguaggccugugccgcaaacaagcuuaccaugggccagaucgugaccuucuuccaggaggugccccacgugaucgaggaggugaugaacaucgugcugaucgcccugagcauccuggccgugcugaagggccuguacaacuucgccaccugcggccuggugggccuggugaccuuccugcugcugugcggcagaagcugcaccaccagcguguacaagggcguguacgagcugcagacccuggagcugaacauggagacccugaacaugaccaugccccugagcugcaccaagaacaacagccaccacuacaucauggugggcaacgagaccggccuggagcugacccugaccaacaccagcaucaucaaccacaaguucugcaaccugagcgacgcccacaagaagaaccuguacgaccacgcccugaugagcaucaucagcaccuuccaccugagcauccccaacuucaaccaguacgaggccaugagcugcgacuucaacggcggcaagaucagcgugcaguacaaccugagccacagcuacgccggcgacgccgccaaccacugcggcaccguggccaacggcgugcugcagaccuucaugagaauggccuggggcggcagcuacaucgcccuggacagcggcugcggcaagugggacugcaucaugaccagcuaccaguaccugaucauccagaacaccaccugggaggaccacugccaguucagcagacccagccccaucggcuaccugggccugcugagccagagaaccagagacaucuacaucagcagaagacugcugggcaccuucaccuggacccugagcgacagcgagggcaaggacacccccggcggcuacugccugaccagauggaugcugaucgaggccgagcugaagugcuucggcaacaccgccguggccaagugcaacgagaagcacgacgaggaguucugcgacaugcugagacuguucgacuucaacaagcaggccauccagagacugaaggccgaggcccagaugagcauccagcugaucaacaaggccgugaacgcccugaucaacgaccagcugaucaugaagaaccaccugagagacaucaugugcauccccuacugcaacuacagcaaguacugguaccugaaccacaccaccaccggcaagaccagccugcccaagugcuggcuggugagcaacggcagcuaccugaacgagacccacuucagcgacgacaucgagcagcaggccgacaacaugaucaccgagaugcugcagaaggaguacauggagagacagggcaagaccccccugggccugguggaccuguucguguucagcaccagcuucuaccugaucagcaucuuccugcaccuggugaagauccccacccacagacacaucgugggcaagagcugccccaagccccacagacugaaccacaugggcaucugcagcugcggccuguacaagcagcccggcgugcccgugagauggaagagaugaggacuagucccuguucccagagcccacuuuuuuuucuuuuuuugaaauaaaauagccugucuuucagaucuaaaaaaaaaaaaaaaaaaaaaaaaaaaaaaaaaaaaaaaaaaaaaaaaaaaaaaaaaaaaaaaaaaaaaaaaaaaaaaaaaaaaaaaaaaaaaaaaaaaa

SEQ ID NO: 35715 - RNA, 1743 nt, Artificial Sequence
  mRNA product Design a-2 (A100) comprising derived and/or modified sequence from LASV(Mad39;Clade IV)__ANH09722__GPCmut9 (opt4)
aggagaguccgcucagccagguugcagaagcggcuuagcguguguccuaaucuucucucugcguguagguaggccugugccgcaaacaagcuuaccaugggccagaucgugaccuucuuccaggaggugccccacgugaucgaggaggugaugaacaucgugcugaucgcccugagcauccuggccgugcugaagggccuguacaacguggccaccugcggccugaucggccuggugaccuuccugcugcugugcggcagaagcugcaccaccacccuguacaagggcguguacgagcugcaggcccuggagcugaacauggagacccugaacaugaccaugccccugagcugcaccaagaacaacagccaccacuacaucagagugggcaacgagaccggccuggagcugacccugaccaacaccagccugaucaaccacaaguucugcaaccugagcgacgcccacaagaagaaccuguacgaccacgcccugaugagcaucaucagcaccuuccaccugagcauccccaacuucaaccaguacgaggccaugagcugcgacuucaacgacggcaagaucagcgugcaguacaaccugagccacaccuacgccggcgacaccgccaaccacugcggcaccguggccaacggcgugcugcagaccuucaugagaauggccuggggcggcagcuacaucgcccuggacagcggcugcggcggcugggacugcaucaugaccagcuaccaguaccugaucauccagaacaccaccugggaggaccacugccaguucagcagacccagccccaucggcuaccugggccugcugagccagagaaccagagacaucuacaucagcagaagacugcugggcaccuucaccuggacccugagcgacagcgagggcaaggacacccccggcggcuacugccugaccagauggaugcugaucgaggccgagcugaagugcuucggcaacaccgccguggccaagugcaacgagaagcacgacgaggaguucugcgacaugcugagacuguucgacuucaacaagcaggccauccagagacugaaggccgaggcccagaugagcauccagcugaucaacaaggccgugaacgcccugaucaacgaccagcugaucaugaagaaccaccugagagacaucaugugcauccccuacugcaacuacagcaaguacugguaccugaaccacaccgugaccggcaagaccagccugcccaagugcuggcuggugagcaacggcagcuaccugaacgagacccacuucagcgacgacaucgagcagcaggccgacaacaugaucaccgagaugcugcagaaggaguacauggagagacagggcaagaccccccugggccugguggaccuguucguguucagcaccagcuucuaccugaucagcaucuuccugcaccuggugaagauccccacccacagacacguggugggcaagcccugccccaagccccacagacugaaccacaugggcaucugcagcugcggcuucuacaagcagcccggcgugcccgugagauggaagagaugaggacuagucccuguucccagagcccacuuuuuuuucuuuuuuugaaauaaaauagccugucuuucagaucuaaaaaaaaaaaaaaaaaaaaaaaaaaaaaaaaaaaaaaaaaaaaaaaaaaaaaaaaaaaaaaaaaaaaaaaaaaaaaaaaaaaaaaaaaaaaaaaaaaaa

SEQ ID NO: 35716 - RNA, 1743 nt, Artificial Sequence
  mRNA product Design a-2 (A100) comprising derived and/or modified sequence from LASV(Z0947-SLE-2011;Clade IV)__AIT17840__GPCmut9 (opt4)
aggagaguccgcucagccagguugcagaagcggcuuagcguguguccuaaucuucucucugcguguagguaggccugugccgcaaacaagcuuaccaugggccagaucgugaccuucuuccaggaggugccccacgugaucgaggaggugaugaacaucgugcugaucgcccugagcauccuggccgugcugaagggccuguacaacuucgccaccugcggccuggugggccuggugaccuuccugcugcugugcggcagaagcugcaccaucagccuguacaagggcguguacgagcugcagacccuggagcugaacauggagacccugaacaugaccaugccccugagcugcaccaagaacaacagccaccacuacaucauggugggcaacgagaccggccuggagcugacccugaccaacaccagcaucaucaaccacaaguucugcaaccugagcgacgcccacaagaagaaccuguacgaccacgcccugaugagcaucaucagcaccuuccaccugagcauccccaacuucaaccaguacgaggccaugagcugcgacuucaacggcggcaagaucagcgugcaguacaaccugagccacagcuacgccggcgacgccgccaaccacugcggcaccguggccaacggcgugcugcagaccuucaugagaauggccuggggcggcagcuacaucgcccuggacagcggcugcgacagaugggacugcaucaugaccagcuaccaguaccugaucauccagaacaccaccugggaggaccacugccaguucagcagacccagccccaucggcuaccugggccugcugagccagagaaccagagacaucuacaucagcagaagacugcugggcaccuucaccuggacccugagcgacagcgagggcaaggacacccccggcggcuacugccugaccagauggaugcugaucgaggccgagcugaagugcuucggcaacaccgccguggccaagugcaacgagaagcacgacgaggaguucugcgacaugcugagacuguucgacuucaacaagcaggccauccagagacugaaggccgaggcccagaugagcauccagcugaucaacaaggccgugaacgcccugaucaacgaccagcugaucaugaagaaccaccugagagacaucaugugcauccccuacugcaacuacagcaaguacugguaccugaaccacaccaccaccggcaagaccagccugcccaagugcuggcuggugagcaacggcagcuaccugaacgagacccacuucagcgacgacaucgagcagcaggccgacaacaugaucaccgagaugcugcagaaggaguacauggagagacagggcaagaccccccugggccugguggaccuguucguguucagcaccagcuucuaccugaucagcaucuuccugcaccuggugaagauccccacccacagacacaucgugggcaagcccugccccaagccccacagacugaaccacaugggcaucugcagcugcggccuguacaagcagcccggcgugcccgugaaguggaagagaugaggacuagucccuguucccagagcccacuuuuuuuucuuuuuuugaaauaaaauagccugucuuucagaucuaaaaaaaaaaaaaaaaaaaaaaaaaaaaaaaaaaaaaaaaaaaaaaaaaaaaaaaaaaaaaaaaaaaaaaaaaaaaaaaaaaaaaaaaaaaaaaaaaaaa

SEQ ID NO: 35717 - RNA, 1743 nt, Artificial Sequence
  mRNA product Design a-2 (A100) comprising derived and/or modified sequence from LASV(Josiah;Clade IV)__NP_694870__GPCmut9 (opt5)
aggagaguccgcucagccagguugcagaagcggcuuagcguguguccuaaucuucucucugcguguagguaggccugugccgcaaacaagcuuaccaugggccagaucgugaccuucuuucaagaggucccccacguuauugaagaggugaugaacaucgugcugauugcccucagcguccuggcugugcuuaaggggcuguacaauuucgccacaugcggacucguuggccuggugacguuucuucugcucugugggagauccugcaccacaucucuguauaaaggagucuacgaacugcagacccucgagcugaacauggaaacacuuaauaugaccaugccucugagcuguacaaagaacaauucccaucacuauaucauggugggcaacgagaccgggcucgagcugacgcuuaccaauacaucuauuaucaaccauaaauucugcaaucugagcgacgcgcacaagaaaaaccucuacgaucaugcucugauguccaucauuucuaccuuucaccugagcaucccgaauuucaaccaguaugaagccauguccugugacuuuaauggaggcaagauuagcguucaguacaaccucucucacuccuaugccggcgaugcugccaaucauugcgggacaguggcuaacggaguccugcaaaccuucaugcggauggccuggggcgggagcuacaucgcgcuugacucuggauguggcaacugggauugcauuaugacguccuaccaguaucugaucauucagaauacaaccugggaggaccacugucaguuuagccgccccucuccuaucggguaccucggacugcuuucccaaagaacacgggauaucuauauuagccgcagacugcucggcaccuucaccuggacacuguccgacucugaaggcaaggauacgcccgggggauacugccugacccgguggaugcucaucgaggccgagcugaaauguuuuggcaacacagcuguggccaagugcaaugaaaaacaugacgaggaguucugcgauaugcuucgccuguuugacuucaacaagcaggcuauucagagacucaaagccgaagcgcagaugagcauccaacugauuaauaaggccgugaacgcucuuaucaaugaucagcugaucaugaagaaccaccuccgggacauuauguguaucccuuauugcaauuacuccaaauauugguaccugaaccacaccacaaccgggcgcacgagccugcccaaguguuggcucgucucuaauggauccuaccugaacgaaacacauuucagcgacgauauugagcagcaagccgacaauaugaucaccgagaugcuucagaaagaauauauggagagacagggcaagaccccucuggggcucguugaucuguuuguguucucuaccagcuuuuaccugauuuccaucuuccuucaccucgugaaaaucccgacacaucggcacauugucggaaagucuugccccaaaccucaucgccugaaccacaugggcaucuguagcugcggccuguauaagcagcccggggugccuguuaaguggaaaagaugaggacuagucccuguucccagagcccacuuuuuuuucuuuuuuugaaauaaaauagccugucuuucagaucuaaaaaaaaaaaaaaaaaaaaaaaaaaaaaaaaaaaaaaaaaaaaaaaaaaaaaaaaaaaaaaaaaaaaaaaaaaaaaaaaaaaaaaaaaaaaaaaaaaaa

SEQ ID NO: 35718 - RNA, 1740 nt, Artificial Sequence
  mRNA product Design a-2 (A100) comprising derived and/or modified sequence from LASV(LP;Clade I)__AAF86701__GPCmut9 (opt5)
aggagaguccgcucagccagguugcagaagcggcuuagcguguguccuaaucuucucucugcguguagguaggccugugccgcaaacaagcuuaccaugggccagaucauuaccuucuuucaagaggugccccacgucaucgaagagguuaugaacauugugcugaucgcccucagccugcuugcuauucugaaggggcucuacaauaucgccacaugcggaaucauuggccugguggcguuccuuuuucugugugggaaauccugcucucucacgcugaagggaggcuaugaacugcagacccucgagcugaacauggaaacacuuaauaugaccaugccucugagcuguaccaaaaacuccucucaucacuacaucagagucgggaaugagacaggacucgagcugacacuuaccaacacgagcauuaucaaucauaaguucugcaaccuguccgacgcucacaaaaagaaucucuaugaucaugcccugaugucuauuaucagcaccuuucaccuguccauuccgaacuucaaucaguacgaagccaugagcugugacuuuaacggcggcaagaucucugugcaguauaaucucucccacagcuacgcuggggaugccgcugagcauugcggaacaguugccaacggcgugcugcaaaccuucaugcggauggcguggggagggcgcuauaucgcccuugacucuggcugugggaauugggauugcauuaugacauccuaccaguaccugaucauucagaacaccacgugggaagaccacugucaguuuagcagacccucuccuaucggauaucucggccugcuuucccaacggacacgcgauauuuacaucagcagacggcugcucggcaccuucacauggacccuguccgacucugaggggaacgagacccccggaggcuauugccugacacgcuggaugcucaucgaagcugagcugaaauguuuugggaauacggccgucgcuaagugcaacgaaaaacaugaugaggaguucugcgacaugcuuagacuguuugauuucaauaagcaggccauucggcgccucaaagcggaagcccagaugagcauccagcugauuaacaaggcugugaaugcccuuaucaacgaccaacugauuaugaagaaucaccucagagauaucauguguaucccuuacugcaacuauuccaaauacugguaucugaaucacaccagcucuggacggacaucccugcccaaguguuggcucauuagcaacggcucuuaccugaaugagacccaguucagcgacgacaucgaacagcaagcugauaacaugauuacagagaugcuucagaaagaauacaucgagcgccaggggaagaccccucugggacucguugacauuuuuaucuucuccacgucuuuuuaucugauuagcaucuuccugcaucuuaucaaaauuccgacacacagacauaucgugggcaagcccugcccuaaaccccaccggcucaaucauaugggcgucuguuccugcgggcuguacaagcacccuggagugcccaccaaguggaaacgcugaggacuagucccuguucccagagcccacuuuuuuuucuuuuuuugaaauaaaauagccugucuuucagaucuaaaaaaaaaaaaaaaaaaaaaaaaaaaaaaaaaaaaaaaaaaaaaaaaaaaaaaaaaaaaaaaaaaaaaaaaaaaaaaaaaaaaaaaaaaaaaaaaaaaa

SEQ ID NO: 35719 - RNA, 1740 nt, Artificial Sequence
  mRNA product Design a-2 (A100) comprising derived and/or modified sequence from LASV(803213;Clade II)__AAF86703__GPCmut9 (opt5)
aggagaguccgcucagccagguugcagaagcggcuuagcguguguccuaaucuucucucugcguguagguaggccugugccgcaaacaagcuuaccaugggccagaucauuaccuucuuucaagaggugccccacgucaucgaagagguuaugaacauugugcugaucgcccucagccugcuugcuauucugaaggggaucuacaauguggccacaugcggacucuucggccugaucuccuuucuucugcucugugggagaucuugcagcgucacguauaaaggaguguacgaacugcagacccuggagcucaacauggcgaaucugaacaugacaaugccucuuuccuguaccaagaauaacucucaucacuauauuaugguuggcaaugaaacagggcuggagcucacccugacaaacaccagcaucauuaaucauaaauucugcaaccuuuccgacgcucacaagaaaaaucuguacgaucaugcccucaugucuaucauuagcacguuucaccuguccaucccgaacuucaaucaguaugaggccaugagcugugacuuuaacggaggcaagauuucugugcaguacaaucugucccacagcuucgcugucgaugccgcuaaccauugcggcaccaucgccaacggggugcuccaaacauuuaugcggauggcguggggaggcucuuauaucgcccuggacuccggguguggaaauugggauugcauuaugaccagcuaccaguaccuuaucauucagaacacaaccugggaagaccacugucaguucucucgccccuccccuaucggcuaucuggggcuccugagccaaagaacgcgggauauuuacaucucccgcagacuucugggaacauuuaccuggacacucucugacagcgagggcaaugaagcucccggcggguauugccugacccgguggaugcugaucgaggccgagcucaaguguuucggaaacaccgcuguugccaaaugcaaugaaaagcaugaugaggaauuuugcgacaugcugcgccuuuucgauuucaacaaacaggcgauuaagagacugaaaacagaggcccagauguccauccagcucauuaauaaggcugugaacgcccugaucaaugaccaacuuauuaugaagaaccaucugcgggauaucauguguaucccuuacugcaauuauagccgcuacugguaucucaaccacacggucaccggcaaaacaucucugcccagauguuggcugguguccaaugggagcuaccucaacgaaacccacuuuucugacgacauugagcagcaggcugauaauaugaucacagagaugcugcaaaaggaauacauggaccggcagggaaaaaccccucuuggccugguggaucucuucgucuuuagcacguccuucuaucugauuucuaucuuucugcaccuuguuaagauuccgacacaucgccacaucguggggaaacccugcccuaagccccauagacucaaccacaugggaauuuguagcugcggccuguacaaacacccuggcgugcccgucaaguggaagcggugaggacuagucccuguucccagagcccacuuuuuuuucuuuuuuugaaauaaaauagccugucuuucagaucuaaaaaaaaaaaaaaaaaaaaaaaaaaaaaaaaaaaaaaaaaaaaaaaaaaaaaaaaaaaaaaaaaaaaaaaaaaaaaaaaaaaaaaaaaaaaaaaaaaaa

SEQ ID NO: 35720 - RNA, 1740 nt, Artificial Sequence
  mRNA product Design a-2 (A100) comprising derived and/or modified sequence from LASV(GA391;Clade III)__CAA36645__GPCmut9 (opt5)
aggagaguccgcucagccagguugcagaagcggcuuagcguguguccuaaucuucucucugcguguagguaggccugugccgcaaacaagcuuaccaugggccagaucgugaccuucuuucaagaggucccccacguuauugaagaggugaugaacaucgugcugauugcccucagcauccuggcuauucuuaaggggcuguacaaugucgccacaugcggacucaucggccuggugacguuccuucugcucuccgggagaucuuguagccugaucuauaaaggaaccuacgaacugcagacacucgagcugaacauggaaacccuuaauaugacaaugccucuguccugcaccaagaacaauucucaucacuauauucggguuggcaacgagacagggcucgagcugacccuuacgaauaccagcauccugaaccauaaauuuuguaaucucuccgacgcgcacaagcgcaaccuguacgaucauucucugaugagcauuaucuccacauuccaccucagcauuccgaauuuuaaccaguaugaagcuaugucuugcgacuucaauggaggcaaaaucaccgugcaguacaaccugucccacagcuuugccgucgaugccgcuggccauugugggacacuugccaauggagugcugcaaaccuucaugagaauggcuuggggcgggucuuauauugcccucgacuccggaugcggcaacugggauuguaucaugacgagcuaccaguaccugaucauucagaacacaaccugggacgaucacugccaguuuucucggcccuccccuaucggguaucuuggacugcucagccaacgcacaagagacauuuacaucucccggcgccugcugggcaccuucaccuggacacucucugauagcgagggcaaugaaacgcccgggggauauugucugaccagauggaugcuuauugaggcggagcugaagugcuuuggcaacacagccguugcuaaguguaaugaaaaacaugacgaggaguucugcgauaugcuccggcuguuugacuucaacaagcaggccauccgcagacuuaaaaccgaagcucagauguccauccagcugauuaauaaggccgugaacgcgcucaucaaugaucaacugauuaugaaaaaccaucugcgggacaucaugugcauuccuuacuguaauuauagccgcuacugguaucucaaccacacaucuaccgggaagacgucccugcccagaugcuggcuuaucagcaauggaucuuaccugaacgaaacaaaguucagcgacgauaucgagcagcaggccgacaauaugauuaccgagaugcuccaaaaagaauacaucgaucggcagggcaagaccccucuggggcuggucgaccuuuuuguguucuccacaucuuuuuaucucauuagcaucuuccugcaccuggugaaaauuccgacccaccgccauaucgucggaaagcccuguccuaaaccccacagacucaaccauaugggcauuugcuccuguggccuguacaagcagccugggguucccgugcgguggaaaagaugaggacuagucccuguucccagagcccacuuuuuuuucuuuuuuugaaauaaaauagccugucuuucagaucuaaaaaaaaaaaaaaaaaaaaaaaaaaaaaaaaaaaaaaaaaaaaaaaaaaaaaaaaaaaaaaaaaaaaaaaaaaaaaaaaaaaaaaaaaaaaaaaaaaaa

SEQ ID NO: 35721 - RNA, 1743 nt, Artificial Sequence
  mRNA product Design a-2 (A100) comprising derived and/or modified sequence from LASV(AV;Clade V)__CCA30314__GPCmut9 (opt5)
aggagaguccgcucagccagguugcagaagcggcuuagcguguguccuaaucuucucucugcguguagguaggccugugccgcaaacaagcuuaccaugggccagaucgugaccuucuuucaagaggucccccacguuauugaagaggugaugaacaucgugcugauugcccucagcauccuggcuguccuuaaggggcuguacaauauugccacaugcggacucaucggccugaucacguuccuucugcucugugggagauccugcucuagcaaccuguauaaaggaguguacgaacugcagucccucgaccugaauauggagacccuuaacaugacaaugccucugucuuguaccaagaauaacagccaucacuauauucggguuggcaaugauacagggcucgaacugacccuuacaaacaccuccauccugaaucauaaauuuugcaaccucucugacgcgcacaagaaagaucuguacgaccaugcucugaugagcauuaucuccacguuccaccucagcauuccgaauuuuaaccaguaugaggccaugucuugugauuucaauggaggcaagaucuccgugcaguacaaccugagccacucuuaugccauugacgcugccaaucauugcggcaccgucgcuaacgggauccuucaaacauuuaugcgcauggccuggggaggcuccuacaucgcgcuggauagcggguguggaaacugggacugcauuaugaccucuuaccaguaucucaucauucagaauacaaccugggagaaccacugucaguucuccagacccagcccuaucggcuaccuggggcuucugucccaacggacgcgcgauauuuauaucucuagacggcuccugggaacauuuaccuggacacugagcgacuccgaaggcaaugccacccccggcggguacugccucacccgcuggaugcugaucgaggcugaacuuaaguguuucggaaacacagccguggcuaaaugcaaugagaagcaugaugaggaauuuugcgacaugcugagacucuucgauuuuaacaaacaggccauuagccggcugaagucugaggcgcagauguccauccagcuuauuaauaaagccguuaacgcucugaucaaugaccaacucauuaugaagaaccaucugcgcgacaucauguguaucccuuauugcaauuacagcaaguauugguaccugaaccacacgauuaccggcaaaacaucucuccccaaguguuggcuggugagcaauggguccuaccuuaacgaaacccacuucucugaugacaucgagcagcaggccgauaauaugauuacagaaaugcugcaaaaagaguauauggagagacagggaaagaccccucucggccuggucgaccuguucguguuuagcacguccuucuaccuuaucagcauuuuucuccggcuggugaaaaucccgacacaccgccauauugucgggaagcccugcccuaaaccccacagacugaaccauaugggaaucuguucuugcggccucuauaagcagccuggcguucccgugcgguggaagcgcugaggacuagucccuguucccagagcccacuuuuuuuucuuuuuuugaaauaaaauagccugucuuucagaucuaaaaaaaaaaaaaaaaaaaaaaaaaaaaaaaaaaaaaaaaaaaaaaaaaaaaaaaaaaaaaaaaaaaaaaaaaaaaaaaaaaaaaaaaaaaaaaaaaaaa

SEQ ID NO: 35722 - RNA, 1740 nt, Artificial Sequence
  mRNA product Design a-2 (A100) comprising derived and/or modified sequence from LASV(Togo/2016/7082;Clade VI)__AMR44577__GPCmut9 (opt5)
aggagaguccgcucagccagguugcagaagcggcuuagcguguguccuaaucuucucucugcguguagguaggccugugccgcaaacaagcuuaccaugggccagaucauuaccuucuuucaagaggugccccacgucaucgaagagguuaugaacauugugcugaucgcccucagccugcuugcuauucugaaggggguguacaaugucgccacaugcggaaucaucggccucgugacguuccuguuucuuugugggagauccugcucucugauuuauaaaggaagcuacgaacuccagacccuggagcugaacauggaaacacucaauaugaccaugccucuguccuguacaaagaacucuagccaucacuauauccggguuggcaaugagaccgggcuugagcugacacucaccaacacguccauuaucaaucauaaauucugcaaccugucugacgcgcacaagcgcaaucuuuacgaucaugcucugaugagcauucucuccaccuuucaccugagcaucccgaacuucaaucaguaugaagccaugucuugugacuuuaacggaggcaaaauuuccgugcaguacaaucugagccacgccuaugcugucgaugccgcugagcauugcggcacaguggccaacgggguucuccaaaccuucaugagaauggcguggggaggcucuuacaucgcccuggacuccggguguggaaauugggauugcaucaugacaagcuaccaguaucuuauuauccagaacaccacgugggaagaccacugucaguuuucucggcccuccccuauuggcuaccuggggcuccugagccaacgcacaagagauaucuauauuucccggcgccuucugggaaccuucacauggacccucucugacagcgagggcaacgagacccccggcggguacugccugacaagauggaugcugaucgaagcugagcucaaguguuuuggaaauacggccguggcuaagugcaacgaaaaacaugaugaggaguucugcgacaugcugcggcuuuuugauuucaauaagcaggccauccagcgccugaaauccgaagcgcagaugagcauucaacucaucaacaaggccgucaaugcucugauuaacgaccagcuuaucaugaaaaaucaccugagagauaugauguguauuccuuauugcaacuacucuaaguauugguaccucaaucacaccuccagcggccggacaucucugcccaaguguuggcuggugagcaacggguccuaccucaaugagacccauuucucugacgacaucgaacagcaagccgauaacaugaucacagagaugcugcagaaagaauauauugaccgccagggaaagaccccucuuggccugguggaucucuuugucuucagcacguccuuuuaccugaucagcauuuuccugcaccuuaucaaaauuccgacacauagacacaucguugggaagcccugcccuaaaccccaucggcucaaucacaugggaauuuguucuugcggccuguauaagcagccuggcgugcccacccgcuggaaaagaugaggacuagucccuguucccagagcccacuuuuuuuucuuuuuuugaaauaaaauagccugucuuucagaucuaaaaaaaaaaaaaaaaaaaaaaaaaaaaaaaaaaaaaaaaaaaaaaaaaaaaaaaaaaaaaaaaaaaaaaaaaaaaaaaaaaaaaaaaaaaaaaaaaaaa

SEQ ID NO: 35723 - RNA, 1740 nt, Artificial Sequence
  mRNA product Design a-2 (A100) comprising derived and/or modified sequence from LASV(KAK-428;Clade n.d. (VII))__ANH09740__GPCmut9 (opt5)
aggagaguccgcucagccagguugcagaagcggcuuagcguguguccuaaucuucucucugcguguagguaggccugugccgcaaacaagcuuaccaugggccagaucgugaccuucuuucaagaggucccccacguuauugaagaggugaugaacaucgugcugauugcccucagccugcuugcuauccugaaggggcucuacaauuucgccacaugcggagucauuggccugaucacguuucuucugcucugugggagauccugcucugcgaccuauaaaggacaguacgaacugcagacacuggagcucaacauggaaagccugaauaugaccaugccucuuuccuguacaaagaacaauucucaucacuauauccgggcuggcaacaauaccgggcuggagcucacacugaccaacacgagcauuaucucccauaaauucugcaaucuuucugacgcccacaagaaaaaccuguacgaucauacccucaugagcauuaucacaaccuuucaccuguccauuccgaauuucaaccaguaugaggccaugagcugugacuuuaauggaggcaagaucucuauucaauacaaccugucccacagcuaugcuggcgaugccgcucagcauugcgggacaguggccaauggaguucuccagaccuucaugcgcauggcguggggcgggucuuaccuggcccuugacuccggauguagaggcugggauugcaucaucagcucuuaccaguaucugauuauccaaaacacgacaugggacgaucacugucaguuuucccggcccagcccuauuggguaccucggauucgugucccagaagacccgcgacaucuauauuucuagacggcugcuuggcacauuuaccuggacccugagcgauuccgaaggccaugacaugcccgggggauacugccucacacgcuggaugcugaucgaggcugaucugaaauguuucggcaacacggccgucgcuaagugcaaugaaaaacacgacgaggaguuuugcgauauguggagacucuucgacuucaacaagcaggccauccaacggcugaaagcggaagcccagaugaauauucagcuuaucaacaaggcugugaaugcccugauuaacgaccaacucaugaugaagaaucaucugcgcgauaucauguguauuccuuauugcaacuacagcaaauuuugguaucuuaauaacaccacaaccgggagaacaucucugccccgguguuggcucaucuccaauggaagcuaccugaacgagacccacuucucugacgauaucgaacagcaggcugacaauaugauuacggagaugcugcagaaggaauacauggaucgccaaggcaaaacaccucucgggcugguugaccuuuuuguguucagcaccuccuuuuaucugaucaccauuuuccuccaccuggucaagaucccgacacauagacacauugugggaaaacccugcccuaagccccaucggcugaaccacaugggcaucuguucuugcggccuuuacaaacagccuggggugcccguccgcuggaagagaugaggacuagucccuguucccagagcccacuuuuuuuucuuuuuuugaaauaaaauagccugucuuucagaucuaaaaaaaaaaaaaaaaaaaaaaaaaaaaaaaaaaaaaaaaaaaaaaaaaaaaaaaaaaaaaaaaaaaaaaaaaaaaaaaaaaaaaaaaaaaaaaaaaaaa

SEQ ID NO: 35724 - RNA, 1740 nt, Artificial Sequence; identical to SEQ ID NO: 35718
  mRNA product Design a-2 (A100) comprising derived and/or modified sequence from LASV(Pinneo-NIG-1969;Clade I)__AIT17836__GPCmut9 (opt5)

SEQ ID NO: 35725 - RNA, 1740 nt, Artificial Sequence
  mRNA product Design a-2 (A100) comprising derived and/or modified sequence from LASV(ISTH0009-NIG-2011;Clade II)__AIT17404__GPCmut9 (opt5)
aggagaguccgcucagccagguugcagaagcggcuuagcguguguccuaaucuucucucugcguguagguaggccugugccgcaaacaagcuuaccaugggccagaucauuaccuucuuucaagaggugccccacgucaucgaagagguuaugaacauugugcugaucgcccucagccugcuugcuauucugaaggggaucuacaauguggccacaugcggacucuucggccuggucuccuuucuucugcucugugggagaucuugcagcacgaccuauaaaggaguguacgaacugcagacacuggagcucgacauggcgucccugaacaugaccaugccucuuucuuguacaaagaauaacagccaucacuauaucaugguuggcaaugaaaccgggcuggagcucacacugaccaacacguccauuaucaaucauaaauucugcaaccuuucugaugcucacaagaaaaaucuguacgaccaugcccucaugagcauuaucuccaccuuucaccugagcauuccgaacuucaaucaguaugaggccaugucuugugauuuuaacggaggcaagaucuccgugcaguacaaucugagccacgcuuaugccgucgacgcugccaaccauugcggcacaauugcgaauggggugcuccaaaccuucaugcggauggccuggggaggcucuuacaucgcucuggauuccggguguggaagcugggacugcaucaugacaucuuaccaguaucuuauuauccagaacaccacgugggaagaucacugucaguuuucccgccccagcccuauuggcuaccuggggcuccugucccaaagaacacgggacaucuauauuucucgcagacuucugggaaccuucacauggacccucagcgauuccgagggcaacgaaacccccggcggguacugccugacacgguggaugcugaucgaggccgagcucaaguguuuuggaaauacggcuguugccaaaugcaacgaaaagcaugacgaggaguucugcgauaugcugcgccuuuuugacuucaauaaacaggcgaucagacggcugaagaccgaagcccagaugagcauucagcucaucaacaaagcugugaaugcccugauuaacgaucaacuuaucaugaagaaucaucugcgcgacauuauguguaucccuuauugcaacuacucuaaguauugguaccucaaucacacagucaccggcaaaacaucccugcccagauguuggcuggugagcaacgggucuuaccucaaugaaacccacuucagcgacgauaucgagcagcaggcugacaacaugauuacggagcugcuucaaaaggaauauauggaucggcagggaaaaacaccucugggccucguggaccuguuugucuucuccaccucuuuuuaccugaucagcauuuuccuucaccucaucaagauuccgacccaucgccacaucacagggaaacccugcccuaagccccauagacugaaucacaugggaauuuguuccugcggccuguauaaacacccuggcguucccgugaaguggaagcggugaggacuagucccuguucccagagcccacuuuuuuuucuuuuuuugaaauaaaauagccugucuuucagaucuaaaaaaaaaaaaaaaaaaaaaaaaaaaaaaaaaaaaaaaaaaaaaaaaaaaaaaaaaaaaaaaaaaaaaaaaaaaaaaaaaaaaaaaaaaaaaaaaaaaa

SEQ ID NO: 35726 - RNA, 1740 nt, Artificial Sequence
  mRNA product Design a-2 (A100) comprising derived and/or modified sequence from LASV(ISTH2010-NIG-2012;Clade II)__AIT17482__GPCmut9 (opt5)
aggagaguccgcucagccagguugcagaagcggcuuagcguguguccuaaucuucucucugcguguagguaggccugugccgcaaacaagcuuaccaugggccagaucauuaccuucuuucaagaggugccccacgucaucgaagagguuaugaacauugugcugaucgcccucagccugcuugcuauucugaaggggaucuacaauguggccacaugcggacucuucggccuggucuccuuucuucugcucugugggagaucuugcagcacgaccuauaaaggaguguacgaacugcagacacuggagcucgacauggcgucccugaacaugaccaugccucuuucuuguacaaagaauaacagccaucacuauaucaugguuggcaaugaaaccgggcuggagcucacacugaccaacacguccauuaucaaucauaaauucugcaaccuuucugaugcucacaagaaaaaucuguacgaccaugcccucaugagcauuaucuccaccuuucaccugagcauuccgaacuucaaucaguaugaggccaugucuugugauuuuaacggaggcaagaucuccgugcaguacaaucugagccacgcuuaugccgucgacgcugccaaccauugcggcacaauugcgaauggggugcuccaaaccuucaugcggauggccuggggaggcucuuacaucgcucuggauuccggguguggaagcugggacugcaucaugacaucuuaccaguaucuuauuauccagaacauuaccugggaagaucacugucaguuuucccgccccagcccuaucggcuaccuggggcuccugucccaaagaacgcgggacauuuauaucucucgcagacuucugggaacauucaccuggacacucagcgauuccgagggcaacgaaacccccggcggguacugccugacccgguggaugcugaucgaggccgagcucaaguguuuuggaaauacagcuguugccaaaugcaacgaaaagcaugacgaggaguucugcgauaugcugcgccuuuuugacuucaauaaacaggcgauuagacggcugaagacggaagcccagaugagcauccagcucauuaacaaagcugugaaugcccugaucaacgaucaacuuauuaugaagaaucaucugcgcgacaucauguguaucccuuauugcaacuacucuaaguauugguaccucaaucacaccgucacaggcaaaaccucccugcccagauguuggcuggugagcaacgggucuuaccucaaugaaacacacuucagcgacgauauugagcagcaggcugacaacaugaucaccgagcugcuucaaaaggaauauauugaucggcagggaaaaacgccucugggccucguggaccuguuugucuucuccacaucuuuuuaccugaucagcauuuuccuucaccucguuaagaucccgacccaucgccacgugguggggaaacccugcccuaagccccauagacugaaucacaugggaauuuguuccugcggccuguauaaacacccuggcguccccgugaaguggaagcggugaggacuagucccuguucccagagcccacuuuuuuuucuuuuuuugaaauaaaauagccugucuuucagaucuaaaaaaaaaaaaaaaaaaaaaaaaaaaaaaaaaaaaaaaaaaaaaaaaaaaaaaaaaaaaaaaaaaaaaaaaaaaaaaaaaaaaaaaaaaaaaaaaaaaa

SEQ ID NO: 35727 - RNA, 1740 nt, Artificial Sequence
  mRNA product Design a-2 (A100) comprising derived and/or modified sequence from LASV(Lassa virus/H.sapiens-wt/NGA/2015/ISTH_0543;Clade II)__AVO03639__GPCmut9 (opt5)
aggagaguccgcucagccagguugcagaagcggcuuagcguguguccuaaucuucucucugcguguagguaggccugugccgcaaacaagcuuaccaugggccagaucauuaccuucuuucaagaggugccccacgucaucgaagagguuaugaacauugugcugaucgcccucagccugcuugcuauucugaaggggaucuacaauguggccacaugcggacucuucggccuggucuccuuucuucugcucugugggagaucuugcagcacgaccuauaaaggaguguacgaacugcagacacuggagcucgacauggcgaaccugaauaugaccaugccucuuuccuguacaaagaacaauucucaucacuauaucaugguuggcaacgaaaccgggcuggagcucacacugaccaauacgagcauuaucaaccauaaauucugcaaucuuuccgaugcucacaagaaaaaccuguacgaccaugcccucaugucuauuaucagcaccuuucaccuguccauuccgaauuucaaccaguaugaggccaugagcugugauuuuaauggaggcaagaucucugugcaguacaaccugucccacacauaugcugucgacgccgcuaaucauugcggcaccauugccaacggggugcuccaaacauucaugcggauggcguggggaggcagcuacaucgcccuggauucuggguguggauccugggacugcaucaugaccagcuaccaguaucuuguuauucagaacacgacaugggaagaucacugucaguuuucucgccccuccccuaucggcuaccuggggcuccugagccaaagaacccgggacauuuauaucucccgcagacuucugggaacauucaccuggacccucucugauagcgagggcaaugaaacacccggcggguacugccugacgcgguggaugcugauugaggcugagcucaaguguuuuggaaacaccgccguggcuaaaugcaaugaaaagcaugacgaggaguucugcgauaugcugcgccuuuuugacuucaacaaacaggccaucagacggcugaagacagaagcgcagauguccauccagcucauuaauaaagccgucaacgcucugaucaaugaucaacuuauuaugaagaaccaucugcgcgacaucauguguauuccuuauugcaauuacagcaaguauugguaccucaaccacaccgugacaggcaaaaccucucugcccagauguuggcugguguccaaugggagcuaccucaacgaaacgcacuucucugacgauaucgagcagcaggccgacaauaugaucacagagcugcuucaaaaggaauauauugaucggcagggaaaaaccccucugggccucgucgaccuguuuguuuucagcaccuccuuuuaccugaucucuauuuuccuucaccucgugaagaucccgacacaucgccacauuaccgggaaacccugcccuaagccccauagacugaaccacaugggaaucuguagcugcggccuguauaaacacccuggcgugcccgucaaguggaagcggugaggacuagucccuguucccagagcccacuuuuuuuucuuuuuuugaaauaaaauagccugucuuucagaucuaaaaaaaaaaaaaaaaaaaaaaaaaaaaaaaaaaaaaaaaaaaaaaaaaaaaaaaaaaaaaaaaaaaaaaaaaaaaaaaaaaaaaaaaaaaaaaaaaaaa

SEQ ID NO: 35728 - RNA, 1740 nt, Artificial Sequence
  mRNA product Design a-2 (A100) comprising derived and/or modified sequence from LASV(Lassa virus/H.sapiens-wt/NGA/2016/ISTH_0009;Clade II)__AVO03571__GPCmut9 (opt5)
aggagaguccgcucagccagguugcagaagcggcuuagcguguguccuaaucuucucucugcguguagguaggccugugccgcaaacaagcuuaccaugggccagaucauuaccuucuuucaagaggugccccacgucaucgaagagguuaugaacauugugcugaucgcccucagccugcuugcuauucugaaggggaucuacaauguggccacaugcggacuccugggccuugucuccuuccugcuccugugugggagaucuugcagcacgaccuauaaaggaguguacgaacugcagacacucgagcuggacauggcgucccuuaacaugaccaugccucugucuuguacaaagaauaacagccaucacuauaucaugguuggcaaugaaaccgggcucgagcugacacuuaccaacacguccauuaucaaucauaaauuuugcaaccugucugaugcucacaagaaaaaucucuacgaccaugcccugaugagcauuaucuccaccuuccaccugagcauuccgaacuuuaaucaguaugaggccaugucuugugauuucaacggaggccggaucuccgugcaguacaaucucagccacucuuaugcugucgacgccgcuaaccauugcggcacaauugccaauggggugcugcaaaccuuuaugcgcauggcguggggaggcuccuacaucgcccuugauagcggguguggaucuugggacugcaucaugacauccuaccaguaucugauuauccagaacaccacgugggaagaucacugucaguucagcagacccuccccuauuggcuaccucgggcugcuuucucaacggacacgcgacaucuauauuagcagacggcugcucggaaccuuuacauggacccuguccgauagcgagggcaacgaaacccccggcggguacugccugacacgcuggaugcucaucgaggcugagcugaaguguuucggaaauacggccguugcuaagugcaacgaaaaacaugacgaggaauuuugcgauaugcuuagacuguucgacuuuaauaagcaggccauccggcgccucaaaaccgaggcgcagaugucuauucagcugaucaacaaggccgugaaugcucuuauuaacgaucaacugaucaugaaaaaucaccucagagacauuauguguaucccuuauugcaacuacuccaaguauugguaccugaaucacacagucaccggcaagacaagccugccccgguguuggcucgugucuaacgggagcuaccugaaugaaacccauuucuccgacgauaucgagcagcaggccgacaacaugauuacggagcuucugcaaaaagaauauaucgaucgccagggaaagacaccucucggccugguggaccuguucgucuuuucuaccagcuucuaccuuauuuccaucuuucuccaccugguuaaaauuccgacccauagacacaucacagggaagcccugcccuaaaccccaucggcugaaucacaugggaauuuguagcugcggccucuauaaccacccuggcgugcccgugaaguggaaacgcugaggacuagucccuguucccagagcccacuuuuuuuucuuuuuuugaaauaaaauagccugucuuucagaucuaaaaaaaaaaaaaaaaaaaaaaaaaaaaaaaaaaaaaaaaaaaaaaaaaaaaaaaaaaaaaaaaaaaaaaaaaaaaaaaaaaaaaaaaaaaaaaaaaaaa

SEQ ID NO: 35729 - RNA, 1740 nt, Artificial Sequence
  mRNA product Design a-2 (A100) comprising derived and/or modified sequence from LASV(Lassa virus/H.sapiens-wt/NGA/2016/ISTH_0017;Clade II)__AVO03567__GPCmut9 (opt5)
aggagaguccgcucagccagguugcagaagcggcuuagcguguguccuaaucuucucucugcguguagguaggccugugccgcaaacaagcuuaccaugggccagaucauuaccuucuuucaagaggugccccacgucaucgaagagguuaugaacauugugcugaucgcccucagccugcuugcuauucugaaggggaucuacaauguggccacaugcggacucuucggccuggucuccuuucuucugcucugugggagaucuugcagcacgaccuauaaaggaguguacgaacugcagacacuggagcucgacauggcgucccugaacaugaccaugccucuuucuuguacaaagaauaacagccaucacuauaucaugguuggcaaugaaaccgggcuggagcucacacugaccaacacguccauuaucaaucauaaauucugcaaccuuucugaugcucacaagaaaaaucuguacgaccaugcccucaugagcauuaucuccaccuuucaccugagcauuccgaacuucaaucaguaugaggccaugucuugugauuuuaacggaggcaagaucuccgugcaguacaaucugagccacacauaugcuauugacgccgcuaaccauugcggcaccaucgccaaugggguccuccaaacauucaugcggauggcguggggaggcucuuacaucgcccuggauuccggguguggaagcugggacugcauuaugaccucuuaccaguaucuuaucauucagaacacgacaugggaagaucacugucaguuuucccgccccagcccuaucggcuaccuggggcuccugucccaaagaacccgggacauuuauaucucucgcagacuucugggaacauucaccuggacccucagcgauuccgagggcaacgaaacacccggcggguacugccugacgcgguggaugcugaucgaggcugagcucaaguguuuuggaaauaccgccguggcuaaaugcaacgaaaagcaugacgaggaguucugcgauaugcugcgccuuuuugacuucaauaaacaggccauuagacggcugaagacagaagcgcagaugagcauccagcucauuaacaaagccguuaaugcucugaucaacgaucaacuuauuaugaagaaucaucugcgcgacaucauguguaucccuuauugcaacuacucuaaguauugguaccucaaucacaccgugacaggcaaaaccucccugcccagauguuggcuggucagcaacgggucuuaccucaaugaaacgcacuucagcgacgauauugagcagcaggccgacaacaugaucacagagcugcuucaaaaggaauauauggaucggcagggaaaaaccccucugggccucguggaccuguuuguguucuccaccucuuuuuaccugauuagcaucuuccuucaccucguccgcauuccgacacauagacacguuaucgggaagcccugcccuaaaccccaucggcugaaucacaugggaauuuguuccugcggccuguauaagcacccuggcgugcccgugaaauggaagcgcugaggacuagucccuguucccagagcccacuuuuuuuucuuuuuuugaaauaaaauagccugucuuucagaucuaaaaaaaaaaaaaaaaaaaaaaaaaaaaaaaaaaaaaaaaaaaaaaaaaaaaaaaaaaaaaaaaaaaaaaaaaaaaaaaaaaaaaaaaaaaaaaaaaaaa

SEQ ID NO: 35730 - RNA, 1740 nt, Artificial Sequence
  mRNA product Design a-2 (A100) comprising derived and/or modified sequence from LASV(Lassa virus/H.sapiens-wt/NGA/2018/ISTH_0959;Clade II)__AVV65099__GPCmut9 (opt5)
aggagaguccgcucagccagguugcagaagcggcuuagcguguguccuaaucuucucucugcguguagguaggccugugccgcaaacaagcuuaccaugggccagaucauuaccuucuuucaagaggugccccacgucaucgaagagguuaugaacauugugcugaucgcccucagccugcuugcuauucugaaggggaucuacaauguggucacaugcggacucuucggccugguguccuuucuucugcucugugggagaucuugcagcacgaccuauaaaggaguuuacgaacugcagacacuggagcucgacauggccucccugaacaugaccaugccucuuucuuguacaaagaauaacagccaucacuauaucauggugggcaaugaaaccgggcuggagcucacacugaccaacacguccauuaucaaucauaaauucugcaaccuuucugaugcgcacaagaaaaaucuguacgaccaugcucucaugagcauuaucuccaccuuucaccugagcauuccgaacuucaaucaguaugaggccaugucuugugauuuuaacggaggcaagaucuccguccaguacaaucugagccacgccuaugcuauugacgccgcuaaccauugcggcacaaucgccaauggggugcuccaaaccuucaugcggauggcguggggaggcucuuacaucgcccuggauuccggguguggaagcugggacugcauuaugacaucuuaccaguaucuuaucauucagaacaccacgugggaagaucacugucaguuuucccgccccagcccuaucggcuaccuggggcuccugucccaaagaacacgggacauuuauaucucucgcagacuucugggaaccuucacauggacccucagcgauuccgagggcaacgaaacccccggcggguacugccugacacgguggaugcugaucgaggcugagcucaaguguuuuggaaauacggccguugcuaaaugcaacgaaaagcaugacgaggaguucugcgauaugcugcgccuuuuugacuucaauaaacaggccauuagacggcugaagaccgaagcgcagaugagcauccagcucauuaacaaagccgugaaugcucugaucaacgaucaacuuauuaugaagaaucaucugcgcgacaucauguguaucccuuauugcaacuacucuaaguauugguaccucaaucacacagucaccggcaaaacaucccugcccagauguuggcuggugagcaacgggucuuaccucaaugaaacccacuucagcgacgauauugagcagcaggccgacaacaugaucacggagcugcuucaaaaggaauauauugaucggcagggaaaaacaccucugggccucguggaccuguuugucuucuccaccucuuuuuaccugaucagcauuuuccuucaccucguuaagaucccgacccaucgccacgugauugggaaacccugcccuaagccccauagacugaaucacaugggaaucuguuccugcggccuguauaaacacccuggcgugcccgucaaguggaagcggugaggacuagucccuguucccagagcccacuuuuuuuucuuuuuuugaaauaaaauagccugucuuucagaucuaaaaaaaaaaaaaaaaaaaaaaaaaaaaaaaaaaaaaaaaaaaaaaaaaaaaaaaaaaaaaaaaaaaaaaaaaaaaaaaaaaaaaaaaaaaaaaaaaaaa

SEQ ID NO: 35731 - RNA, 1740 nt, Artificial Sequence
  mRNA product Design a-2 (A100) comprising derived and/or modified sequence from LASV(LASV003-NIG-2008;Clade II)__AIT17580__GPCmut9 (opt5)
aggagaguccgcucagccagguugcagaagcggcuuagcguguguccuaaucuucucucugcguguagguaggccugugccgcaaacaagcuuaccaugggccagaucauuaccuucuuucaagaggugccccacgucaucgaagagguuaugaacauugugcugaucgcccucagccugcuugcuauucugaaggggaucuacaauguggccacaugcggacucuucggccuggucuccuuucuucugcucugugggagaucuugcagcacgaccuauaaaggaguguacgaacugcagacacuggagcucgacauggcgucccugaacaugaccaugccucuuucuuguacaaagaauaacagccaucacuauaucaugguuggcaaugaaaccgggcuggagcucacacugaccaacacguccauuaucaaucauaaauucugcaaccuuucugaugcucacaagaaaaaucuguacgaccaugcccucaugagcauuaucuccaccuuucaccugagcauuccgaacuucaaucaguaugaggccaugucuugugauuuuaacggaggcaagaucuccgugcaguacaaucugagccacacauaugcugucgacgccgcuaaccauugcggcaccauugccaauggggugcuccaaacauucaugcggauggcguggggaggcucuuacaucgcccuggauuccggguguggaagcugggacugcaucaugaccucuuaccaguaucuuauuauccagaacacgacaugggaagaucacugucaguuuucccgccccagcccuauuggcuaccuggggcuccugucccaaagaacccgggacaucuauauuucucgcagacuucugggaacauucaccuggacccucagcgauuccgagagcaacgaaacacccggcggcuacugccugacgcgguggaugcugaucgaggcugagcucaaguguuuugggaauaccgccguugcuaaaugcaacgaaaagcaugacgaggaguucugcgauaugcugcgccuuuuugacuucaauaaacaggccaucagacggcugaaggcggaagcccagaugucuauucagcucaucaacaaagcugugaaugcccugauuaacgaucaacuuaucaugaagaaucaucugcgcgacauuauguguaucccuuauugcaacuacuccaaguauugguaccucaaucacacagucaccggaagaacaagccugccccgguguuggcuggugucuaacggcagcuaccucaaugaaacccacuucuccgacgauaucgagcagcaggcugacaacaugauuacggagcugcuucaaaaagaauauauggaucgccaggggaagacaccucugggacucguggaccuguuugucuucucuaccagcuuuuaccugaucuccauuuuccuucaccucguuaaaaucccgacccauagacacgugauuggcaagcccugcccuaaaccccaucggcugaaucacauggggaucuguagcugcggacuguauaagcacccuggcgugcccgucaaauggaagcgcugaggacuagucccuguucccagagcccacuuuuuuuucuuuuuuugaaauaaaauagccugucuuucagaucuaaaaaaaaaaaaaaaaaaaaaaaaaaaaaaaaaaaaaaaaaaaaaaaaaaaaaaaaaaaaaaaaaaaaaaaaaaaaaaaaaaaaaaaaaaaaaaaaaaaa

SEQ ID NO: 35732 - RNA, 1740 nt, Artificial Sequence
  mRNA product Design a-2 (A100) comprising derived and/or modified sequence from LASV(LASV035-NIG-2009;Clade II)__AIT17588__GPCmut9 (opt5)
aggagaguccgcucagccagguugcagaagcggcuuagcguguguccuaaucuucucucugcguguagguaggccugugccgcaaacaagcuuaccaugggccagaucauuaccuucuuucaagaggugccccacgucaucgaagagguuaugaacauugugcugaucgcccucagccugcuugcuauucugaaggggaucuacaauguggccacaugcggacucuucggccuggucuccuuucuucugcucugugggagaucuugcagcacgaccuauaaaggaguguacgaacugcagacacuggagcucgacauggcgucccugaacaugaccaugccucuuucuuguacaaagaauaacagccaucacuauaucaugguuggcaaugaaaccgggcuggagcucacacugaccaacacguccauuaucaaucauaaauucugcaaccuuucugaugcucacaagaaaaaucuguacgaccaugcccucaugagcauuaucuccaccuuucaccugagcauuccgaacuucaaucaguaugaggccaugucuugugauuuuaacggaggcaagaucuccgugcaguacaaucugagccacgcuuaugccgucgacgcugccaaccauugcggcacaauugcgaauggggugcuccaaaccuucaugcggauggccuggggaggcucuuacaucgcucuggauuccggguguggaagcugggacugcaucaugacaucuuaccaguaucuuauuauccagaacaccacgugggaagaucacugucaguuuucccgccccagcccuauuggcuaccuggggcuccugucccaaagaacacgggacaucuauauuucucgcagacuucugggaaccuucacauggacccucagcgauuccgagggcaacgaaacccccggcggguacugccugacacgguggaugcugaucgaggccgagcucaaguguuuuggaaauacggcuguugccaaaugcaacgaaaagcaugacgaggaguucugcgauaugcugcgccuuuuugacuucaauaaacaggcgaucagacggcugaaggccgaagcucagaugagcauucagcucaucaacaaagccgugaaugcucugauuaacgaucaacuuaucaugaagaaucaucugcgcgacauuauguguaucccuuauugcaacuacucuaaguauugguaccucaaucacaccgucacaggcaaaaccucccugcccagauguuggcuggugagcaacgggucuuaccucaaugaaacacacuucagcgacgauaucgagcagcaggccgacaacaugauuaccgagcugcuucaaaaggaauauaucgaucggcagggaaaaacgccucugggccucguggaccuguuugucuucuccacaucuuuuuaccugauuagcaucuuccuucaccucguuaagauuccgacccaucgccacgugaucgggaaacccugcccuaagccccauagacugaaucacaugggaauuuguuccugcggccuguauaaacacccuggcgugcccgucaaguggaagcggugaggacuagucccuguucccagagcccacuuuuuuuucuuuuuuugaaauaaaauagccugucuuucagaucuaaaaaaaaaaaaaaaaaaaaaaaaaaaaaaaaaaaaaaaaaaaaaaaaaaaaaaaaaaaaaaaaaaaaaaaaaaaaaaaaaaaaaaaaaaaaaaaaaaaa

SEQ ID NO: 35733 - RNA, 1740 nt, Artificial Sequence
  mRNA product Design a-2 (A100) comprising derived and/or modified sequence from LASV(LASV1000-NIG-2009;Clade II)__AIT17782__GPCmut9 (opt5)
aggagaguccgcucagccagguugcagaagcggcuuagcguguguccuaaucuucucucugcguguagguaggccugugccgcaaacaagcuuaccaugggccagaucauuaccuucuuucaagaggugccccacgucaucgaagagguuaugaacauugugcugaucgcccucagccugcuugcuauucugaaggggaucuacaauguggccacaugcggacucuucggccuggucuccuuucuucugcucugugggagaucuugcagcacgaccuauaaaggaguguacgaacugcagacacuggagcucgacauggcgucccugaacaugaccaugccucuuucuuguacaaagaauaacagccaucacuauaucaugguuggcaaugaaaccgggcuggagcucacacugaccaacacguccauuaucaaucauaaauucugcaaccuuucugaugcucacaagaaaaaucuguacgaccaugcccucaugagcauuaucuccaccuuucaccugagcauuccgaacuucaaucaguaugaggccaugucuugugauuuuaacggaggcaagaucuccgugcaguacaaucugagccacacauaugcugucgacgccgcuaaccauugcggcaccauugccaauggggugcuccaaacauucaugcggauggcguggggaggcucuuacaucgcccuggauuccggguguggaagcugggacugcaucaugaccucuuaccaguaucuuauuauccagaacacgacaugggaagaucacugucaguuuucccgccccagcccuauuggcuaccuggggcuccugucccaaagaacccgggacaucuauauuucucgcagacuucugggaacauucaccuggacccucagcgauuccgagggcaacgaaacacccggcggguacugccugacgcgguggaugcugaucgaggcugagcucaaguguuuuggaaauaccgccguugcuaaaugcaacgaaaagcaugacgaggaguucugcgauaugcugcgccuuuuugacuucaauaaacaggccaucaagagacugaaaacagaagcgcagaugagcauucagcucaucaacaaggccgugaaugcucugauuaacgaucaacuuaucaugaagaaucaucugcgggacauuauguguaucccuuauugcaacuacucuaaauauugguaccucaaucacaccgucacaggcaagaccucccugccccgcuguuggcuggugagcaacgggucuuaccucaaugaaacgcacuucagcgacgauaucgagcagcaggccgacaacaugauuacagagcugcuucaaaaagaauauaucgauagacagggaaagaccccucugggccucguggaccuguuugucuucuccaccucuuuuuaccugauuagcaucuuccuucaccucguuaaaauuccgacacaucggcacgugguggggaagcccugcccuaaaccccaucgccugaaucacaugggaaucuguuccugcggccuguauaagcacccuggcguccccgugaaguggaaaagaugaggacuagucccuguucccagagcccacuuuuuuuucuuuuuuugaaauaaaauagccugucuuucagaucuaaaaaaaaaaaaaaaaaaaaaaaaaaaaaaaaaaaaaaaaaaaaaaaaaaaaaaaaaaaaaaaaaaaaaaaaaaaaaaaaaaaaaaaaaaaaaaaaaaaa

SEQ ID NO: 35734 - RNA, 1740 nt, Artificial Sequence
  mRNA product Design a-2 (A100) comprising derived and/or modified sequence from LASV(LASV221-NIG-2010;Clade II)__AIT17624__GPCmut9 (opt5)
aggagaguccgcucagccagguugcagaagcggcuuagcguguguccuaaucuucucucugcguguagguaggccugugccgcaaacaagcuuaccaugggccagaucauuaccuucuuucaagaggugccccacgucaucgaagagguuaugaacauugugcugaucgcccucagccugcuugcuauucugaaggggaucuacaauguggccacaugcggacucuucggccuggucuccuuucuucugcucugugggagaucuugcagcacgaccuauaaaggaguguacgaacugcagacacuggagcucgacauggcgucccugaacaugaccaugccucuuucuuguacaaagaauaacagccaucacuauaucaugguuggcaaugaaaccgggcuggagcucacacugaccaacacguccauuaucaaucauaaauucugcaaccuuucugaugcucacaagaaaaaucuguacgaccaugcccucaugagcauuaucuccaccuuucaccugagcauuccgaacuucaaucaguaugaggccaugucuugugauuuuaacggaggcaagaucuccgugcaguacaaucugagccacacauaugcuauugacgccgcuaaccauugcggcaccaucgccaaugggguccuccaaacauucaugcggauggcguggggaggcucuuacaucgcccuggauuccggguguggaagcugggacugcauuaugaccucuuaccaguaucuuaucauucagaacacgacaugggaagaucacugucaguuuucccgccccagcccuaucggcuaccuggggcuccugucccaaagaacccgggacauuuauaucucucgcagacuucugggaacauucaccuggacccucagcgauuccgagggcaacgaaacacccggcggguacugccugacgcgguggaugcugaucgaggcugagcucaaguguuuuggaaauaccgccguggcuaaaugcaacgaaaagcaugacgaggaguucugcgauaugcugcgccuuuuugacuucaauaaacaggccauuagacggcugaagacagaagcgcagaugagcauccagcucauuaacaaagccguuaaugcucugaucaacgaucaacuuauuaugaagaaucaucugcgcgacaucauguguaucccuuauugcaacuacucuaaguauugguaccucaaucacaccgugacaggcaaaaccucccugcccagauguuggcuggucagcaacgggucuuaccucaaugaaacgcacuucagcgacgauauugagcagcaggccgacaacaugaucacagagaugcugcaaaaggaauauauggaucggcagggaaaaaccccucuuggccugguggaccucuuuguguucuccaccucuuuuuaccugauuagcaucuuccugcaccuugucaagauuccgacacaucgccacguuaucgggaaacccugcccuaagccccauagacucaaucacaugggaauuuguuccugcggccuguauaaacacccuggcgugcccgugaaguggaagcggugaggacuagucccuguucccagagcccacuuuuuuuucuuuuuuugaaauaaaauagccugucuuucagaucuaaaaaaaaaaaaaaaaaaaaaaaaaaaaaaaaaaaaaaaaaaaaaaaaaaaaaaaaaaaaaaaaaaaaaaaaaaaaaaaaaaaaaaaaaaaaaaaaaaaa

SEQ ID NO: 35735 - RNA, 1740 nt, Artificial Sequence
  mRNA product Design a-2 (A100) comprising derived and/or modified sequence from LASV(LASV237-NIG-2010;Clade II)__AIT17638__GPCmut9 (opt5)
aggagaguccgcucagccagguugcagaagcggcuuagcguguguccuaaucuucucucugcguguagguaggccugugccgcaaacaagcuuaccaugggccagaucauuaccuucuuucaagaggugccccacgucaucgaagagguuaugaacauugugcugaucgcccucagccugcuugcuauucugaaggggaucuacaauguggccacaugcggacucuucggccuggucuccuuucuucugcucugugggagaucuugcagcacgaccuauaaaggaguguacgaacugcagacacuggagcucgacauggcgucccugaacaugaccaugccucuuucuuguacaaagaauaacagccaucacuauaucaugguuggcaaugaaaccgggcuggagcucacacugaccaacacguccauuaucaaucauaaauucugcaaccuuucugaugcucacaagaaagaccuguacgaucaugcccucaugagcauuaucuccaccuuucaccugagcauuccgaauuucaaccaguaugaggccaugucuugugacuuuaauggaggcaagaucuccgugcaguacaaccugagccacacauaugcugucgaugccgcuaaucauugcggcaccauugccaacggggugcuccaaacauucaugcggauggcguggggaggcucuuacaucgcccuggacuccggguguggaagcugggauugcaucaugaccucuuaccaguaucuuauuauccagaauacgacaugggaagaccacugucaguuuucccgccccagcccuauuggcuaccuggggcuccugucccaaagaacccgggauaucuauauuucucgcagacuucugggaacauucaccuggacccucagcgacuccgagggcaacgaaacacccggcggguacugccugacgcgguggaugcugaucgaggcugagcucaaguguuuuggaaacaccgccguugcuaaaugcaaugaaaagcaugaugaggaguucugcgacaugcugcgccuuuuugauuucaacaaacaggccaucagacggcugaagacagaagcgcagaugagcauucagcucaucaauaaagccgugaacgcucugauuaaugaccaacuuaucaugaagaaccaucugcgcgacauuauguguaucccuuauugcaauuacucuaaguauugguaccucaaccacaccgucacaggcaaaaccucccugcccagauguuggcuggugagcaaugggucuuaccucaacgaaacgcacuucagcgaugacaucgagcagcaggccgauaauaugauuacagagcugcuucaaaaggaauauauggaccggcagggaaaaaccccucugggccucguggaucuguuugucuucuccaccucuuuuuaccugaucagcauuuuccuucaccucaucaagauuccgacacaucgccacaucaccgggaaacccugcccuaagccccauagacugaaccacaugggaauuuguuccugcggccuguauaaacacccuggcguucccgugaaguggaagcggugaggacuagucccuguucccagagcccacuuuuuuuucuuuuuuugaaauaaaauagccugucuuucagaucuaaaaaaaaaaaaaaaaaaaaaaaaaaaaaaaaaaaaaaaaaaaaaaaaaaaaaaaaaaaaaaaaaaaaaaaaaaaaaaaaaaaaaaaaaaaaaaaaaaaa

SEQ ID NO: 35736 - RNA, 1740 nt, Artificial Sequence
  mRNA product Design a-2 (A100) comprising derived and/or modified sequence from LASV(LASV253-NIG-2011;Clade II)__AIT17670__GPCmut9 (opt5)
aggagaguccgcucagccagguugcagaagcggcuuagcguguguccuaaucuucucucugcguguagguaggccugugccgcaaacaagcuuaccaugggccagaucauuaccuucuuucaagaggugccccacgucaucgaagagguuaugaacauugugcugaucgcccucagccugcuugcuauucugaaggggaucuacaauguggccacaugcggacucuucggccuggucuccuuucuucugcucugugggagaucuugcagcacgaccuauaaaggaguguacgaacugcagacacuggagcucgacauggcgucccugaacaugaccaugccucuuucuuguacaaagaauaacagccaucacuauaucaugguuggcaaugaaaccgggcuggagcucacacugaccaacacguccauuaucaaucauaaauucugcaaccuuucugaugcucacaagaaaaaucuguacgaccaugcccucaugagcauuaucuccaccuuucaccugagcauuccgaacuucaaucaguaugaggccaugucuugugauuuuaacggaggcaagaucuccgugcaguacaaucugagccacacauaugcugucgacgccgcuaaccauugcggcaccauugccaauggggugcuccaaacauucaugcggauggcguggggaggcucuuacaucgcccuggauuccggguguggaagcugggacugcaucaugaccucuuaccaguaucuuauuauccagaacacgacaugggaagaucacugucaguuuucccgccccagcccuauuggcuaccuggggcuccugucccaaagaacccgggacaucuauauuucucgcagacuucugggaacauucaccuggacccucagcgauuccgagggcaacgaaacacccggcggguacugccugacgcgguggaugcugaucgaggcugagcucaaguguuuuggaaauaccgccguugcuaaaugcaacgaaaagcaugacgaggaguucugcgauaugcugcgccuuuuugacuucaauaaacaggccaucagacggcugaaggcggaagcccagaugagcauucagcucaucaacaaagcugugaaugcccugauuaacgaucaacuuaucaugaagaaucaucugcgcgacauuauguguaucccuuauugcaacuacucuaaguauugguaccucaaucacacagucaccggcagaacaucccugccccgguguuggcuggugagcaacgggucuuaccucaaugaaacccacuucagcgacgauaucgagcagcaggcugacaacaugauuacggagcugcuucaaaaagaauauaucgaucgccagggaaagacaccucugggccucguggaccuguuugucuucuccaccucuuuuuaccugauuagcaucuuccuucaccucguuaaaauuccgacccauagacacaucauugggaagcccugcccuaaaccccaucggcugaaucacaugggaaucuguuccugcggccuguauaagcacccuggcgugcccgugaaauggaagcgcugaggacuagucccuguucccagagcccacuuuuuuuucuuuuuuugaaauaaaauagccugucuuucagaucuaaaaaaaaaaaaaaaaaaaaaaaaaaaaaaaaaaaaaaaaaaaaaaaaaaaaaaaaaaaaaaaaaaaaaaaaaaaaaaaaaaaaaaaaaaaaaaaaaaaa

SEQ ID NO: 35737 - RNA, 1740 nt, Artificial Sequence
  mRNA product Design a-2 (A100) comprising derived and/or modified sequence from LASV(LASV254-NIG-2011;Clade II)__AIT17674__GPCmut9 (opt5)
aggagaguccgcucagccagguugcagaagcggcuuagcguguguccuaaucuucucucugcguguagguaggccugugccgcaaacaagcuuaccaugggccagaucauuaccuucuuucaagaggugccccacgucaucgaagagguuaugaacauugugcugaucgcccucagccugcuugcuauucugaaggggaucuacaauguggccacaugcggacucuucggccuggucuccuuucuucugcucugugggagaucuugcagcacgaccuauaaaggaguguacgaacugcagacacuggagcucgacaugaccaaccugaauaugacaaugccucuuuccuguaccaagaacaauucucaucacuauaucaugguuggcaacgaaacagggcuggagcucacccugacgaauaccagcauuaucaaccauaaauucugcaaucuuuccgaugcgcacaagaaaaaccuguacaaucaugcucucaugucuauuaucagcacauuucaccuguccauuccgaacuucaaucaguaugaggccaugagcugugacuuuaacggaggcaagaucucugugcaguacaaucugucccacagcuaugccgucgaugcugccaaccauugcggcaccauugcuaacggggugcuccaaacauucaugcggauggccuggggaggcucuuacaucgcgcuggacuccggguguggaaauugggauugcaucaugaccagcuaccaguaucuuauuauccagaacacgacaugggaagaccacugucaguuuucucgccccuccccuauuggcuaccuggggcuccugagccaaagaacccgggauaucuauauuucccgcagacuucugggaacauucaccuggacccucucugacagcgagggcaaugaaacacccggcggguacugccugacgcgguggaugcugaucgaggccgagcucaaguguuuuggaaacaccgcuguugccaaaugcaaugaaaagcaugaugaggaguucugcgacaugcugcgccuuuuugauuucaacaaacaggcuaucagacggcugaagacagaagcccaggcgaauauucagcucaucaacaaagccgugaaugcucugauuaacgaccaacuuaucaugaagaaucaucugcgcgauauuauguguaucccuuauugcaacuacuccaaguauugguaccucaaucacaccgucacaggcaaaaccagccugcccagauguuggcuggugucuaacggguccuaccucaaugaaacgcacuucagcgacgacaucgagcagcaggccgauaacaugauuacagagcugcuucaaaaggaauauauggaccggcagggaaaaaccccucugggccucguggaucuguuugucuucucuaccagcuuuuaccugaucuccauuuuccuucaccucguuaagaucccgacacaucgccacgugauugggaaacccugcccuaagccccauagacugaaccacaugggaaucuguucuugcggccuguauaaacacccuggcgugcccgucaaguggaagcggugaggacuagucccuguucccagagcccacuuuuuuuucuuuuuuugaaauaaaauagccugucuuucagaucuaaaaaaaaaaaaaaaaaaaaaaaaaaaaaaaaaaaaaaaaaaaaaaaaaaaaaaaaaaaaaaaaaaaaaaaaaaaaaaaaaaaaaaaaaaaaaaaaaaaa

SEQ ID NO: 35738 - RNA, 1740 nt, Artificial Sequence
  mRNA product Design a-2 (A100) comprising derived and/or modified sequence from LASV(Nig08-A19;Clade III)__ADU56618__GPCmut9 (opt5)
aggagaguccgcucagccagguugcagaagcggcuuagcguguguccuaaucuucucucugcguguagguaggccugugccgcaaacaagcuuaccaugggccagaucgugaccuucuuucaagaggucccccacguuauugaagaggugaugaacaucgugcugauugcccucagcauccuggcuauucuuaaggggcuguacaauaucgccacaugcggacucaucggccuggucacguuccuucugcucuccgggagaucuuguagcaugaccuauaaaggaguguacgaacugcagacacuggagcucaacaugaauacccugaacaugacaaugccucuuuccugcaccaagaauaacucucaucacuauauuaugguuggcaaugaaacagggcuggagcucacccugacgaacaccagccuucugcaucacaaauuuuguaaucucuccgacgcgcauaagaaaaaccuguacgaucacacacugaugucuaucauuagcaccuuccaccucuccaucccgaauuuuaaccaguaugaggcuaugagcugcgacuucaauggaggcaagauuacagugcaguacaaccugucucauuccuaugccaucgaugccgcuaaucacuguggcaccgucgccaacggggugcuucaaacguuuaugcggauggcuuggggaggcagcuacauugcccuggacucugggugcggaaagugggauuguaucaugacauccuaccaguaucucaucauucagaacaccacaugggaagaccauugccaguucagccgccccucuccuaucggcuaccuggggcuucugucccaaagaacccgggauauuuauaucagccgcagacuccugggaaccuuuacauggacgcuguccgacucugagggcaaugaaacccccggcggguacugucucacacgguggaugcugauugaggcggagcuuaaaugcuucggaaacaccgccguugcuaaguguaaugaaaaacacgaugaggaauuuugcgacaugcugcgccucuucgauuuuaacaagcaggccaucagacggcugaaagcugaggcccagaugagcauccagcuuauuaauaaggcggugaacgcccugaucaaugaccaacucauuaugaagaaccaucugcgcgauaucaugugcauuccuuauuguaauuacuccaaauauugguaccugaaccacacaagcaccggcagaacgucucucccccggugcuggcuggucuccaaugggagcuaccuuaacgaaacacacuucucugacgacaucgagcagcaggcugauaauaugaucaccgagaugcugcaaaaggaauaucucgaccgccagggaaaaaccccucugggccugguggaucuuuucguguuuagcacauccuucuaccucauuucuaucuuucugcaucuggucaagauuccgacccacagacauaucguugggaaacccuguccuaagccccaccggcucaaccacaugggaauuugcagcuguggccuguauaaacagccuggcgugcccgugcgcuggaagagaugaggacuagucccuguucccagagcccacuuuuuuuucuuuuuuugaaauaaaauagccugucuuucagaucuaaaaaaaaaaaaaaaaaaaaaaaaaaaaaaaaaaaaaaaaaaaaaaaaaaaaaaaaaaaaaaaaaaaaaaaaaaaaaaaaaaaaaaaaaaaaaaaaaaaa

SEQ ID NO: 35739 - RNA, 1743 nt, Artificial Sequence
  mRNA product Design a-2 (A100) comprising derived and/or modified sequence from LASV(G1180-SLE-2010;Clade IV)__AIT17168__GPCmut9 (opt5)
aggagaguccgcucagccagguugcagaagcggcuuagcguguguccuaaucuucucucugcguguagguaggccugugccgcaaacaagcuuaccaugggccagaucgugaccuucuuucaagaggucccccacguuauugaagaggugaugaacaucgugcugauugcccucagcauccuggcuguccuuaaggggcuguacaauuucgccacaugcggacucgugggccugcuuacguuucugcuccugugugggagauccugcaccgcgucucgguauaaaggaguuuacgaacugcagacacucgagcugaacauggaaacccuuaauaugacaaugccucugagcuguaccaagaacaauucccaucacuauauuauggugggcaacgagacagggcucgagcugacccuuacgaauaccucuaucaucaaccauaaauucugcaaucugagcgacgcucacaagaaaaaccucuacgaucaugcccugauguccauuaucucuacauuucaccugagcauuccgaauuucaaccaguaugaagccauguccugugacuuuaauggaggcaagaucagcguccaguacaaccucucucacuccuaugcuggcgaugccgcuaaucauugcgggaccguggccaacggaguucugcaaacauucaugcgcauggcguggggcgggagcuacauugcccuugacucuggauguggcuccugggauugcaucaugaccagcuaccaguaucugauuauccagaacacgacaugggaggaccacugucaguuuucuagacccuccccuaucggguaccucggacugcuuagccaacggacccgcgauauuuauaucuccagacggcugcucggcacauucaccuggacccugucugacagcgaaggcaaggauacacccgggggauacugccugacgcgcuggaugcucauugaggcugagcugaaauguuuuggcaauaccgccguggcuaagugcaacgaaaaacaugacgaggaguucugcgauaugcuuagacuguuugacuucaauaagcaggccauccagcggcucaaagcggaagcccagauguccauucaacugaucaacaaggcugucaaugcccuuaucaacgaucagcugauuaugaagaaucaccuccgcgacaucauguguauuccuuauugcaacuacagcaaauauugguaccugaaucacacaaccacagggaagaccucucugcccaaauguuggcucguguccaacggaagcuaccugaaugaaacgcauuucucugacgauaucgagcagcaagcugacaacaugauuacagagaugcuucagaaggaauauauggagagacagggcaaaaccccucuggggcucguggaucuguuugucuucagcaccuccuuuuaccugaucucuaucuuccuucaccucguuaagauuccgacacaucggcacaucgugggaaaaagcugccccaagccucaucgccugaaucacaugggcauuuguuccugcggccuguauaagcagcccggggugccugucaaauggaagagaugaggacuagucccuguucccagagcccacuuuuuuuucuuuuuuugaaauaaaauagccugucuuucagaucuaaaaaaaaaaaaaaaaaaaaaaaaaaaaaaaaaaaaaaaaaaaaaaaaaaaaaaaaaaaaaaaaaaaaaaaaaaaaaaaaaaaaaaaaaaaaaaaaaaaa

SEQ ID NO: 35740 - RNA, 1743 nt, Artificial Sequence
  mRNA product Design a-2 (A100) comprising derived and/or modified sequence from LASV(G1442-SLE-2011;Clade IV)__AIT17180__GPCmut9 (opt5)
aggagaguccgcucagccagguugcagaagcggcuuagcguguguccuaaucuucucucugcguguagguaggccugugccgcaaacaagcuuaccaugggccagaucgugaccuucuuucaagaggucccccacguuauugaagaggugaugaacaucgugcugauugcccucagcauccuggcuguccuuaaggggcuguacaauguggccacaugcggacucauuggccugguuacguuccuucugcucugugggagauccugcaccacaacccuguauaaaggaguguacgaacugcagacacucgagcugaacauggaaacccuuaauaugacaaugccucugucuuguaccaagaacaauagccaucacuauauccgggucggcaacgagacggggcucgagcugacccuuacaaauaccuccaucauuaaccauaaauuuugcaaucugucugacgcgcacaagaaaaaccucuacgaucaugcucugaugagcaucauuuccacauuccaccugucuaucccgaauuuuaaccaguaugaagccaugagcugugacuucaauggaggcaagauuuccgugcaguacaaccucagccacucuuaugccggcgaugcugccaaucauugcgggaccguugcuaacggagugcugcaaacguuuaugcgcauggccuggggcggguccuacaucgcgcuugacagcggauguggcaacugggauugcauuaugacaucuuaccaguaucugaucauccagaauaccacaugggacgaucacugucaguucuccagacccagcccuauuggguaccucggacugcuuucucaacggacccgcgacgucuauaucuccagacggcugcucggcaccuuuacauggacgcugagcgauuccgagggcaaggacacccccgggggauacugccugacacgcuggaugcucauugaagccgagcugaaauguuucggcaacaccgcuguggccaagugcaaugagaaacaugaugaagaguuuugcgacaugcuuagacuguucgauuuuaacaagcaggcuauccagcggcucaaagccgaagcgcagaugucuauucaacugaucaauaaggccgugaacgcucuuaucaaugaccagcugauuaugaagaaccaccuccgcgacaucauguguauuccuuauugcaauuacagcaaauauugguaccugaacaauacagccaccgggaagacgucccugcccaaauguuggcucaucagcaacggaucuuaccugaaugagacacacuucuccgaugacauugaacaggaggcugauaacaugaucaccgagaugcuucaaaaggaauauauggagagacagggcaaaaccccucuggggcucgucgaccuguucguuuuuagcacaucuuucuaccugaucagcauuuuucuucaucucgugaagaucccgacccaccggcauauugugggaaaauccugccccaagccucaccgccugaaucauaugggcaucuguucuugcggccuguauaagcagcccggggucccugugagauggaaacggugaggacuagucccuguucccagagcccacuuuuuuuucuuuuuuugaaauaaaauagccugucuuucagaucuaaaaaaaaaaaaaaaaaaaaaaaaaaaaaaaaaaaaaaaaaaaaaaaaaaaaaaaaaaaaaaaaaaaaaaaaaaaaaaaaaaaaaaaaaaaaaaaaaaaa

SEQ ID NO: 35741 - RNA, 1743 nt, Artificial Sequence
  mRNA product Design a-2 (A100) comprising derived and/or modified sequence from LASV(G3010-SLE-2013;Clade IV)__AIT17344__GPCmut9 (opt5)
aggagaguccgcucagccagguugcagaagcggcuuagcguguguccuaaucuucucucugcguguagguaggccugugccgcaaacaagcuuaccaugggccagaucgugaccuucuuucaagaggucccccacguuauugaagaggugaugaacaucgugcugauugcccucagcauccuggcuguccuuaaggggcuguacaauuucgccacaugcggacucgugggccugguuacguuucuucugcucugugggagauccugcaccacaucucuguauaaaggaguguacgaacugcagacccucgagcugaacauggaaacacuuaauaugaccaugccucugagcuguacaaagaacaauucccaucacuauauuauggucggcaacgagaccgggcucgagcugacgcuuaccaauacaucuaucaucaaccauaaauucugcaaucugagcgacgcgcacaagaaaaaccucuacaaucaugcucugauguccauuaucucuaccuuucaccugagcauuccgaacuucaaucaguaugaagccauguccugugauuuuaacggaggcaagaucagcgugcaguacaaucucucucacuccuaugccggcgacgcugccagccauugcgggacaguugcuaacggagugcugcaaaccuucaugcggauggccuggggcgggucuuacauugcgcuugauuccggauguggcaagugggacugcaucaugacgagcuaccaguaucugauuauccagaacacaaccugggaggaucacugucaguuuucucgccccuccccuaucggguaccucggacugcuuagccaaagaacacgggacauuuauaucucccgcagacugcucggcaccuucaccuggacacugucugauagcgaaggcaaagacacgcccgggggauacugccugacccgguggaugcucauugaggccgagcugaaguguuuuggcaauacagcugucgccaaaugcaacgaaaagcaugaugaggaguucugcgacaugcuucgccuguuugauuucaauaaacaggcuauccagagacucaagaccgaagcccagauguccauucaacugaucaacaaggcggugaaugcccuuaucaacgaccagcugauuaugaaaaaucaccuccgggauaucauguguauuccuuauugcaacuacagcaaguauugguaccugaaucacacaaccacggggaaaacaucucugcccaaguguuggcucguguccaacggaagcuaccugaaugaaacccauuucucugacgacaucgagcagcaagcugauaacaugauuaccgagaugcuucagaaagaauauauggagcgccagggcaagacaccucuggggcucgucgaccuguuuguuuucagcaccuccuuuuaccugaucucuaucuuccuucaccucgugaaaauuccgacacauagacacaucgugggaaagagcugccccaagccucaucggcugaaucacaugggcauuuguuccugcggccuguauaaacagcccggggucccugugcgcuggaagagaugaggacuagucccuguucccagagcccacuuuuuuuucuuuuuuugaaauaaaauagccugucuuucagaucuaaaaaaaaaaaaaaaaaaaaaaaaaaaaaaaaaaaaaaaaaaaaaaaaaaaaaaaaaaaaaaaaaaaaaaaaaaaaaaaaaaaaaaaaaaaaaaaaaaaa

SEQ ID NO: 35742 - RNA, 1743 nt, Artificial Sequence
  mRNA product Design a-2 (A100) comprising derived and/or modified sequence from LASV(G502-SLE-2009;Clade IV)__AIT17126__GPCmut9 (opt5)
aggagaguccgcucagccagguugcagaagcggcuuagcguguguccuaaucuucucucugcguguagguaggccugugccgcaaacaagcuuaccaugggccagaucgugaccuucuuucaagaggucccccacguuauugaagaggugaugaacaucgugcugauugcccucagcauccuggcuguccuuaaggggcuguacaauuucgccacaugcggacucgugggccugcuuacguuucugcuccugugugggagauccugcaccacaggacuguauaaaggcguuuacgaacuccagacccuggagcuuaacauggaaacacugaauaugaccaugccucucucuuguacaaagaacaauagccaucacuauauuaugguggggaacgagaccggacuggagcuuacgcugaccaauacauccaucaucaaccauaaauucugcaaucucucugacgcgcacaagaaaaaccuguacgaucaugcucugaugagcauuaucuccaccuuucaccucucuauuccgaauuucaaccaguaugaagccaugagcugugacuuuaauggcggcaagaucuccguccaguacaaccugagccacucuuaugccggggaugcugccgaccauugcggaacaguggcuaauggcguucuucaaaccuucaugcggauggccuggggaggguccuacauugcgcuggauagcggcugugggcgcugggacugcaucaugacgucuuaccaguaucucauuauccagaacacaaccugggaggaucacugucaguuuuccagacccagcccuaucggauaccugggccuucugucucaacggacacgcgacauuuauaucuccagacggcuccugggcaccuucaccuggacacugagcgauuccgaagggaaggacacgcccggaggcuacugccucacccgcuggaugcugauugaggccgagcuuaaauguuuugggaacacagcuguggccaagugcaaugaaaaacaugaugaggaguucugcgacaugcugagacucuuugauuucaacaagcaggcuauccagcggcugaaagccgaagcgcagaugucuauucaacuuaucaauaaggccgucaacgcucugaucaaugaccagcucgugaugaagaaccaucugcgcgacauuauguguaucccuuauugcaauuacagcagauauugguaccugaaccacaccacaaccggacggacgucccuccccaaauguuggcuggugagcaauggcucuuaccuuaacgaaacacacuucuccgaugacauugagcagcaagccgauaauaugaucaccgagaugcugcagaaggaauauauggagcgccaggggaaaaccccucucggacuggucgaccuguuuguuuucagcacaucuuuuuaccuuauuagcaucuuccuccaccuggugaagaucccgacccauagacacauugugggcaaauccugccccaagccucaucggcugaaccacaugggcaucuguucuugcgggcucuauaaacagcccggagucccugugaaguggaagcgcugaggacuagucccuguucccagagcccacuuuuuuuucuuuuuuugaaauaaaauagccugucuuucagaucuaaaaaaaaaaaaaaaaaaaaaaaaaaaaaaaaaaaaaaaaaaaaaaaaaaaaaaaaaaaaaaaaaaaaaaaaaaaaaaaaaaaaaaaaaaaaaaaaaaaa

SEQ ID NO: 35743 - RNA, 1743 nt, Artificial Sequence
  mRNA product Design a-2 (A100) comprising derived and/or modified sequence from LASV(G733-SLE-2010;Clade IV)__AIT17154__GPCmut9 (opt5)
aggagaguccgcucagccagguugcagaagcggcuuagcguguguccuaaucuucucucugcguguagguaggccugugccgcaaacaagcuuaccaugggccagaucgugaccuucuuucaagaggucccccacguuauugaagaggugaugaacaucgugcugauugcccucagcauccuggcuguccuuaaggggcuguacaauuucgccacaugcggaauugugggccucguuuccuuucugcuucugugugggagaucuugcacgaccagccucuauaaaggaguguacgaacugcagacacuggagcucaacauggaaacccugaauaugacaaugccucuuuccuguaccaagaacaauucucaucacuauaucauggucggcaacgagacagggcuggagcucacccugacgaauaccagcaucauuaaccauaaauucugcaaucuuuccgacgcgcacaagaaaaaccuguacgaucaugcucucaugucuaucauuagcacauuucaccuguccaucccgaauuucaaccaguaugaagccaugagcugugacuuuaauggaggcaagauuucugugcaguacaaccugucccacagcuaugccggcgaugcugccaaucauugcgggaccaucgcuaacggaguucuccaaacauucaugcggauggccuggggcgggucuuacauugcgcuggacuccggaugugaucgcugggacugcaucaugaccagcuaccaguaucuuaucauucagaacacgacaugggaggaucacugucaguuuucuagacccuccccuaucggcuaccuggggcuccugagccaacggacccgcgacauuuauaucuccagacggcuucugggaacauucaccuggacccucucugauagcgaaggcaaggacacacccggcggguacugccugacgcgcuggaugcugauugaggccgagcucaaauguuuuggaaauaccgcuguggccaagugcaacgaaaaacaugaugaggaguucugcgacaugcugagacuuuuugauuucaauaagcaggcuauccagcggcugaaagccgaagcgcagauguccauccaacucauuaacaaggccgucaaugcucugaucaacgaccagcuuauuaugaagaaucaucugcgcgacaucauguguauuccuuauugcaacuacagcaaauauugguaccucaaucacacaaccacaggcaagaccucucugcccaaauguuggcugguguccaacgggagcuaccucaaugaaacgcacuucucugaugacaucgagcagcaagccgauaacaugaucacagagaugcugcagaaggaauauauggagagacagggaaaaaccccucuuggccugguggaccucuuugucuucagcaccuccuuuuaccugauuucuaucuuccugcaccuuguuaagauuccgacacaucggcacgugguggggaaaagcugccccaagccucaucgccucaaucacaugggaaucuguuccugcggccuguauggccagcccggggucccugugaaguggaaaagaugaggacuagucccuguucccagagcccacuuuuuuuucuuuuuuugaaauaaaauagccugucuuucagaucuaaaaaaaaaaaaaaaaaaaaaaaaaaaaaaaaaaaaaaaaaaaaaaaaaaaaaaaaaaaaaaaaaaaaaaaaaaaaaaaaaaaaaaaaaaaaaaaaaaaa

SEQ ID NO: 35744 - RNA, 1743 nt, Artificial Sequence
  mRNA product Design a-2 (A100) comprising derived and/or modified sequence from MOPV/LASV reassortant(IGS-1;Clade IV)__AFY05576__GPCmut9 (opt5)
aggagaguccgcucagccagguugcagaagcggcuuagcguguguccuaaucuucucucugcguguagguaggccugugccgcaaacaagcuuaccaugggccagaucgugaccuucuuucaagaggucccccacguuauugaagaggugaugaacaucgugcugauugcccucagcguccuggcugugcuuaaggggcuguacaauuucgccacaugcggacucguuggccuggugacguuucuucugcucugugggagauccugcaccacaucucuguauaaaggagucuacgaacugcagacccucgagcugaacauggaaacacuuaauaugaccaugccucugagcuguacaaagaacaauucccaucacuauaucauggugggcaacgagaccgggcucgagcugacgcuuaccaauacaucuauuaucaaccauaaauucugcaaucugagcgacgcgcacaagaaaaaccucuacgaucaugcucugauguccaucauuucuaccuuucaccugagcaucccgaauuucaaccaguaugaagccauguccugugacuuuaauggaggcaagauuagcguucaguacaaccucucucacuccuaugccggcgaugcugccaaucauugcgggacaguggcuaacggaguccugcaaaccuucaugcggauggccuggggcgggagcuacaucgcgcuugacucuggauguggcaacugggauugcauuaugacguccuaccaguaucugaucauucagaauacaaccugggaggaccacugucaguuuagccgccccucuccuaucggguaccucggacugcuuucccaaagaacacgggauaucuauauuagccgcagacugcucggcaccuucaccuggacacuguccgacucugaaggcgaggauacgcccgggggauacugccugacccgguggaugcucaucgaggccgaacugaaguguuuuggcaacacagcuguggccaaaugcaaugagaagcaugacgaagaguucugcgauaugcuucgccuguuugacuucaacaaacaggcuauucagagacucaaggccgaagcgcagaugagcauccaacugauuaauaaagccgugaacgcucuuaucaaugaucagcugaucaugaagaaccaccuccgggacauuauguguaucccuuauugcaauuacuccaaguauugguaccugaaccacaccacaaccgggcgcacgagccugcccaaauguuggcucgucucuaauggauccuaccugaacgagacacauuucagcgacgauauugagcagcaagccgacaauaugaucaccgaaaugcuucagaaggaguauauggaaagacagggcaaaaccccucuggggcucguugaucuguuuguguucucuaccagcuuuuaccugauuuccaucuuccuucaccucgugaagaucccgacacaucggcacauugucggaaaaucuugccccaagccucaucgccugaaccacaugggcaucuguagcugcggccuguauaaacagcccggggugccuguuaaguggaagagaugaggacuagucccuguucccagagcccacuuuuuuuucuuuuuuugaaauaaaauagccugucuuucagaucuaaaaaaaaaaaaaaaaaaaaaaaaaaaaaaaaaaaaaaaaaaaaaaaaaaaaaaaaaaaaaaaaaaaaaaaaaaaaaaaaaaaaaaaaaaaaaaaaaaaa

SEQ ID NO: 35745 - RNA, 1743 nt, Artificial Sequence
  mRNA product Design a-2 (A100) comprising derived and/or modified sequence from LASV(LM765-SLE-2012;Clade IV)__AIT17814__GPCmut9 (opt5)
aggagaguccgcucagccagguugcagaagcggcuuagcguguguccuaaucuucucucugcguguagguaggccugugccgcaaacaagcuuaccaugggccagaucgugaccuucuuucaagaggucccccacguuauugaagaggugaugaacaucgugcugauugcccucagcauccuggcuguccuuaaggggcuguacaauuucgccacaugcggacucgugggccugguuacguuucuucugcucugugggagauccugcaccacaucucuguauaaaggaguguacgaacugcagacccucgagcugaacauggaaacacuuaauaugaccaugccucugagcuguacaaagaacaauucccaucacuauauuauggucggcaacgagaccgggcucgagcugacgcuuaccaauacaucuaucaucgaccauaaauucugcaaccugagcgaugcgcaccggaagaaucucuacgaccaugcucugauguccauuaucucuaccuuucaccugagcauuccgaacuucaaucaguaugaagccauguccugugauuuuaacggaggcaaaaucagcgugcaguacaaucucucucacuccuaugccaaggacgcugccgaucauugcggcacaguugcuaacggggugcugcaaaccuucaugcgcauggccuggggaggcagcuacauugcgcuugacucuggguguggaagaugggauugcaucaugacguccuaccaguaucugauuauccagaauacaaccugggaggaccacugucaguuuagccggcccucuccuaucggcuaccucgggcugcuuucccaacgcacaagagauauuuauaucagccggcgccugcucggaaccuucaccuggacacuguccgacucugaaggcaaggauacgcccggcggguacugccugaccagauggaugcucauugaggccgagcugaaauguuuuggaaacacagcugucgccaagugcaacgaaaaacaugacgaggaguucugcgauaugcuucggcuguuugacuucaauaagcaggcuauccagcgccucaaagccgaagcgcagaugagcauucaacugaucaacaaggccgugaaugcucuuaucaacgaccagcugauuaugaagaaucaccucagagauaucauguguauuccuuauugcaacuacuccaaauauugguaccugaaucacaccacaaccggcaagacgagccugcccaaauguuggcucgugucuaacggguccuaccugaaugaaacacauuucagcgacgauaucgagcagcaagccgacaacaugauuaccgagaugcuucagaaggaauauauggagcggcagggaaaaaccccucugggccucgucgaucuguuuguuuucucuaccagcuuuuaccugaucuccaucuuccuucaccucgugaagauuccgacacaucgccacaucguggggaaacccugcccuaagccccauagacugaaucacaugggaauuuguucuugcggccuguauaagcagccuggcguccccgugaaauggaagcggugaggacuagucccuguucccagagcccacuuuuuuuucuuuuuuugaaauaaaauagccugucuuucagaucuaaaaaaaaaaaaaaaaaaaaaaaaaaaaaaaaaaaaaaaaaaaaaaaaaaaaaaaaaaaaaaaaaaaaaaaaaaaaaaaaaaaaaaaaaaaaaaaaaaaa

SEQ ID NO: 35746 - RNA, 1743 nt, Artificial Sequence
  mRNA product Design a-2 (A100) comprising derived and/or modified sequence from LASV(LM776-SLE-2012;Clade IV)__AIT17824__GPCmut9 (opt5)
aggagaguccgcucagccagguugcagaagcggcuuagcguguguccuaaucuucucucugcguguagguaggccugugccgcaaacaagcuuaccaugggccagaucgugaccuucuuucaagaggucccccacguuauugaagaggugaugaacaucgugcugauugcccucagcauccuggcuguccuuaaggggcuguacaauuucgccacaugcggacucgugggccugguuacguuucuucugcucugugggagauccugcaccacaucuguguauaaaggagucuacgaacugcagacccuggagcucaacauggaaacacugaauaugaccaugccucuuagcuguacaaagaacaauucccaucacuauauuauggugggcaacgagaccgggcuggagcucacgcugaccaauacaucuaucaucaaccauaaauucugcaaucuuagcgacgcgcacaagaaaaaccuguacgaucaugcucucauguccauuaucucuaccuuucaccugagcauuccgaauuucaaccaguaugaagccauguccugugacuuuaauggaggcaagaucagcguucaguacaaccugucucacuccuaugccggcgaugcugccaaucauugcgggacaguggcuaacggaguccuccaaaccuucaugcggauggccuggggcgggagcuacauugcgcuggacucuggauguggcaagugggauugcaucaugacguccuaccaguaucuuauuauccagaacacaaccugggaggaccacugucaguuuagccgccccucuccuaucggguaccugggacuccugucccaaagaacacgggauauuuauaucagccgcagacuucugggcaccuucaccuggacacucuccgacucugaaggcaaagauacgcccgggggauacugccugacccgguggaugcugauugaggccgagcucaaguguuuuggcaauacagcuguggccaaaugcaacgaaaagcaugacgaggaguucugcgauaugcugcgccuuuuugacuucaauaaacaggcuauccagagacugaaggccgaagcgcagaugagcauucaacucaucaacaaggccgugaaugcucugaucaacgaucagcuuauuaugaaaaaucaucugcgggacaucauguguauuccuuauugcaacuacuccaaguauugguaccucaaucacaccacaaccgggaaaacgagccugcccaaguguuggcuggucucuaacggauccuaccucaaugaaacacacuucagcgacgauaucgagcagcaagccgacaacaugauuaccgagaugcugcagaaagaauauauggagcgccagggcaagaccccucuugggcugguugaucucuuuguguucucuaccagcuuuuaccugaucuccaucuuccugcaccuugugaaaauuccgacacauagacacaucgucggaaagucuugccccaagccucaucggcucaaucacaugggcauuuguagcugcggccuguauaaacagcccggggugccuguucgcuggaagagaugaggacuagucccuguucccagagcccacuuuuuuuucuuuuuuugaaauaaaauagccugucuuucagaucuaaaaaaaaaaaaaaaaaaaaaaaaaaaaaaaaaaaaaaaaaaaaaaaaaaaaaaaaaaaaaaaaaaaaaaaaaaaaaaaaaaaaaaaaaaaaaaaaaaaa

SEQ ID NO: 35747 - RNA, 1743 nt, Artificial Sequence
  mRNA product Design a-2 (A100) comprising derived and/or modified sequence from LASV(Mad39;Clade IV)__ANH09722__GPCmut9 (opt5)
aggagaguccgcucagccagguugcagaagcggcuuagcguguguccuaaucuucucucugcguguagguaggccugugccgcaaacaagcuuaccaugggccagaucgugaccuucuuucaagaggucccccacguuauugaagaggugaugaacaucgugcugauugcccucagcauccuggcuguccuuaaggggcuguacaauguggccacaugcggacucauuggccugguuacguuccuucugcucugugggagauccugcaccacaacccuguauaaaggaguguacgaacugcaggcgcucgagcugaacauggaaacacuuaauaugaccaugccucugucuuguacaaagaacaauagccaucacuauauccgggucggcaacgagaccgggcucgagcugacgcuuaccaauacaucccugaucaaccauaaauuuugcaaucucucugacgcucacaagaaaaaccuguacgaucaugcccugaugagcauuaucuccaccuuccaccucucuauuccgaauuuuaaccaguaugaagccaugagcugugacuucaaugauggaaagaucuccgugcaguacaaccugagccacacauaugcuggcgacaccgccaaucauugcggcacgguugcuaacggggugcuucaaacauuuaugcgcauggccuggggaggcucuuacauugcgcuggauuccggguguggaggcugggacugcaucaugaccagcuaccaguaucucauuauccagaacacaaccugggaggaucacugucaguucucuagacccuccccuaucggguaccugggacuucugagccaacggacccgcgacauuuauaucucuagacggcuccugggcacauuuacguggacccuguccgauagcgaaggcaaggacacacccgggggauacugccucacccgcuggaugcugauugaggccgagcuuaaauguuucggcaauacagcugucgccaagugcaacgaaaaacaugaugaggaauuuugcgacaugcugagacucuucgauuuuaauaagcaggcuauccagcggcugaaagccgaggcgcagauguccauucaacuuaucaacaaggccgugaaugcucugaucaacgaccagcucauuaugaagaaucaucugcgcgacaucauguguauuccuuauugcaacuacucuaaauauugguaccugaaucacaccgugacggggaagacaagccuccccaaauguuggcuggucuccaacggaagcuaccuuaaugaaacccacuucucugaugacaucgagcagcaagccgauaacaugauuaccgagaugcugcagaaggaauauauggagagacagggcaaaacaccucucgggcugguugaccuguucguguuuuccaccagcuucuaccuuaucucuaucuuucuccaccuggugaagauuccgacacaucggcacgucgugggaaaacccugcccuaagccccaucgccugaaucacaugggcaucuguagcugcggcuucuauaagcagccugggguucccgugagauggaaacggugaggacuagucccuguucccagagcccacuuuuuuuucuuuuuuugaaauaaaauagccugucuuucagaucuaaaaaaaaaaaaaaaaaaaaaaaaaaaaaaaaaaaaaaaaaaaaaaaaaaaaaaaaaaaaaaaaaaaaaaaaaaaaaaaaaaaaaaaaaaaaaaaaaaaa

SEQ ID NO: 35748 - RNA, 1743 nt, Artificial Sequence
  mRNA product Design a-2 (A100) comprising derived and/or modified sequence from LASV(Z0947-SLE-2011;Clade IV)__AIT17840__GPCmut9 (opt5)
aggagaguccgcucagccagguugcagaagcggcuuagcguguguccuaaucuucucucugcguguagguaggccugugccgcaaacaagcuuaccaugggccagaucgugaccuucuuucaagaggucccccacguuauugaagaggugaugaacaucgugcugauugcccucagcauccuggcuguccuuaaggggcuguacaauuucgccacaugcggacucgugggccugguuacguuucuucugcucugugggagauccugcaccauuucucuguauaaaggaguguacgaacugcagacacucgagcugaacauggaaacccuuaauaugacaaugccucugagcuguaccaagaacaauucccaucacuauaucauggucggcaacgagacagggcucgagcugacccuuacgaauaccucuaucauuaaccauaaauucugcaaucugagcgacgcgcacaagaaaaaccucuacgaucaugcucugauguccaucauuucuacauuucaccugagcaucccgaauuucaaccaguaugaagccauguccugugacuuuaauggaggcaagauuagcgugcaguacaaccucucucacuccuaugccggcgaugcugccaaucauugcgggaccguugcuaacggagugcugcaaacauucaugcggauggccuggggcgggagcuacaucgcgcuugacucuggaugugaucgcugggacugcauuaugaccuccuaccaguaucugaucauccagaacacgacaugggaggaucacugucaguuuagcagacccucuccuauuggcuaccucgggcugcuuucccaacggacccgcgacaucuauauuagcagacggcugcucggaacauucaccuggacccuguccgauucugaaggcaaggacacacccggcggguacugccugacgcgcuggaugcucaucgaggccgagcugaaauguuuuggaaauaccgcugucgccaagugcaacgaaaaacaugaugaggaguucugcgacaugcuuagacuguuugauuucaauaagcaggcuauucagcggcucaaagccgaagcgcagaugagcauccaacugaucaacaaggccgugaaugcucuuauuaacgaccagcugaucaugaagaaucaccuccgcgacauuauguguaucccuuauugcaacuacuccaaauauugguaccugaaucacacaaccacaggcaagaccagccugcccaaauguuggcucgugucuaacggguccuaccugaaugaaacgcauuucagcgaugacauugagcagcaagccgauaacaugaucacagagaugcuucagaaggaauauauggagagacagggaaaaaccccucugggccucgucgaccuguuuguuuucucuaccagcuuuuaccugaucuccauuuuccuucaccucgugaagaucccgacacaucggcacauuguggggaaacccugcccuaagccccaucgccugaaucacaugggaaucuguucuugcggccuguauaagcagccuggcguccccgugaaauggaagagaugaggacuagucccuguucccagagcccacuuuuuuuucuuuuuuugaaauaaaauagccugucuuucagaucuaaaaaaaaaaaaaaaaaaaaaaaaaaaaaaaaaaaaaaaaaaaaaaaaaaaaaaaaaaaaaaaaaaaaaaaaaaaaaaaaaaaaaaaaaaaaaaaaaaaa

SEQ ID NO: 35749 - RNA, 1781 nt, Artificial Sequence
  mRNA product Design b-4 (hSL-A64-N5) comprising derived and/or modified sequence from LASV(Josiah;Clade IV)__NP_694870__GPCmut9 (opt1)
aggagagucccgcagucggcguccagcggcucugcuuguucgugugugugucguugcaggccuuauucaagcuuaccaugggccagaucgugaccuucuuccaggaggucccccacgugaucgaggaggugaugaacaucguccugaucgcccucagcgugcuggccgugcugaaggggcucuacaacuucgcgaccugcggccuggucgggcuggugacguuccuccugcugugcggccgcuccugcaccaccagccucuacaaggggguguacgagcugcagacccuggagcucaacauggagacgcugaacaugaccaugccgcuguccugcaccaagaacaacagccaccacuacaucauggucggcaacgagaccggccucgagcugacgcugaccaacaccuccaucaucaaccacaaguucugcaaccucagcgacgcccacaagaagaaccuguacgaccacgcccugauguccaucaucagcaccuuccaccucuccauccccaacuucaaccaguacgaggccaugagcugcgacuucaacgggggcaagaucuccgugcaguacaaccugagccacuccuacgccggggacgcggccaaccacugcggcacgguggccaacgggguccugcagaccuucaugcggauggccuggggcggcagcuacaucgcgcucgacuccgggugcggcaacugggacugcaucaugaccagcuaccaguaccugaucauccagaacaccacgugggaggaccacugccaguucucccggcccagccccaucggguaccugggccuccugucccagcgcacccgggacaucuacaucagccgccggcugcucggcaccuucaccuggacgcugagcgacuccgaggggaaggacaccccgggcggguacugccugacccgcuggaugcucaucgaggccgagcugaagugcuucggcaacaccgccguggccaagugcaacgagaagcacgacgaggaguucugcgacaugcugcggcuguucgacuucaacaagcaggccauccagcgccugaaggcggaggcccagaugagcauccagcugaucaacaaggccgugaacgcccucaucaacgaccagcugaucaugaagaaccaccuccgggacaucaugugcauccccuacugcaacuacuccaaguacugguaccucaaccacacgaccaccggccgcaccagccugcccaagugcuggcuggucuccaacggcagcuaccucaacgagacgcacuucuccgacgacaucgagcagcaggccgacaacaugaucaccgagaugcugcagaaggaguacauggagcggcaggggaagacgccccugggccucguggaccuguucguguucagcaccuccuucuaccugaucagcaucuuccugcaccucgucaagaucccgacccaccgccacaucguggggaaguccugccccaagccccaccggcugaaccacaugggcaucugcagcugcgggcuguacaagcagcccggcgugccggucaaguggaagcgcugaggacuaguaauaaggaaacuguaugaaugucugugggcaggaagugaagagauccuucuguaaagguuuuuggaauuaugucugcugaauaauaaacuuuuuugaaauaauaaaucugguagaaaaaugagaucucaaaggcucuuuucagagccaccaaaaaaaaaaaaaaaaaaaaaaaaaaaaaaaaaaaaaaaaaaaaaaaaaaaaaaaaaaaaaaaaagaauu

SEQ ID NO: 35750 - RNA, 1778 nt, Artificial Sequence
  mRNA product Design b-4 (hSL-A64-N5) comprising derived and/or modified sequence from LASV(LP;Clade I)__AAF86701__GPCmut9 (opt1)
aggagagucccgcagucggcguccagcggcucugcuuguucgugugugugucguugcaggccuuauucaagcuuaccaugggccagaucaucaccuucuuccaggaggugccccacgucaucgaggaggugaugaacaucgugcugaucgcccucagccugcuggccauccucaaggggcuguacaacaucgcgaccugcggcaucaucgggcuggucgccuuccucuuccugugcggcaaguccugcagccugacgcucaagggcggguacgagcugcagacccuggagcucaacauggagacccugaacaugaccaugccgcuguccugcacgaagaacagcucccaccacuacauccgcgugggcaacgagaccgggcucgagcugacccugaccaacacgagcaucaucaaccacaaguucugcaaccucuccgacgcccacaagaagaaccuguacgaccacgcccugaugagcaucaucuccaccuuccaccucagcauccccaacuucaaccaguacgaggccauguccugcgacuucaacggcgggaagaucagcgugcaguacaaccugucccacagcuacgcgggcgacgccgccgagcacugcgggaccgucgccaacggcgugcugcagaccuucaugcggauggcguggggcgggcgcuacaucgcccucgacuccggcugcgggaacugggacugcaucaugacgagcuaccaguaccugaucauccagaacaccaccugggaggaccacugccaguucucccggcccagccccaucggcuaccugggccuccugucccagcgcacccgggacaucuacaucagccgccggcugcucgggacguucaccuggacccugagcgacuccgagggcaacgagacccccgggggcuacugccugacgcgcuggaugcucaucgaggccgagcugaagugcuucgggaacaccgccguggccaagugcaacgagaagcacgacgaggaguucugcgacaugcugcggcuguucgacuucaacaagcaggcgauccgccggcugaaggccgaggcccagaugagcauccagcugaucaacaaggccgucaacgcccucaucaacgaccagcugaucaugaagaaccaccuccgcgacaucaugugcauccccuacugcaacuacuccaaguacugguaccucaaccacaccagcuccggccggaccagccugcccaagugcuggcugaucuccaacgggagcuaccucaacgagacgcaguucuccgacgacaucgagcagcaggcggacaacaugaucaccgagaugcugcagaaggaguacaucgagcgccagggcaagaccccgcuggggcucguggacaucuucaucuucagcaccuccuucuaccugaucagcaucuuccugcaccugaucaagaucccgacgcaccggcacaucgugggcaagcccugccccaagccccaccgccucaaccacaugggggucugcuccugcggccuguacaagcacccgggcgugcccaccaaguggaagcggugaggacuaguaauaaggaaacuguaugaaugucugugggcaggaagugaagagauccuucuguaaagguuuuuggaauuaugucugcugaauaauaaacuuuuuugaaauaauaaaucugguagaaaaaugagaucucaaaggcucuuuucagagccaccaaaaaaaaaaaaaaaaaaaaaaaaaaaaaaaaaaaaaaaaaaaaaaaaaaaaaaaaaaaaaaaaagaauu

SEQ ID NO: 35751 - RNA, 1778 nt, Artificial Sequence
  mRNA product Design b-4 (hSL-A64-N5) comprising derived and/or modified sequence from LASV(803213;Clade II)__AAF86703__GPCmut9 (opt1)
aggagagucccgcagucggcguccagcggcucugcuuguucgugugugugucguugcaggccuuauucaagcuuaccaugggccagaucaucaccuucuuccaggaggugccccacgucaucgaggaggugaugaacaucgugcugaucgcccucagccugcuggccauccucaaggggaucuacaacgucgcgaccugcggccuguucgggcugaucuccuuccuccugcugugcggccgcagcugcuccgugacguacaaggggguguacgagcuccagacccuggagcugaacauggccaaccucaacaugaccaugccgcugagcugcaccaagaacaacucccaccacuacaucauggucggcaacgagacgggccuggagcucacccugaccaacaccagcaucaucaaccacaaguucugcaaccuguccgacgcccacaagaagaaccucuacgaccacgcccugaugagcaucaucuccacguuccaccugagcauccccaacuucaaccaguacgaggccauguccugcgacuucaacgggggcaagaucagcgugcaguacaaccucucccacagcuucgcgguggacgccgccaaccacugcgggaccaucgccaacggcguccugcagaccuucaugcggauggcguggggcggguccuacaucgcccuggacagcggcugcgggaacugggacugcaucaugaccuccuaccaguaccucaucauccagaacacgaccugggaggaccacugccaguucagccgccccucccccaucggcuaccuggggcugcucagccagcggacccgcgacaucuacaucagccggcgccugcugggcaccuucacguggacccucuccgacagcgagggcaacgaggcccccgggggcuacugccugacccgguggaugcugaucgaggccgagcucaagugcuucgggaacaccgccguggcgaagugcaacgagaagcacgacgaggaguucugcgacaugcugcgccuguucgacuucaacaagcaggccaucaagcggcucaagacggaggcccagauguccauccagcugaucaacaaggccgugaacgcccugaucaacgaccagcucaucaugaagaaccaccuccgcgacaucaugugcauccccuacugcaacuacagccgguacugguaccugaaccacaccgucaccgggaagaccucccugccccgcugcuggcuggugagcaacggcuccuaccugaacgagacgcacuucagcgacgacaucgagcagcaggcggacaacaugaucaccgagaugcuccagaaggaguacauggaccggcagggcaagaccccgcuggggcugguggaccucuucgucuucuccaccagcuucuaccugaucuccaucuuccugcaccuggugaagaucccgacgcaccgccacaucgugggcaagcccugccccaagccccaccggcucaaccacauggggaucugcagcugcggccuguacaagcacccggggguccccgugaaguggaagcgcugaggacuaguaauaaggaaacuguaugaaugucugugggcaggaagugaagagauccuucuguaaagguuuuuggaauuaugucugcugaauaauaaacuuuuuugaaauaauaaaucugguagaaaaaugagaucucaaaggcucuuuucagagccaccaaaaaaaaaaaaaaaaaaaaaaaaaaaaaaaaaaaaaaaaaaaaaaaaaaaaaaaaaaaaaaaaagaauu

SEQ ID NO: 35752 - RNA, 1778 nt, Artificial Sequence
  mRNA product Design b-4 (hSL-A64-N5) comprising derived and/or modified sequence from LASV(GA391;Clade III)__CAA36645__GPCmut9 (opt1)
aggagagucccgcagucggcguccagcggcucugcuuguucgugugugugucguugcaggccuuauucaagcuuaccaugggccagaucgugaccuucuuccaggaggucccccacgugaucgaggaggugaugaacaucguccugaucgcccucagcauccuggccauccugaaggggcucuacaacguggcgaccugcggccugaucgggcuggugacguuccuccugcuguccggccgcagcugcucccucaucuacaaggggaccuacgagcugcagacccuggagcucaacauggagacccugaacaugacgaugccgcugagcugcaccaagaacaacucccaccacuacauccgggucggcaacgagaccggccucgagcugacccugacgaacaccagcauccucaaccacaaguucugcaaccuguccgacgcccacaagcgcaaccuguacgaccacagccucauguccaucaucagcaccuuccaccuguccauccccaacuucaaccaguacgaggccaugagcugcgacuucaacgggggcaagaucaccgugcaguacaaccugucccacagcuucgccguggacgccgcggggcacugcggcacgcucgccaacgggguccugcagaccuucaugcggauggccuggggcggcuccuacaucgcccuggacagcgggugcggcaacugggacugcaucaugaccuccuaccaguaccucaucauccagaacaccacgugggacgaccacugccaguucagccggcccucccccaucggguaccugggccugcucagccagcgcacccgggacaucuacaucagccgccggcugcugggcaccuucaccuggacgcucuccgacagcgaggggaacgagaccccgggcggguacugccugacccgcuggaugcugaucgaggcggagcucaagugcuucggcaacaccgccguggccaagugcaacgagaagcacgacgaggaguucugcgacaugcugcggcuguucgacuucaacaagcaggccauccgccggcucaagacggaggcccagauguccauccagcugaucaacaaggcggugaacgcccugaucaacgaccagcucaucaugaagaaccaccuccgcgacaucaugugcauccccuacugcaacuacagccgguacugguaccugaaccacaccuccaccggcaagaccagccugccccgcugcuggcugaucuccaacggcagcuaccugaacgagacgaaguucuccgacgacaucgagcagcaggccgacaacaugaucaccgagaugcuccagaaggaguacaucgaccggcaggggaagacgccccugggccuggucgaccuguucguguucagcaccuccuucuaccucaucagcaucuuccugcaccuggugaagaucccgacccaccgccacaucgucgggaagcccugccccaagccccaccggcucaaccacaugggcaucugcuccugcgggcuguacaagcagccgggcgugcccgugcgcuggaagcggugaggacuaguaauaaggaaacuguaugaaugucugugggcaggaagugaagagauccuucuguaaagguuuuuggaauuaugucugcugaauaauaaacuuuuuugaaauaauaaaucugguagaaaaaugagaucucaaaggcucuuuucagagccaccaaaaaaaaaaaaaaaaaaaaaaaaaaaaaaaaaaaaaaaaaaaaaaaaaaaaaaaaaaaaaaaaagaauu

SEQ ID NO: 35753 - RNA, 1781 nt, Artificial Sequence
  mRNA product Design b-4 (hSL-A64-N5) comprising derived and/or modified sequence from LASV(AV;Clade V)__CCA30314__GPCmut9 (opt1)
aggagagucccgcagucggcguccagcggcucugcuuguucgugugugugucguugcaggccuuauucaagcuuaccaugggccagaucgugaccuucuuccaggaggucccccacgugaucgaggaggugaugaacaucguccugaucgcccucagcauccuggccgugcugaaggggcucuacaacaucgcgaccugcggccugaucgggcugaucacguuccuccugcugugcggccgcuccugcagcuccaaccucuacaaggggguguacgagcugcagagccuggaccucaacauggagacccugaacaugaccaugccgcuguccugcaccaagaacaacagccaccacuacauccgggucggcaacgacacgggccucgagcugacccugaccaacaccuccauccucaaccacaaguucugcaaccugagcgacgcccacaagaaggaccuguacgaccacgcccucauguccaucaucagcacguuccaccuguccauccccaacuucaaccaguacgaggccaugagcugcgacuucaacgggggcaagaucuccgugcaguacaaccugagccacuccuacgccaucgacgcggccaaccacugcgggaccguggccaacggcauccuccagaccuucaugcgcauggccuggggcgggagcuacaucgcgcuggacuccggcugcgggaacugggacugcaucaugaccagcuaccaguaccugaucauccagaacacgaccugggagaaccacugccaguucucccgccccagccccaucggcuaccucgggcugcugagccagcggacccgcgacaucuacaucucccggcgccuccugggcaccuucacguggacccugagcgacuccgagggcaacgccacccccgggggcuacugccucacccgguggaugcugaucgaggccgagcugaagugcuucgggaacacggccgucgccaagugcaacgagaagcacgacgaggaguucugcgacaugcuccgccuguucgacuucaacaagcaggcgaucagccggcugaaguccgaggcccagaugagcauccagcucaucaacaaggccgugaacgcccugaucaacgaccagcugaucaugaagaaccaccuccgcgacaucaugugcauccccuacugcaacuacuccaaguacugguaccugaaccacaccaucaccgggaagaccagccugcccaagugcuggcucguguccaacggcagcuaccugaacgagacgcacuucuccgacgacaucgagcagcaggccgacaacaugaucaccgagaugcugcagaaggaguacauggagcggcagggcaagaccccgcucgggcuggucgaccuguucguguucagcaccuccuucuaccugaucagcaucuuccuccgccuggugaagaucccgacgcaccggcacaucgucggcaagcccugccccaagccccaccgccugaaccacauggggaucugcuccugcggccucuacaagcagccgggggugcccgugcgguggaagcgcugaggacuaguaauaaggaaacuguaugaaugucugugggcaggaagugaagagauccuucuguaaagguuuuuggaauuaugucugcugaauaauaaacuuuuuugaaauaauaaaucugguagaaaaaugagaucucaaaggcucuuuucagagccaccaaaaaaaaaaaaaaaaaaaaaaaaaaaaaaaaaaaaaaaaaaaaaaaaaaaaaaaaaaaaaaaaagaauu

SEQ ID NO: 35754 - RNA, 1778 nt, Artificial Sequence
  mRNA product Design b-4 (hSL-A64-N5) comprising derived and/or modified sequence from LASV(Togo/2016/7082;Clade VI)__AMR44577__GPCmut9 (opt1)
aggagagucccgcagucggcguccagcggcucugcuuguucgugugugugucguugcaggccuuauucaagcuuaccaugggccagaucaucaccuucuuccaggaggugccccacgucaucgaggaggugaugaacaucgugcugaucgcccucagccugcuggccauccucaagggggucuacaacguggcgaccugcggcaucaucgggcuggugacguuccuguuccucugcggccgcuccugcagccugaucuacaagggguccuacgagcugcagacccucgagcugaacauggagacccugaacaugaccaugccgcucagcugcacgaagaacuccagccaccacuacauccgggucggcaacgagaccggccuggagcugacccucaccaacacguccaucaucaaccacaaguucugcaaccugagcgacgcccacaagcgcaaccuguacgaccacgcccucauguccauccugagcaccuuccaccuguccauccccaacuucaaccaguacgaggccaugagcugcgacuucaacgggggcaagaucuccgugcaguacaaccucagccacgccuacgcgguggacgccgccgagcacugcgggaccgucgccaacggcgugcugcagaccuucaugcggauggcguggggcggguccuacaucgcccuggacagcggcugcgggaacugggacugcaucaugacguccuaccaguaccucaucauccagaacaccaccugggaggaccacugccaguucagccggcccucccccaucggcuaccuggggcugcucagccagcgcacccgggacaucuacaucagccgccggcugcugggcacguucaccuggacccucuccgacagcgagggcaacgagacccccgggggcuacugccugacgcgcuggaugcugaucgaggccgagcucaagugcuucgggaacaccgccguggccaagugcaacgagaagcacgacgaggaguucugcgacaugcugcggcuguucgacuucaacaagcaggcgauccagcgccucaaguccgaggcccagaugagcauccagcugaucaacaaggccgucaacgcccugaucaacgaccagcucaucaugaagaaccaccuccgggacaugaugugcauccccuacugcaacuacuccaaguacugguaccugaaccacaccagcuccgggcgcaccagccugcccaagugcuggcugguguccaacggcagcuaccugaacgagacgcacuucuccgacgacaucgagcagcaggccgacaacaugaucaccgagaugcuccagaaggaguacaucgaccggcagggcaagaccccgcuggggcugguggaccucuucgucuucagcaccuccuucuaccugaucagcaucuuccugcaccugaucaagaucccgacgcaccgccacaucgugggcaagcccugccccaagccccaccggcucaaccacauggggaucugcuccugcggccuguacaagcagccgggggugcccacccgcuggaagcggugaggacuaguaauaaggaaacuguaugaaugucugugggcaggaagugaagagauccuucuguaaagguuuuuggaauuaugucugcugaauaauaaacuuuuuugaaauaauaaaucugguagaaaaaugagaucucaaaggcucuuuucagagccaccaaaaaaaaaaaaaaaaaaaaaaaaaaaaaaaaaaaaaaaaaaaaaaaaaaaaaaaaaaaaaaaaagaauu

SEQ ID NO: 35755 - RNA, 1778 nt, Artificial Sequence
  mRNA product Design b-4 (hSL-A64-N5) comprising derived and/or modified sequence from LASV(KAK-428;Clade n.d. (VII))__ANH09740__GPCmut9 (opt1)
aggagagucccgcagucggcguccagcggcucugcuuguucgugugugugucguugcaggccuuauucaagcuuaccaugggccagaucgugaccuucuuccaggaggucccccacgugaucgaggaggugaugaacaucguccugaucgcccucagccugcuggccauccucaaggggcuguacaacuucgcgaccugcggcgugaucgggcugaucacguuccuccugcugugcggccgcuccugcagcgccaccuacaaggggcaguacgagcuccagacccuggagcugaacauggagucccucaacaugaccaugccgcugagcugcacgaagaacaacucccaccacuacauccgggccggcaacaacaccggccuggagcucacccugaccaacacgagcaucaucucccacaaguucugcaaccugagcgacgcccacaagaagaaccucuacgaccacacccugauguccaucaucaccaccuuccaccugagcauccccaacuucaaccaguacgaggccauguccugcgacuucaacgggggcaagaucagcauccaguacaaccucucccacagcuacgcgggggacgccgcccagcacugcggcacgguggccaacgggguccugcagaccuucaugcgcauggcguggggcggcuccuaccuggcccucgacagcgggugccgcggcugggacugcaucaucuccagcuaccaguaccugaucauccagaacaccaccugggacgaccacugccaguucucccggcccagccccaucggguaccugggcuucgugagccagaagacgcgcgacaucuacaucucccggcgccuccugggcaccuucaccuggacccugagcgacuccgaggggcacgacaugccgggcggguacugccucacgcgguggaugcugaucgaggccgaccugaagugcuucggcaacaccgccguggccaagugcaacgagaagcacgacgaggaguucugcgacauguggcgccucuucgacuucaacaagcaggcgauccagcggcugaaggccgaggcccagaugaacauccagcugaucaacaaggccgucaacgcccucaucaacgaccagcugaugaugaagaaccaccuccgcgacaucaugugcauccccuacugcaacuacagcaaguucugguaccugaacaacaccaccacgggccggaccucccugccccgcugcuggcugaucagcaacggcuccuaccucaacgagacccacuucagcgacgacaucgagcagcaggcggacaacaugaucaccgagaugcugcagaaggaguacauggaccggcaggggaagacgccccugggccucguggaccuguucguguucuccaccagcuucuaccugaucaccaucuuccuccaccuggucaagaucccgacccaccgccacaucguggggaagcccugccccaagccccaccggcugaaccacaugggcaucugcuccugcgggcuguacaagcagccgggcgugcccguccgcuggaagcggugaggacuaguaauaaggaaacuguaugaaugucugugggcaggaagugaagagauccuucuguaaagguuuuuggaauuaugucugcugaauaauaaacuuuuuugaaauaauaaaucugguagaaaaaugagaucucaaaggcucuuuucagagccaccaaaaaaaaaaaaaaaaaaaaaaaaaaaaaaaaaaaaaaaaaaaaaaaaaaaaaaaaaaaaaaaaagaauu

SEQ ID NO: 35756 - RNA, 1778 nt, Artificial Sequence; identical to SEQ ID NO: 35750
  mRNA product Design b-4 (hSL-A64-N5) comprising derived and/or modified sequence from LASV(Pinneo-NIG-1969;Clade I)__AIT17836__GPCmut9 (opt1)

SEQ ID NO: 35757 - RNA, 1778 nt, Artificial Sequence
  mRNA product Design b-4 (hSL-A64-N5) comprising derived and/or modified sequence from LASV(ISTH0009-NIG-2011;Clade II)__AIT17404__GPCmut9 (opt1)
aggagagucccgcagucggcguccagcggcucugcuuguucgugugugugucguugcaggccuuauucaagcuuaccaugggccagaucaucaccuucuuccaggaggugccccacgucaucgaggaggugaugaacaucgugcugaucgcccucagccugcuggccauccucaaggggaucuacaacgucgcgaccugcggccuguucgggcugguguccuuccuccugcugugcggccgcagcugcuccacgaccuacaaggggguguacgagcuccagacccuggagcuggacauggccagccucaacaugaccaugccgcuguccugcacgaagaacaacagccaccacuacaucauggucggcaacgagaccggccuggagcucacccugaccaacacguccaucaucaaccacaaguucugcaaccugagcgacgcccacaagaagaaccucuacgaccacgcccugauguccaucaucagcaccuuccaccuguccauccccaacuucaaccaguacgaggccaugagcugcgacuucaacgggggcaagaucuccgugcaguacaaccucagccacgcguacgccguggacgccgccaaccacugcgggaccaucgcgaacggcguccugcagaccuucaugcggauggccuggggcggguccuacaucgcccuggacagcggcugcggguccugggacugcaucaugacgagcuaccaguaccucaucauccagaacaccaccugggaggaccacugccaguucucccgccccagccccaucggcuaccuggggcugcucagccagcggacccgcgacaucuacaucucccggcgccugcugggcacguucaccuggacccucagcgacuccgagggcaacgagacccccgggggcuacugccugacgcgguggaugcugaucgaggccgagcucaagugcuucgggaacaccgccguggcgaagugcaacgagaagcacgacgaggaguucugcgacaugcugcgccuguucgacuucaacaagcaggccauccggcgccucaagaccgaggcccagaugagcauccagcugaucaacaaggccgugaacgcccugaucaacgaccagcucaucaugaagaaccaccuccgggacaucaugugcaucccguacugcaacuacuccaaguacugguaccugaaccacaccgucacggggaagaccagccugccccgcugcuggcugguguccaacggcagcuaccugaacgagacccacuucuccgacgacaucgagcagcaggcggacaacaugaucaccgagcuccugcagaaggaguacauggaccggcagggcaagacgccccuggggcucguggaccuguucgucuucagcaccuccuucuaccugaucagcaucuuccugcaccucaucaagaucccgacccaccgccacaucaccggcaagcccugccccaagccccaccggcugaaccacauggggaucugcuccugcggccuguacaagcacccgggggugcccgugaaguggaagcgcugaggacuaguaauaaggaaacuguaugaaugucugugggcaggaagugaagagauccuucuguaaagguuuuuggaauuaugucugcugaauaauaaacuuuuuugaaauaauaaaucugguagaaaaaugagaucucaaaggcucuuuucagagccaccaaaaaaaaaaaaaaaaaaaaaaaaaaaaaaaaaaaaaaaaaaaaaaaaaaaaaaaaaaaaaaaaagaauu

SEQ ID NO: 35758 - RNA, 1778 nt, Artificial Sequence
  mRNA product Design b-4 (hSL-A64-N5) comprising derived and/or modified sequence from LASV(ISTH2010-NIG-2012;Clade II)__AIT17482__GPCmut9 (opt1)
aggagagucccgcagucggcguccagcggcucugcuuguucgugugugugucguugcaggccuuauucaagcuuaccaugggccagaucaucaccuucuuccaggaggugccccacgucaucgaggaggugaugaacaucgugcugaucgcccucagccugcuggccauccucaaggggaucuacaacgucgcgaccugcggccuguucgggcugguguccuuccuccugcugugcggccgcagcugcuccacgaccuacaaggggguguacgagcuccagacccuggagcuggacauggccagccucaacaugaccaugccgcuguccugcacgaagaacaacagccaccacuacaucauggucggcaacgagaccggccuggagcucacccugaccaacacguccaucaucaaccacaaguucugcaaccugagcgacgcccacaagaagaaccucuacgaccacgcccugauguccaucaucagcaccuuccaccuguccauccccaacuucaaccaguacgaggccaugagcugcgacuucaacgggggcaagaucuccgugcaguacaaccucagccacgcguacgccguggacgccgccaaccacugcgggaccaucgcgaacggcguccugcagaccuucaugcggauggccuggggcggguccuacaucgcccuggacagcggcugcggguccugggacugcaucaugacgagcuaccaguaccucaucauccagaacaucaccugggaggaccacugccaguucucccgccccagccccaucggcuaccuggggcugcucagccagcggacccgcgacaucuacaucucccggcgccugcugggcaccuucacguggacccucagcgacuccgagggcaacgagacccccgggggcuacugccugacccgguggaugcugaucgaggccgagcucaagugcuucgggaacacggccguggcgaagugcaacgagaagcacgacgaggaguucugcgacaugcugcgccuguucgacuucaacaagcaggccauccggcgccucaagaccgaggcccagaugagcauccagcugaucaacaaggccgugaacgcccugaucaacgaccagcucaucaugaagaaccaccuccgggacaucaugugcauccccuacugcaacuacuccaaguacugguaccugaaccacaccgucaccgggaagacgagccugccccgcugcuggcugguguccaacggcagcuaccugaacgagacccacuucuccgacgacaucgagcagcaggcggacaacaugaucaccgagcuccugcagaaggaguacaucgaccggcagggcaagaccccgcuggggcucguggaccuguucgucuucagcacguccuucuaccugaucagcaucuuccugcaccucgugaagaucccgacccaccgccacguggucggcaagcccugccccaagccccaccggcugaaccacauggggaucugcuccugcggccuguacaagcacccgggggugcccgugaaguggaagcgcugaggacuaguaauaaggaaacuguaugaaugucugugggcaggaagugaagagauccuucuguaaagguuuuuggaauuaugucugcugaauaauaaacuuuuuugaaauaauaaaucugguagaaaaaugagaucucaaaggcucuuuucagagccaccaaaaaaaaaaaaaaaaaaaaaaaaaaaaaaaaaaaaaaaaaaaaaaaaaaaaaaaaaaaaaaaaagaauu

SEQ ID NO: 35759 - RNA, 1778 nt, Artificial Sequence
  mRNA product Design b-4 (hSL-A64-N5) comprising derived and/or modified sequence from LASV(Lassa virus/H.sapiens-wt/NGA/2015/ISTH_0543;Clade II)__AVO03639__GPCmut9 (opt1)
aggagagucccgcagucggcguccagcggcucugcuuguucgugugugugucguugcaggccuuauucaagcuuaccaugggccagaucaucaccuucuuccaggaggugccccacgucaucgaggaggugaugaacaucgugcugaucgcccucagccugcuggccauccucaaggggaucuacaacgucgcgaccugcggccuguucgggcugguguccuuccuccugcugugcggccgcagcugcuccacgaccuacaaggggguguacgagcuccagacccuggagcuggacauggccaaccucaacaugaccaugccgcugagcugcacgaagaacaacucccaccacuacaucauggucggcaacgagaccggccuggagcucacccugaccaacacgagcaucaucaaccacaaguucugcaaccuguccgacgcccacaagaagaaccucuacgaccacgcccugaugagcaucaucuccaccuuccaccugagcauccccaacuucaaccaguacgaggccauguccugcgacuucaacgggggcaagaucagcgugcaguacaaccucucccacaccuacgcgguggacgccgccaaccacugcgggaccaucgccaacggcguccugcagacguucaugcggauggcguggggcgggagcuacaucgcccuggacuccggcugcgggagcugggacugcaucaugaccuccuaccaguaccucgugauccagaacaccaccugggaggaccacugccaguucagccgccccucccccaucggcuaccuggggcugcucagccagcggacgcgcgacaucuacaucagccggcgccugcugggcaccuucaccuggacccucuccgacagcgagggcaacgagacgcccgggggcuacugccugacccgguggaugcugaucgaggccgagcucaagugcuucgggaacaccgccguggccaagugcaacgagaagcacgacgaggaguucugcgacaugcugcgccuguucgacuucaacaagcaggcgauccggcgccucaagaccgaggcccagauguccauccagcugaucaacaaggccgucaacgcccugaucaacgaccagcucaucaugaagaaccaccuccgggacaucaugugcauccccuacugcaacuacagcaaguacugguaccugaaccacacggugaccgggaagaccucccugccccgcugcuggcuggugagcaacggcuccuaccugaacgagacccacuucagcgacgacaucgagcagcaggccgacaacaugaucacggagcuccugcagaaggaguacaucgaccggcagggcaagaccccgcuggggcucgucgaccuguucguguucuccaccagcuucuaccugaucuccaucuuccugcaccucgugaagaucccgacccaccgccacaucacgggcaagcccugccccaagccccaccggcugaaccacauggggaucugcagcugcggccuguacaagcacccggggguccccgugaaguggaagcgcugaggacuaguaauaaggaaacuguaugaaugucugugggcaggaagugaagagauccuucuguaaagguuuuuggaauuaugucugcugaauaauaaacuuuuuugaaauaauaaaucugguagaaaaaugagaucucaaaggcucuuuucagagccaccaaaaaaaaaaaaaaaaaaaaaaaaaaaaaaaaaaaaaaaaaaaaaaaaaaaaaaaaaaaaaaaaagaauu

SEQ ID NO: 35760 - RNA, 1778 nt, Artificial Sequence
  mRNA product Design b-4 (hSL-A64-N5) comprising derived and/or modified sequence from LASV(Lassa virus/H.sapiens-wt/NGA/2016/ISTH_0009;Clade II)__AVO03571__GPCmut9 (opt1)
aggagagucccgcagucggcguccagcggcucugcuuguucgugugugugucguugcaggccuuauucaagcuuaccaugggccagaucaucaccuucuuccaggaggugccccacgucaucgaggaggugaugaacaucgugcugaucgcccucagccugcuggccauccucaaggggaucuacaacgucgcgaccugcggccugcuggggcucguguccuuccugcugcucugcggccgcagcugcuccacgaccuacaaggggguguacgagcugcagacccuggagcucgacauggccagccugaacaugaccaugccgcuguccugcacgaagaacaacagccaccacuacaucauggucggcaacgagaccggccucgagcugacccugaccaacacguccaucaucaaccacaaguucugcaaccucagcgacgcccacaagaagaaccuguacgaccacgcccugauguccaucaucagcaccuuccaccucuccauccccaacuucaaccaguacgaggccaugagcugcgacuucaacgggggccggaucuccgugcaguacaaccugagccacuccuacgcgguggacgccgccaaccacugcgggaccaucgccaacggcguccugcagaccuucaugcgcauggcguggggcgggagcuacaucgcccucgacuccggcugcgggagcugggacugcaucaugacguccuaccaguaccugaucauccagaacaccaccugggaggaccacugccaguucagccggcccagccccaucggcuaccuggggcuccugucccagcgcacccgggacaucuacaucagccgccggcugcucggcacguucaccuggacccuguccgacagcgagggcaacgagacccccgggggcuacugccugacgcgcuggaugcucaucgaggccgagcugaagugcuucgggaacaccgccguggccaagugcaacgagaagcacgacgaggaguucugcgacaugcugcggcuguucgacuucaacaagcaggcgauccgccggcugaagaccgaggcccagauguccauccagcugaucaacaaggccgugaacgcccucaucaacgaccagcugaucaugaagaaccaccuccgcgacaucaugugcaucccguacugcaacuacagcaaguacugguaccucaaccacaccgucacggggaagaccucccugccccggugcuggcuggugagcaacggcuccuaccucaacgagacccacuucagcgacgacaucgagcagcaggccgacaacaugaucaccgagcugcugcagaaggaguacaucgaccgccagggcaagacgccccucgggcugguggaccuguucgucuucuccaccagcuucuaccugaucuccaucuuccuccaccuggugaagaucccgacccaccggcacaucaccggcaagcccugccccaagccccaccgccugaaccacauggggaucugcagcugcggccucuacaaccacccgggggugcccgucaaguggaagcggugaggacuaguaauaaggaaacuguaugaaugucugugggcaggaagugaagagauccuucuguaaagguuuuuggaauuaugucugcugaauaauaaacuuuuuugaaauaauaaaucugguagaaaaaugagaucucaaaggcucuuuucagagccaccaaaaaaaaaaaaaaaaaaaaaaaaaaaaaaaaaaaaaaaaaaaaaaaaaaaaaaaaaaaaaaaaagaauu

SEQ ID NO: 35761 - RNA, 1778 nt, Artificial Sequence
  mRNA product Design b-4 (hSL-A64-N5) comprising derived and/or modified sequence from LASV(Lassa virus/H.sapiens-wt/NGA/2016/ISTH_0017;Clade II)__AVO03567__GPCmut9 (opt1)
aggagagucccgcagucggcguccagcggcucugcuuguucgugugugugucguugcaggccuuauucaagcuuaccaugggccagaucaucaccuucuuccaggaggugccccacgucaucgaggaggugaugaacaucgugcugaucgcccucagccugcuggccauccucaaggggaucuacaacgucgcgaccugcggccuguucgggcugguguccuuccuccugcugugcggccgcagcugcuccacgaccuacaaggggguguacgagcuccagacccuggagcuggacauggccagccucaacaugaccaugccgcuguccugcacgaagaacaacagccaccacuacaucauggucggcaacgagaccggccuggagcucacccugaccaacacguccaucaucaaccacaaguucugcaaccugagcgacgcccacaagaagaaccucuacgaccacgcccugauguccaucaucagcaccuuccaccuguccauccccaacuucaaccaguacgaggccaugagcugcgacuucaacgggggcaagaucuccgugcaguacaaccucagccacaccuacgcgaucgacgccgccaaccacugcgggaccaucgccaacggcgugcugcagacguucaugcggauggcguggggcggguccuacaucgcccuggacagcggcugcggguccugggacugcaucaugaccagcuaccaguaccucaucauccagaacaccaccugggaggaccacugccaguucucccgccccagccccaucggcuaccuggggcugcucagccagcggacgcgcgacaucuacaucucccggcgccugcugggcaccuucaccuggacccucagcgacuccgagggcaacgagacgcccgggggcuacugccugacccgguggaugcugaucgaggccgagcucaagugcuucgggaacaccgccgucgccaagugcaacgagaagcacgacgaggaguucugcgacaugcugcgccuguucgacuucaacaagcaggcgauccggcgccucaagaccgaggcccagaugagcauccagcugaucaacaaggccgugaacgcccugaucaacgaccagcucaucaugaagaaccaccuccgggacaucaugugcauccccuacugcaacuacuccaaguacugguaccugaaccacacggugaccgggaagaccagccugccccgcugcuggcuggucuccaacggcagcuaccugaacgagacccacuucuccgacgacaucgagcagcaggccgacaacaugaucacggagcuccugcagaaggaguacauggaccggcagggcaagaccccgcuggggcucguggaccuguucguguucagcaccuccuucuaccugaucagcaucuuccugcaccucguccgcaucccgacccaccggcacgugaucggcaagcccugccccaagccccaccgccugaaccacauggggaucugcuccugcggccuguacaagcacccgggggugcccgucaaguggaagcggugaggacuaguaauaaggaaacuguaugaaugucugugggcaggaagugaagagauccuucuguaaagguuuuuggaauuaugucugcugaauaauaaacuuuuuugaaauaauaaaucugguagaaaaaugagaucucaaaggcucuuuucagagccaccaaaaaaaaaaaaaaaaaaaaaaaaaaaaaaaaaaaaaaaaaaaaaaaaaaaaaaaaaaaaaaaaagaauu

SEQ ID NO: 35762 - RNA, 1778 nt, Artificial Sequence
  mRNA product Design b-4 (hSL-A64-N5) comprising derived and/or modified sequence from LASV(Lassa virus/H.sapiens-wt/NGA/2018/ISTH_0959;Clade II)__AVV65099__GPCmut9 (opt1)
aggagagucccgcagucggcguccagcggcucugcuuguucgugugugugucguugcaggccuuauucaagcuuaccaugggccagaucaucaccuucuuccaggaggugccccacgucaucgaggaggugaugaacaucgugcugaucgcccucagccugcuggccauccucaaggggaucuacaacgucgugaccugcggccuguucgggcugguguccuuccuccugcugugcggccgcagcugcuccacgaccuacaagggggucuacgagcuccagacccuggagcuggacauggcgagccucaacaugaccaugccgcuguccugcacgaagaacaacagccaccacuacaucauggugggcaacgagaccggccuggagcucacccugaccaacacguccaucaucaaccacaaguucugcaaccugagcgacgcccacaagaagaaccucuacgaccacgcccugauguccaucaucagcaccuuccaccuguccauccccaacuucaaccaguacgaggccaugagcugcgacuucaacgggggcaagaucuccgugcaguacaaccucagccacgccuacgcgaucgacgccgccaaccacugcgggaccaucgccaacggcguccugcagaccuucaugcggauggcguggggcggguccuacaucgcccuggacagcggcugcggguccugggacugcaucaugacgagcuaccaguaccucaucauccagaacaccaccugggaggaccacugccaguucucccgccccagccccaucggcuaccuggggcugcucagccagcggacccgcgacaucuacaucucccggcgccugcugggcacguucaccuggacccucagcgacuccgagggcaacgagacccccgggggcuacugccugacgcgguggaugcugaucgaggccgagcucaagugcuucgggaacaccgccguggccaagugcaacgagaagcacgacgaggaguucugcgacaugcugcgccuguucgacuucaacaagcaggcgauccggcgccucaagaccgaggcccagaugagcauccagcugaucaacaaggccgugaacgcccugaucaacgaccagcucaucaugaagaaccaccuccgggacaucaugugcaucccguacugcaacuacuccaaguacugguaccugaaccacaccgucacggggaagaccagccugccccgcugcuggcugguguccaacggcagcuaccugaacgagacccacuucuccgacgacaucgagcagcaggccgacaacaugaucaccgagcuccugcagaaggaguacaucgaccggcagggcaagacgccccuggggcucguggaccuguucgucuucagcaccuccuucuaccugaucagcaucuuccugcaccucgugaagaucccgacccaccgccacgugaucggcaagcccugccccaagccccaccggcugaaccacauggggaucugcuccugcggccuguacaagcacccggggguccccgugaaguggaagcgcugaggacuaguaauaaggaaacuguaugaaugucugugggcaggaagugaagagauccuucuguaaagguuuuuggaauuaugucugcugaauaauaaacuuuuuugaaauaauaaaucugguagaaaaaugagaucucaaaggcucuuuucagagccaccaaaaaaaaaaaaaaaaaaaaaaaaaaaaaaaaaaaaaaaaaaaaaaaaaaaaaaaaaaaaaaaaagaauu

SEQ ID NO: 35763 - RNA, 1778 nt, Artificial Sequence
  mRNA product Design b-4 (hSL-A64-N5) comprising derived and/or modified sequence from LASV(LASV003-NIG-2008;Clade II)__AIT17580__GPCmut9 (opt1)
aggagagucccgcagucggcguccagcggcucugcuuguucgugugugugucguugcaggccuuauucaagcuuaccaugggccagaucaucaccuucuuccaggaggugccccacgucaucgaggaggugaugaacaucgugcugaucgcccucagccugcuggccauccucaaggggaucuacaacgucgcgaccugcggccuguucgggcugguguccuuccuccugcugugcggccgcagcugcuccacgaccuacaaggggguguacgagcuccagacccuggagcuggacauggccagccucaacaugaccaugccgcuguccugcacgaagaacaacagccaccacuacaucauggucggcaacgagaccggccuggagcucacccugaccaacacguccaucaucaaccacaaguucugcaaccugagcgacgcccacaagaagaaccucuacgaccacgcccugauguccaucaucagcaccuuccaccuguccauccccaacuucaaccaguacgaggccaugagcugcgacuucaacgggggcaagaucuccgugcaguacaaccucagccacaccuacgcgguggacgccgccaaccacugcgggaccaucgccaacggcguccugcagacguucaugcggauggcguggggcggguccuacaucgcccuggacagcggcugcggguccugggacugcaucaugaccagcuaccaguaccucaucauccagaacaccaccugggaggaccacugccaguucucccgccccagccccaucggcuaccuggggcugcucagccagcggacgcgcgacaucuacaucucccggcgccugcugggcaccuucaccuggacccucagcgacuccgagagcaacgagacgccgggcggguacugccugacccgguggaugcugaucgaggccgagcucaagugcuucggcaacaccgccguggccaagugcaacgagaagcacgacgaggaguucugcgacaugcugcgccuguucgacuucaacaagcaggcgauccggcgccucaaggccgaggcccagauguccauccagcugaucaacaaggccgugaacgcccugaucaacgaccagcucaucaugaagaaccaccuccgggacaucaugugcauccccuacugcaacuacagcaaguacugguaccugaaccacaccgucacgggccgcaccucccugccccggugcuggcuggugagcaacggguccuaccugaacgagacccacuucagcgacgacaucgagcagcaggcggacaacaugaucaccgagcuccugcagaaggaguacauggaccgccagggcaagacgccccugggccucguggaccuguucgucuucuccaccagcuucuaccugaucuccaucuuccugcaccucgugaagaucccgacccaccggcacgugaucgggaagcccugccccaagccccaccgccugaaccacaugggcaucugcagcugcgggcuguacaagcacccgggcguccccgugaaguggaagcggugaggacuaguaauaaggaaacuguaugaaugucugugggcaggaagugaagagauccuucuguaaagguuuuuggaauuaugucugcugaauaauaaacuuuuuugaaauaauaaaucugguagaaaaaugagaucucaaaggcucuuuucagagccaccaaaaaaaaaaaaaaaaaaaaaaaaaaaaaaaaaaaaaaaaaaaaaaaaaaaaaaaaaaaaaaaaagaauu

SEQ ID NO: 35764 - RNA, 1778 nt, Artificial Sequence
  mRNA product Design b-4 (hSL-A64-N5) comprising derived and/or modified sequence from LASV(LASV035-NIG-2009;Clade II)__AIT17588__GPCmut9 (opt1)
aggagagucccgcagucggcguccagcggcucugcuuguucgugugugugucguugcaggccuuauucaagcuuaccaugggccagaucaucaccuucuuccaggaggugccccacgucaucgaggaggugaugaacaucgugcugaucgcccucagccugcuggccauccucaaggggaucuacaacgucgcgaccugcggccuguucgggcugguguccuuccuccugcugugcggccgcagcugcuccacgaccuacaaggggguguacgagcuccagacccuggagcuggacauggccagccucaacaugaccaugccgcuguccugcacgaagaacaacagccaccacuacaucauggucggcaacgagaccggccuggagcucacccugaccaacacguccaucaucaaccacaaguucugcaaccugagcgacgcccacaagaagaaccucuacgaccacgcccugauguccaucaucagcaccuuccaccuguccauccccaacuucaaccaguacgaggccaugagcugcgacuucaacgggggcaagaucuccgugcaguacaaccucagccacgcguacgccguggacgccgccaaccacugcgggaccaucgcgaacggcguccugcagaccuucaugcggauggccuggggcggguccuacaucgcccuggacagcggcugcggguccugggacugcaucaugacgagcuaccaguaccucaucauccagaacaccaccugggaggaccacugccaguucucccgccccagccccaucggcuaccuggggcugcucagccagcggacccgcgacaucuacaucucccggcgccugcugggcacguucaccuggacccucagcgacuccgagggcaacgagacccccgggggcuacugccugacgcgguggaugcugaucgaggccgagcucaagugcuucgggaacaccgccguggcgaagugcaacgagaagcacgacgaggaguucugcgacaugcugcgccuguucgacuucaacaagcaggccauccggcgccucaaggccgaggcccagaugagcauccagcugaucaacaaggccgugaacgcgcugaucaacgaccagcucaucaugaagaaccaccuccgggacaucaugugcauccccuacugcaacuacuccaaguacugguaccugaaccacaccgucaccgggaagacgagccugccccgcugcuggcugguguccaacggcagcuaccugaacgagacccacuucuccgacgacaucgagcagcaggccgacaacaugaucaccgagcuccugcagaaggaguacaucgaccggcagggcaagaccccgcuggggcucguggaccuguucgucuucagcacguccuucuaccugaucagcaucuuccugcaccucgugaagaucccgacccaccgccacgugaucggcaagcccugccccaagccccaccggcugaaccacauggggaucugcuccugcggccuguacaagcacccggggguccccgugaaguggaagcgcugaggacuaguaauaaggaaacuguaugaaugucugugggcaggaagugaagagauccuucuguaaagguuuuuggaauuaugucugcugaauaauaaacuuuuuugaaauaauaaaucugguagaaaaaugagaucucaaaggcucuuuucagagccaccaaaaaaaaaaaaaaaaaaaaaaaaaaaaaaaaaaaaaaaaaaaaaaaaaaaaaaaaaaaaaaaaagaauu

SEQ ID NO: 35765 - RNA, 1778 nt, Artificial Sequence
  mRNA product Design b-4 (hSL-A64-N5) comprising derived and/or modified sequence from LASV(LASV1000-NIG-2009;Clade II)__AIT17782__GPCmut9 (opt1)
aggagagucccgcagucggcguccagcggcucugcuuguucgugugugugucguugcaggccuuauucaagcuuaccaugggccagaucaucaccuucuuccaggaggugccccacgucaucgaggaggugaugaacaucgugcugaucgcccucagccugcuggccauccucaaggggaucuacaacgucgcgaccugcggccuguucgggcugguguccuuccuccugcugugcggccgcagcugcuccacgaccuacaaggggguguacgagcuccagacccuggagcuggacauggccagccucaacaugaccaugccgcuguccugcacgaagaacaacagccaccacuacaucauggucggcaacgagaccggccuggagcucacccugaccaacacguccaucaucaaccacaaguucugcaaccugagcgacgcccacaagaagaaccucuacgaccacgcccugauguccaucaucagcaccuuccaccuguccauccccaacuucaaccaguacgaggccaugagcugcgacuucaacgggggcaagaucuccgugcaguacaaccucagccacaccuacgcgguggacgccgccaaccacugcgggaccaucgccaacggcguccugcagacguucaugcggauggcguggggcggguccuacaucgcccuggacagcggcugcggguccugggacugcaucaugaccagcuaccaguaccucaucauccagaacaccaccugggaggaccacugccaguucucccgccccagccccaucggcuaccuggggcugcucagccagcggacgcgcgacaucuacaucucccggcgccugcugggcaccuucaccuggacccucagcgacuccgagggcaacgagacgcccgggggcuacugccugacccgguggaugcugaucgaggccgagcucaagugcuucgggaacaccgccguggccaagugcaacgagaagcacgacgaggaguucugcgacaugcugcgccuguucgacuucaacaagcaggcgaucaagcggcucaagaccgaggcccagaugagcauccagcugaucaacaaggccgugaacgcccugaucaacgaccagcucaucaugaagaaccaccuccgcgacaucaugugcauccccuacugcaacuacuccaaguacugguaccugaaccacacggucaccgggaagaccagccugccccggugcuggcugguguccaacggcagcuaccugaacgagacccacuucuccgacgacaucgagcagcaggccgacaacaugaucacggagcuccugcagaaggaguacaucgaccgccagggcaagaccccgcuggggcucguggaccuguucgucuucagcaccuccuucuaccugaucagcaucuuccugcaccucgugaagaucccgacccaccggcacguggucggcaagcccugccccaagccccaccgccugaaccacauggggaucugcuccugcggccuguacaagcacccgggggugcccgugaaguggaagcggugaggacuaguaauaaggaaacuguaugaaugucugugggcaggaagugaagagauccuucuguaaagguuuuuggaauuaugucugcugaauaauaaacuuuuuugaaauaauaaaucugguagaaaaaugagaucucaaaggcucuuuucagagccaccaaaaaaaaaaaaaaaaaaaaaaaaaaaaaaaaaaaaaaaaaaaaaaaaaaaaaaaaaaaaaaaaagaauu

SEQ ID NO: 35766 - RNA, 1778 nt, Artificial Sequence
  mRNA product Design b-4 (hSL-A64-N5) comprising derived and/or modified sequence from LASV(LASV221-NIG-2010;Clade II)__AIT17624__GPCmut9 (opt1)
aggagagucccgcagucggcguccagcggcucugcuuguucgugugugugucguugcaggccuuauucaagcuuaccaugggccagaucaucaccuucuuccaggaggugccccacgucaucgaggaggugaugaacaucgugcugaucgcccucagccugcuggccauccucaaggggaucuacaacgucgcgaccugcggccuguucgggcugguguccuuccuccugcugugcggccgcagcugcuccacgaccuacaaggggguguacgagcuccagacccuggagcuggacauggccagccucaacaugaccaugccgcuguccugcacgaagaacaacagccaccacuacaucauggucggcaacgagaccggccuggagcucacccugaccaacacguccaucaucaaccacaaguucugcaaccugagcgacgcccacaagaagaaccucuacgaccacgcccugauguccaucaucagcaccuuccaccuguccauccccaacuucaaccaguacgaggccaugagcugcgacuucaacgggggcaagaucuccgugcaguacaaccucagccacaccuacgcgaucgacgccgccaaccacugcgggaccaucgccaacggcgugcugcagacguucaugcggauggcguggggcggguccuacaucgcccuggacagcggcugcggguccugggacugcaucaugaccagcuaccaguaccucaucauccagaacaccaccugggaggaccacugccaguucucccgccccagccccaucggcuaccuggggcugcucagccagcggacgcgcgacaucuacaucucccggcgccugcugggcaccuucaccuggacccucagcgacuccgagggcaacgagacgcccgggggcuacugccugacccgguggaugcugaucgaggccgagcucaagugcuucgggaacaccgccgucgccaagugcaacgagaagcacgacgaggaguucugcgacaugcugcgccuguucgacuucaacaagcaggcgauccggcgccucaagaccgaggcccagaugagcauccagcugaucaacaaggccgugaacgcccugaucaacgaccagcucaucaugaagaaccaccuccgggacaucaugugcauccccuacugcaacuacuccaaguacugguaccugaaccacacggugaccgggaagaccagccugccccgcugcuggcuggucuccaacggcagcuaccugaacgagacccacuucuccgacgacaucgagcagcaggccgacaacaugaucacggagaugcuccagaaggaguacauggaccggcagggcaagaccccgcuggggcugguggaccucuucguguucagcaccuccuucuaccugaucagcaucuuccugcaccuggucaagaucccgacccaccgccacgugaucggcaagcccugccccaagccccaccggcucaaccacauggggaucugcuccugcggccuguacaagcacccgggggugcccgucaaguggaagcgcugaggacuaguaauaaggaaacuguaugaaugucugugggcaggaagugaagagauccuucuguaaagguuuuuggaauuaugucugcugaauaauaaacuuuuuugaaauaauaaaucugguagaaaaaugagaucucaaaggcucuuuucagagccaccaaaaaaaaaaaaaaaaaaaaaaaaaaaaaaaaaaaaaaaaaaaaaaaaaaaaaaaaaaaaaaaaagaauu

SEQ ID NO: 35767 - RNA, 1778 nt, Artificial Sequence
  mRNA product Design b-4 (hSL-A64-N5) comprising derived and/or modified sequence from LASV(LASV237-NIG-2010;Clade II)__AIT17638__GPCmut9 (opt1)
aggagagucccgcagucggcguccagcggcucugcuuguucgugugugugucguugcaggccuuauucaagcuuaccaugggccagaucaucaccuucuuccaggaggugccccacgucaucgaggaggugaugaacaucgugcugaucgcccucagccugcuggccauccucaaggggaucuacaacgucgcgaccugcggccuguucgggcugguguccuuccuccugcugugcggccgcagcugcuccacgaccuacaaggggguguacgagcuccagacccuggagcuggacauggccagccucaacaugaccaugccgcuguccugcacgaagaacaacagccaccacuacaucauggucggcaacgagaccggccuggagcucacccugaccaacacguccaucaucaaccacaaguucugcaaccugagcgacgcccacaagaaggaccucuacgaccacgcccugauguccaucaucagcaccuuccaccuguccauccccaacuucaaccaguacgaggccaugagcugcgacuucaacgggggcaagaucuccgugcaguacaaccucagccacaccuacgcgguggacgccgccaaccacugcgggaccaucgccaacggcguccugcagacguucaugcggauggcguggggcggguccuacaucgcccuggacagcggcugcggguccugggacugcaucaugaccagcuaccaguaccucaucauccagaacaccaccugggaggaccacugccaguucucccgccccagccccaucggcuaccuggggcugcucagccagcggacgcgcgacaucuacaucucccggcgccugcugggcaccuucaccuggacccucagcgacuccgagggcaacgagacgcccgggggcuacugccugacccgguggaugcugaucgaggccgagcucaagugcuucgggaacaccgccguggccaagugcaacgagaagcacgacgaggaguucugcgacaugcugcgccuguucgacuucaacaagcaggcgauccggcgccucaagaccgaggcccagaugagcauccagcugaucaacaaggccgugaacgcccugaucaacgaccagcucaucaugaagaaccaccuccgggacaucaugugcauccccuacugcaacuacuccaaguacugguaccugaaccacacggucaccgggaagaccagccugccccgcugcuggcugguguccaacggcagcuaccugaacgagacccacuucuccgacgacaucgagcagcaggccgacaacaugaucacggagcuccugcagaaggaguacauggaccggcagggcaagaccccgcuggggcucguggaccuguucgucuucagcaccuccuucuaccugaucagcaucuuccugcaccucaucaagaucccgacccaccgccacaucacgggcaagcccugccccaagccccaccggcugaaccacauggggaucugcuccugcggccuguacaagcacccgggggugcccgugaaguggaagcgcugaggacuaguaauaaggaaacuguaugaaugucugugggcaggaagugaagagauccuucuguaaagguuuuuggaauuaugucugcugaauaauaaacuuuuuugaaauaauaaaucugguagaaaaaugagaucucaaaggcucuuuucagagccaccaaaaaaaaaaaaaaaaaaaaaaaaaaaaaaaaaaaaaaaaaaaaaaaaaaaaaaaaaaaaaaaaagaauu

SEQ ID NO: 35768 - RNA, 1778 nt, Artificial Sequence
  mRNA product Design b-4 (hSL-A64-N5) comprising derived and/or modified sequence from LASV(LASV253-NIG-2011;Clade II)__AIT17670__GPCmut9 (opt1)
aggagagucccgcagucggcguccagcggcucugcuuguucgugugugugucguugcaggccuuauucaagcuuaccaugggccagaucaucaccuucuuccaggaggugccccacgucaucgaggaggugaugaacaucgugcugaucgcccucagccugcuggccauccucaaggggaucuacaacgucgcgaccugcggccuguucgggcugguguccuuccuccugcugugcggccgcagcugcuccacgaccuacaaggggguguacgagcuccagacccuggagcuggacauggccagccucaacaugaccaugccgcuguccugcacgaagaacaacagccaccacuacaucauggucggcaacgagaccggccuggagcucacccugaccaacacguccaucaucaaccacaaguucugcaaccugagcgacgcccacaagaagaaccucuacgaccacgcccugauguccaucaucagcaccuuccaccuguccauccccaacuucaaccaguacgaggccaugagcugcgacuucaacgggggcaagaucuccgugcaguacaaccucagccacaccuacgcgguggacgccgccaaccacugcgggaccaucgccaacggcguccugcagacguucaugcggauggcguggggcggguccuacaucgcccuggacagcggcugcggguccugggacugcaucaugaccagcuaccaguaccucaucauccagaacaccaccugggaggaccacugccaguucucccgccccagccccaucggcuaccuggggcugcucagccagcggacgcgcgacaucuacaucucccggcgccugcugggcaccuucaccuggacccucagcgacuccgagggcaacgagacgcccgggggcuacugccugacccgguggaugcugaucgaggccgagcucaagugcuucgggaacaccgccguggccaagugcaacgagaagcacgacgaggaguucugcgacaugcugcgccuguucgacuucaacaagcaggcgauccggcgccucaaggccgaggcccagaugagcauccagcugaucaacaaggccgugaacgcccugaucaacgaccagcucaucaugaagaaccaccuccgggacaucaugugcaucccguacugcaacuacuccaaguacugguaccugaaccacaccgucacggggcgcaccagccugccccggugcuggcugguguccaacggcagcuaccugaacgagacccacuucuccgacgacaucgagcagcaggcggacaacaugaucaccgagcuccugcagaaggaguacaucgaccgccagggcaagacgccccuggggcucguggaccuguucgucuucagcaccuccuucuaccugaucagcaucuuccugcaccucgugaagaucccgacccaccggcacaucaucggcaagcccugccccaagccccaccgccugaaccacauggggaucugcuccugcggccuguacaagcacccgggggugcccgucaaguggaagcggugaggacuaguaauaaggaaacuguaugaaugucugugggcaggaagugaagagauccuucuguaaagguuuuuggaauuaugucugcugaauaauaaacuuuuuugaaauaauaaaucugguagaaaaaugagaucucaaaggcucuuuucagagccaccaaaaaaaaaaaaaaaaaaaaaaaaaaaaaaaaaaaaaaaaaaaaaaaaaaaaaaaaaaaaaaaaagaauu

SEQ ID NO: 35769 - RNA, 1778 nt, Artificial Sequence
  mRNA product Design b-4 (hSL-A64-N5) comprising derived and/or modified sequence from LASV(LASV254-NIG-2011;Clade II)__AIT17674__GPCmut9 (opt1)
aggagagucccgcagucggcguccagcggcucugcuuguucgugugugugucguugcaggccuuauucaagcuuaccaugggccagaucaucaccuucuuccaggaggugccccacgucaucgaggaggugaugaacaucgugcugaucgcccucagccugcuggccauccucaaggggaucuacaacgucgcgaccugcggccuguucgggcugguguccuuccuccugcugugcggccgcagcugcuccacgaccuacaaggggguguacgagcuccagacccuggagcuggacaugaccaaccucaacaugacgaugccgcugagcugcaccaagaacaacucccaccacuacaucauggucggcaacgagaccggccuggagcucacccugacgaacaccagcaucaucaaccacaaguucugcaaccuguccgacgcccacaagaagaaccucuacaaccacgcccugaugagcaucaucuccaccuuccaccugagcauccccaacuucaaccaguacgaggccauguccugcgacuucaacgggggcaagaucagcgugcaguacaaccucucccacagcuacgccguggacgcggccaaccacugcgggaccaucgccaacggcguccugcagacguucaugcggauggccuggggcggguccuacaucgcgcuggacagcggcugcgggaacugggacugcaucaugaccuccuaccaguaccucaucauccagaacaccaccugggaggaccacugccaguucagccgccccucccccaucggcuaccuggggcugcucagccagcggacgcgcgacaucuacaucagccggcgccugcugggcaccuucaccuggacccucuccgacagcgagggcaacgagacgcccgggggcuacugccugacccgguggaugcugaucgaggccgagcucaagugcuucgggaacaccgccguggccaagugcaacgagaagcacgacgaggaguucugcgacaugcugcgccuguucgacuucaacaagcaggccauccggcgccucaagaccgaggcgcaggccaacauccagcugaucaacaaggccgugaacgcccugaucaacgaccagcucaucaugaagaaccaccuccgggacaucaugugcauccccuacugcaacuacuccaaguacugguaccugaaccacacggucaccgggaagaccagccugccccgcugcuggcugguguccaacggcagcuaccugaacgagacccacuucuccgacgacaucgagcagcaggccgacaacaugaucacggagcuccugcagaaggaguacauggaccggcagggcaagaccccgcuggggcucguggaccuguucgucuucagcaccuccuucuaccugaucagcaucuuccugcaccucgugaagaucccgacccaccgccacgugaucggcaagcccugccccaagccccaccggcugaaccacauggggaucugcuccugcggccuguacaagcacccggggguccccgugaaguggaagcgcugaggacuaguaauaaggaaacuguaugaaugucugugggcaggaagugaagagauccuucuguaaagguuuuuggaauuaugucugcugaauaauaaacuuuuuugaaauaauaaaucugguagaaaaaugagaucucaaaggcucuuuucagagccaccaaaaaaaaaaaaaaaaaaaaaaaaaaaaaaaaaaaaaaaaaaaaaaaaaaaaaaaaaaaaaaaaagaauu

SEQ ID NO: 35770 - RNA, 1778 nt, Artificial Sequence
  mRNA product Design b-4 (hSL-A64-N5) comprising derived and/or modified sequence from LASV(Nig08-A19;Clade III)__ADU56618__GPCmut9 (opt1)
aggagagucccgcagucggcguccagcggcucugcuuguucgugugugugucguugcaggccuuauucaagcuuaccaugggccagaucgugaccuucuuccaggaggucccccacgugaucgaggaggugaugaacaucguccugaucgcccucagcauccuggccauccugaaggggcucuacaacaucgcgaccugcggccugaucgggcuggugacguuccuccugcuguccggccgcagcugcuccaugaccuacaaggggguguacgagcuccagacccuggagcugaacaugaacacccucaacaugacgaugccgcugagcugcaccaagaacaacucccaccacuacaucauggucggcaacgagaccggccuggagcucacccugacgaacaccagccugcuccaccacaaguucugcaaccuguccgacgcccacaagaagaaccuguacgaccacacccucaugagcaucaucuccaccuuccaccugagcauccccaacuucaaccaguacgaggccauguccugcgacuucaacgggggcaagaucacggugcaguacaaccugagccacuccuacgccaucgacgccgcgaaccacugcgggaccguggccaacggcguccuccagaccuucaugcggauggccuggggcgggagcuacaucgcccuggacuccggcugcgggaagugggacugcaucaugaccagcuaccaguaccugaucauccagaacacgaccugggaggaccacugccaguucucccggcccagccccaucggcuaccucgggcugcugucccagcgcacccgggacaucuacaucagccgccggcuccugggcaccuucacguggacccugagcgacuccgagggcaacgagacccccgggggcuacugccucacccgcuggaugcugaucgaggcggagcugaagugcuucgggaacacggccguggccaagugcaacgagaagcacgacgaggaguucugcgacaugcuccggcuguucgacuucaacaagcaggccauccgccggcugaaggccgaggcgcagaugagcauccagcucaucaacaaggccgugaacgcccugaucaacgaccagcugaucaugaagaaccaccuccgcgacaucaugugcauccccuacugcaacuacuccaaguacugguaccugaaccacaccagcaccgggcggaccucccugccccgcugcuggcucgucagcaacggcuccuaccugaacgagacgcacuucagcgacgacaucgagcagcaggccgacaacaugaucaccgagaugcugcagaaggaguaccucgaccggcagggcaagaccccgcuggggcugguggaccuguucguguucuccaccagcuucuaccucaucuccaucuuccugcaccuggucaagaucccgacgcaccgccacaucgugggcaagcccugccccaagccccaccggcucaaccacauggggaucugcagcugcggccuguacaagcagccgggggugcccguccgcuggaagcggugaggacuaguaauaaggaaacuguaugaaugucugugggcaggaagugaagagauccuucuguaaagguuuuuggaauuaugucugcugaauaauaaacuuuuuugaaauaauaaaucugguagaaaaaugagaucucaaaggcucuuuucagagccaccaaaaaaaaaaaaaaaaaaaaaaaaaaaaaaaaaaaaaaaaaaaaaaaaaaaaaaaaaaaaaaaaagaauu

SEQ ID NO: 35771 - RNA, 1781 nt, Artificial Sequence
  mRNA product Design b-4 (hSL-A64-N5) comprising derived and/or modified sequence from LASV(G1180-SLE-2010;Clade IV)__AIT17168__GPCmut9 (opt1)
aggagagucccgcagucggcguccagcggcucugcuuguucgugugugugucguugcaggccuuauucaagcuuaccaugggccagaucgugaccuucuuccaggaggucccccacgugaucgaggaggugaugaacaucguccugaucgcccucagcauccuggccgugcugaaggggcucuacaacuucgcgaccugcggccugguggggcugcucaccuuccugcugcucugcggccgcuccugcaccgccagccgguacaagggggucuacgagcugcagacccuggagcucaacauggagacccugaacaugacgaugccgcuguccugcaccaagaacaacagccaccacuacaucauggugggcaacgagaccggccucgagcugacccugacgaacaccuccaucaucaaccacaaguucugcaaccucagcgacgcccacaagaagaaccuguacgaccacgcccugauguccaucaucagcaccuuccaccucuccauccccaacuucaaccaguacgaggccaugagcugcgacuucaacgggggcaagaucuccgugcaguacaaccugagccacuccuacgcgggggacgccgccaaccacugcggcaccgucgccaacggggugcugcagacguucaugcgcauggcguggggcggcagcuacaucgcccucgacuccgggugcggcagcugggacugcaucaugaccuccuaccaguaccugaucauccagaacaccaccugggaggaccacugccaguucagccggcccucccccaucggguaccugggccuccugagccagcgcacgcgggacaucuacaucagccgccggcugcucggcaccuucaccuggacccuguccgacagcgaggggaaggacacgccgggcggguacugccugacccgcuggaugcucaucgaggccgagcugaagugcuucggcaacaccgccguggccaagugcaacgagaagcacgacgaggaguucugcgacaugcugcggcuguucgacuucaacaagcaggcgauccagcgccugaaggccgaggcccagauguccauccagcugaucaacaaggccgucaacgcccucaucaacgaccagcugaucaugaagaaccaccuccgggacaucaugugcauccccuacugcaacuacagcaaguacugguaccucaaccacaccacgaccggcaagaccucccugcccaagugcuggcuggugagcaacggcuccuaccucaacgagacccacuucagcgacgacaucgagcagcaggcggacaacaugaucacggagaugcugcagaaggaguacauggagcgccaggggaagacgccccugggccucguggaccuguucgucuucuccaccagcuucuaccugaucuccaucuuccugcaccucgugaagaucccgacccaccggcacaucgugggcaagagcugccccaagccccaccgccugaaccacauggggaucugcuccugcgggcuguacaagcagcccggcgucccggugaaguggaagcggugaggacuaguaauaaggaaacuguaugaaugucugugggcaggaagugaagagauccuucuguaaagguuuuuggaauuaugucugcugaauaauaaacuuuuuugaaauaauaaaucugguagaaaaaugagaucucaaaggcucuuuucagagccaccaaaaaaaaaaaaaaaaaaaaaaaaaaaaaaaaaaaaaaaaaaaaaaaaaaaaaaaaaaaaaaaaagaauu

SEQ ID NO: 35772 - RNA, 1781 nt, Artificial Sequence
  mRNA product Design b-4 (hSL-A64-N5) comprising derived and/or modified sequence from LASV(G1442-SLE-2011;Clade IV)__AIT17180__GPCmut9 (opt1)
aggagagucccgcagucggcguccagcggcucugcuuguucgugugugugucguugcaggccuuauucaagcuuaccaugggccagaucgugaccuucuuccaggaggucccccacgugaucgaggaggugaugaacaucguccugaucgcccucagcauccuggccgugcugaaggggcucuacaacguggcgaccugcggccugaucgggcuggucacguuccuccugcugugcggccgcuccugcaccaccacccucuacaaggggguguacgagcugcagacgcuggagcucaacauggagacccugaacaugaccaugccgcugagcugcaccaagaacaacucccaccacuacauccgggugggcaacgagacgggccucgagcugacccugaccaacaccagcaucaucaaccacaaguucugcaaccucuccgacgcccacaagaagaaccuguacgaccacgcccugaugagcaucaucuccacguuccaccucagcauccccaacuucaaccaguacgaggccauguccugcgacuucaacgggggcaagaucagcguccaguacaaccugucccacagcuacgccggggacgcggccaaccacugcggcaccguggccaacggggugcugcagaccuucaugcgcauggccuggggcggcuccuacaucgcgcucgacagcgggugcggcaacugggacugcaucaugaccuccuaccaguaccugaucauccagaacacgaccugggacgaccacugccaguucagccgccccucccccaucggguaccugggccuccugagccagcggacccgcgacgucuacaucucccggcgccugcucggcaccuucacguggacccugagcgacagcgaggggaaggacaccccgggcggguacugccugacccgguggaugcucaucgaggccgagcugaagugcuucggcaacacggccguggccaagugcaacgagaagcacgacgaggaguucugcgacaugcugcgccucuucgacuucaacaagcaggccauccagcggcugaaggcggaggcccagauguccauccagcugaucaacaaggccgugaacgcccucaucaacgaccagcugaucaugaagaaccaccuccgcgacaucaugugcauccccuacugcaacuacagcaaguacugguaccugaacaacaccgccaccggcaagaccucccugcccaagugcuggcugaucagcaacggcuccuaccucaacgagacgcacuucagcgacgacaucgagcaggaggcggacaacaugaucaccgagaugcugcagaaggaguacauggagcggcaggggaagacgccccugggccucgucgaccuguucguguucuccaccagcuucuaccugaucuccaucuuccugcaccucgugaagaucccgacccaccgccacaucgucggcaagagcugccccaagccccaccggcugaaccacauggggaucugcuccugcgggcuguacaagcagcccggcgugccggugcgcuggaagcggugaggacuaguaauaaggaaacuguaugaaugucugugggcaggaagugaagagauccuucuguaaagguuuuuggaauuaugucugcugaauaauaaacuuuuuugaaauaauaaaucugguagaaaaaugagaucucaaaggcucuuuucagagccaccaaaaaaaaaaaaaaaaaaaaaaaaaaaaaaaaaaaaaaaaaaaaaaaaaaaaaaaaaaaaaaaaagaauu

SEQ ID NO: 35773 - RNA, 1781 nt, Artificial Sequence
  mRNA product Design b-4 (hSL-A64-N5) comprising derived and/or modified sequence from LASV(G3010-SLE-2013;Clade IV)__AIT17344__GPCmut9 (opt1)
aggagagucccgcagucggcguccagcggcucugcuuguucgugugugugucguugcaggccuuauucaagcuuaccaugggccagaucgugaccuucuuccaggaggucccccacgugaucgaggaggugaugaacaucguccugaucgcccucagcauccuggccgugcugaaggggcucuacaacuucgcgaccugcggccugguggggcuggucacguuccuccugcugugcggccgcuccugcaccaccagccucuacaaggggguguacgagcugcagacccuggagcucaacauggagacgcugaacaugaccaugccgcuguccugcaccaagaacaacagccaccacuacaucauggugggcaacgagaccggccucgagcugacgcugaccaacaccuccaucaucaaccacaaguucugcaaccucagcgacgcccacaagaagaaccuguacaaccacgcccugauguccaucaucagcaccuuccaccucuccauccccaacuucaaccaguacgaggccaugagcugcgacuucaacgggggcaagaucuccguccaguacaaccugagccacuccuacgccggggacgcggccagccacugcggcacgguggccaacggggugcugcagaccuucaugcggauggccuggggcggcuccuacaucgcgcucgacagcgggugcggcaagugggacugcaucaugaccuccuaccaguaccugaucauccagaacaccacgugggaggaccacugccaguucagccgccccucccccaucggguaccugggccuccugagccagcggacccgcgacaucuacaucagccggcgccugcucggcaccuucaccuggacgcuguccgacagcgaggggaaggacaccccgggcggguacugccugacccgguggaugcucaucgaggccgagcugaagugcuucggcaacaccgccgucgccaagugcaacgagaagcacgacgaggaguucugcgacaugcugcgccucuucgacuucaacaagcaggccauccagcggcugaagacggaggcgcagauguccauccagcugaucaacaaggccgugaacgcccucaucaacgaccagcugaucaugaagaaccaccuccgcgacaucaugugcauccccuacugcaacuacagcaaguacugguaccugaaccacaccaccaccggcaagacgucccugcccaagugcuggcuggugagcaacggcuccuaccucaacgagacccacuucagcgacgacaucgagcagcaggccgacaacaugaucaccgagaugcugcagaaggaguacauggagcggcaggggaagacgccccugggccucgucgaccuguucguguucuccaccagcuucuaccugaucuccaucuuccugcaccucgugaagaucccgacccaccgccacaucgucggcaagagcugccccaagccccaccggcugaaccacauggggaucugcuccugcgggcuguacaagcagcccggcgugccggugcgcuggaagcggugaggacuaguaauaaggaaacuguaugaaugucugugggcaggaagugaagagauccuucuguaaagguuuuuggaauuaugucugcugaauaauaaacuuuuuugaaauaauaaaucugguagaaaaaugagaucucaaaggcucuuuucagagccaccaaaaaaaaaaaaaaaaaaaaaaaaaaaaaaaaaaaaaaaaaaaaaaaaaaaaaaaaaaaaaaaaagaauu

SEQ ID NO: 35774 - RNA, 1781 nt, Artificial Sequence
  mRNA product Design b-4 (hSL-A64-N5) comprising derived and/or modified sequence from LASV(G502-SLE-2009;Clade IV)__AIT17126__GPCmut9 (opt1)
aggagagucccgcagucggcguccagcggcucugcuuguucgugugugugucguugcaggccuuauucaagcuuaccaugggccagaucgugaccuucuuccaggaggucccccacgugaucgaggaggugaugaacaucguccugaucgcccucagcauccuggccgugcugaaggggcucuacaacuucgcgaccugcggccugguggggcugcucacguuccugcugcucugcggccgcuccugcaccaccgggcuguacaagggcgucuacgagcugcagacccucgagcugaacauggagacgcugaacaugaccaugccgcucagcugcaccaagaacaacucccaccacuacaucauggugggcaacgagaccgggcuggagcugacgcucaccaacaccagcaucaucaaccacaaguucugcaaccuguccgacgcccacaagaagaaccuguacgaccacgcccucaugagcaucaucuccaccuuccaccugagcauccccaacuucaaccaguacgaggccauguccugcgacuucaacggcgggaagaucagcgugcaguacaaccugucccacagcuacgccggcgacgcggccgaccacugcgggacggucgccaacggcgugcuccagaccuucaugcggauggccuggggcggguccuacaucgcgcuggacagcggcugcgggcggugggacugcaucaugaccuccuaccaguaccugaucauccagaacaccacgugggaggaccacugccaguucagccgccccucccccaucggcuaccucggccugcugagccagcggacccgcgacaucuacaucucccggcgccuccuggggaccuucaccuggacgcugagcgacagcgagggcaaggacacccccgggggcuacugccucacccgguggaugcugaucgaggccgagcugaagugcuucgggaacaccgccguggccaagugcaacgagaagcacgacgaggaguucugcgacaugcuccgccuguucgacuucaacaagcaggccauccagcggcugaaggcggaggcccagauguccauccagcucaucaacaaggccgucaacgcccugaucaacgaccagcuggugaugaagaaccaccuccgcgacaucaugugcauccccuacugcaacuacagccgguacugguaccugaaccacacgaccaccggccgcaccucccugcccaagugcuggcucgugagcaacggguccuaccugaacgagacgcacuucagcgacgacaucgagcagcaggccgacaacaugaucaccgagaugcugcagaaggaguacauggagcggcagggcaagaccccgcucgggcuggucgaccuguucguguucuccaccagcuucuaccugaucuccaucuuccuccaccuggugaagaucccgacgcaccgccacaucgucggcaagagcugccccaagccccaccggcugaaccacauggggaucugcuccugcggccucuacaagcagcccggcgugccggugaaguggaagcgcugaggacuaguaauaaggaaacuguaugaaugucugugggcaggaagugaagagauccuucuguaaagguuuuuggaauuaugucugcugaauaauaaacuuuuuugaaauaauaaaucugguagaaaaaugagaucucaaaggcucuuuucagagccaccaaaaaaaaaaaaaaaaaaaaaaaaaaaaaaaaaaaaaaaaaaaaaaaaaaaaaaaaaaaaaaaaagaauu

SEQ ID NO: 35775 - RNA, 1781 nt, Artificial Sequence
  mRNA product Design b-4 (hSL-A64-N5) comprising derived and/or modified sequence from LASV(G733-SLE-2010;Clade IV)__AIT17154__GPCmut9 (opt1)
aggagagucccgcagucggcguccagcggcucugcuuguucgugugugugucguugcaggccuuauucaagcuuaccaugggccagaucgugaccuucuuccaggaggucccccacgugaucgaggaggugaugaacaucguccugaucgcccucagcauccuggccgugcugaaggggcucuacaacuucgcgaccugcggcaucguggggcuggucuccuuccugcuccugugcggccgcagcugcacgaccucccuguacaaggggguguacgagcuccagacccuggagcugaacauggagacccucaacaugacgaugccgcugagcugcaccaagaacaacucccaccacuacaucauggugggcaacgagaccggccuggagcucacccugacgaacaccagcaucaucaaccacaaguucugcaaccuguccgacgcccacaagaagaaccucuacgaccacgcccugaugagcaucaucuccaccuuccaccugagcauccccaacuucaaccaguacgaggccauguccugcgacuucaacgggggcaagaucagcguccaguacaaccucucccacagcuacgccggggacgcggccaaccacugcggcaccaucgccaacggggugcugcagacguucaugcggauggccuggggcggcuccuacaucgcgcuggacagcgggugcgaccggugggacugcaucaugaccuccuaccaguaccucaucauccagaacaccaccugggaggaccacugccaguucagccgccccucccccaucggcuaccuggggcugcucagccagcggacgcgcgacaucuacaucagccggcgccugcugggcaccuucaccuggacccucuccgacagcgagggcaaggacacgcccgggggcuacugccugacccgguggaugcugaucgaggccgagcucaagugcuucgggaacaccgccguggccaagugcaacgagaagcacgacgaggaguucugcgacaugcugcgccuguucgacuucaacaagcaggccauccagcggcucaaggcggaggcccagauguccauccagcugaucaacaaggccgucaacgcccugaucaacgaccagcucaucaugaagaaccaccuccgcgacaucaugugcauccccuacugcaacuacagcaaguacugguaccugaaccacaccacgaccgggaagaccucccugcccaagugcuggcuggugagcaacggcuccuaccugaacgagacccacuucagcgacgacaucgagcagcaggccgacaacaugaucacggagaugcuccagaaggaguacauggagcggcagggcaagaccccgcuggggcugguggaccucuucgucuucuccaccagcuucuaccugaucuccaucuuccugcaccuggugaagaucccgacccaccgccacguggucggcaagagcugccccaagccccaccggcucaaccacauggggaucugcuccugcggccuguacgggcagcccggcgugccggugaaguggaagcgcugaggacuaguaauaaggaaacuguaugaaugucugugggcaggaagugaagagauccuucuguaaagguuuuuggaauuaugucugcugaauaauaaacuuuuuugaaauaauaaaucugguagaaaaaugagaucucaaaggcucuuuucagagccaccaaaaaaaaaaaaaaaaaaaaaaaaaaaaaaaaaaaaaaaaaaaaaaaaaaaaaaaaaaaaaaaaagaauu

SEQ ID NO: 35776 - RNA, 1781 nt, Artificial Sequence
  mRNA product Design b-4 (hSL-A64-N5) comprising derived and/or modified sequence from MOPV/LASV reassortant(IGS-1;Clade IV)__AFY05576__GPCmut9 (opt1)
aggagagucccgcagucggcguccagcggcucugcuuguucgugugugugucguugcaggccuuauucaagcuuaccaugggccagaucgugaccuucuuccaggaggucccccacgugaucgaggaggugaugaacaucguccugaucgcccucagcgugcuggccgugcugaaggggcucuacaacuucgcgaccugcggccuggucgggcuggugacguuccuccugcugugcggccgcuccugcaccaccagccucuacaaggggguguacgagcugcagacccuggagcucaacauggagacgcugaacaugaccaugccgcuguccugcaccaagaacaacagccaccacuacaucauggucggcaacgagaccggccucgagcugacgcugaccaacaccuccaucaucaaccacaaguucugcaaccucagcgacgcccacaagaagaaccuguacgaccacgcccugauguccaucaucagcaccuuccaccucuccauccccaacuucaaccaguacgaggccaugagcugcgacuucaacgggggcaagaucuccgugcaguacaaccugagccacuccuacgccggggacgcggccaaccacugcggcacgguggccaacgggguccugcagaccuucaugcggauggccuggggcggcagcuacaucgcgcucgacuccgggugcggcaacugggacugcaucaugaccagcuaccaguaccugaucauccagaacaccacgugggaggaccacugccaguucucccggcccagccccaucggguaccugggccuccugucccagcgcacccgggacaucuacaucagccgccggcugcucggcaccuucaccuggacgcugagcgacuccgagggggaggacaccccgggcggguacugccugacccgcuggaugcucaucgaggccgagcugaagugcuucggcaacaccgccguggccaagugcaacgagaagcacgacgaggaguucugcgacaugcugcggcuguucgacuucaacaagcaggccauccagcgccugaaggcggaggcccagaugagcauccagcugaucaacaaggccgugaacgcccucaucaacgaccagcugaucaugaagaaccaccuccgggacaucaugugcauccccuacugcaacuacuccaaguacugguaccucaaccacacgaccaccggccgcaccagccugcccaagugcuggcuggucuccaacggcagcuaccucaacgagacgcacuucuccgacgacaucgagcagcaggccgacaacaugaucaccgagaugcugcagaaggaguacauggagcggcaggggaagacgccccugggccucguggaccuguucguguucagcaccuccuucuaccugaucagcaucuuccugcaccucgucaagaucccgacccaccgccacaucguggggaaguccugccccaagccccaccggcugaaccacaugggcaucugcagcugcgggcuguacaagcagcccggcgugccggucaaguggaagcgcugaggacuaguaauaaggaaacuguaugaaugucugugggcaggaagugaagagauccuucuguaaagguuuuuggaauuaugucugcugaauaauaaacuuuuuugaaauaauaaaucugguagaaaaaugagaucucaaaggcucuuuucagagccaccaaaaaaaaaaaaaaaaaaaaaaaaaaaaaaaaaaaaaaaaaaaaaaaaaaaaaaaaaaaaaaaaagaauu

SEQ ID NO: 35777 - RNA, 1781 nt, Artificial Sequence
  mRNA product Design b-4 (hSL-A64-N5) comprising derived and/or modified sequence from LASV(LM765-SLE-2012;Clade IV)__AIT17814__GPCmut9 (opt1)
aggagagucccgcagucggcguccagcggcucugcuuguucgugugugugucguugcaggccuuauucaagcuuaccaugggccagaucgugaccuucuuccaggaggucccccacgugaucgaggaggugaugaacaucguccugaucgcccucagcauccuggccgugcugaaggggcucuacaacuucgcgaccugcggccugguggggcuggucacguuccuccugcugugcggccgcuccugcaccaccagccucuacaaggggguguacgagcugcagacccuggagcucaacauggagacgcugaacaugaccaugccgcuguccugcaccaagaacaacagccaccacuacaucauggugggcaacgagaccggccucgagcugacgcugaccaacaccuccaucaucgaccacaaguucugcaaccucagcgacgcccaccggaagaaccuguacgaccacgcccugauguccaucaucagcaccuuccaccucuccauccccaacuucaaccaguacgaggccaugagcugcgacuucaacgggggcaagaucuccguccaguacaaccugagccacuccuacgccaaggacgcggccgaccacugcgggacgguggccaacggcgugcugcagaccuucaugcgcauggccuggggcgggagcuacaucgcgcucgacuccggcugcgggcgcugggacugcaucaugaccagcuaccaguaccugaucauccagaacaccacgugggaggaccacugccaguucucccggcccagccccaucggcuaccuggggcuccugucccagcgcacccgggacaucuacaucagccgccggcugcucggcaccuucaccuggacgcugagcgacuccgagggcaaggacacccccgggggcuacugccugacccgcuggaugcucaucgaggccgagcugaagugcuucgggaacaccgccgucgccaagugcaacgagaagcacgacgaggaguucugcgacaugcugcggcuguucgacuucaacaagcaggccauccagcgccugaaggcggaggcccagaugagcauccagcugaucaacaaggccgugaacgcccucaucaacgaccagcugaucaugaagaaccaccuccgggacaucaugugcauccccuacugcaacuacuccaaguacugguaccucaaccacacgaccaccgggaagaccagccugcccaagugcuggcugguguccaacggcagcuaccucaacgagacgcacuucuccgacgacaucgagcagcaggccgacaacaugaucaccgagaugcugcagaaggaguacauggagcgccagggcaagaccccgcuggggcucgucgaccuguucguguucagcaccuccuucuaccugaucagcaucuuccugcaccucgugaagaucccgacgcaccggcacaucgucggcaagcccugccccaagccccaccgccugaaccacauggggaucugcuccugcggccuguacaagcagccgggggugcccgugaaguggaagcggugaggacuaguaauaaggaaacuguaugaaugucugugggcaggaagugaagagauccuucuguaaagguuuuuggaauuaugucugcugaauaauaaacuuuuuugaaauaauaaaucugguagaaaaaugagaucucaaaggcucuuuucagagccaccaaaaaaaaaaaaaaaaaaaaaaaaaaaaaaaaaaaaaaaaaaaaaaaaaaaaaaaaaaaaaaaaagaauu

SEQ ID NO: 35778 - RNA, 1781 nt, Artificial Sequence
  mRNA product Design b-4 (hSL-A64-N5) comprising derived and/or modified sequence from LASV(LM776-SLE-2012;Clade IV)__AIT17824__GPCmut9 (opt1)
aggagagucccgcagucggcguccagcggcucugcuuguucgugugugugucguugcaggccuuauucaagcuuaccaugggccagaucgugaccuucuuccaggaggucccccacgugaucgaggaggugaugaacaucguccugaucgcccucagcauccuggccgugcugaaggggcucuacaacuucgcgaccugcggccugguggggcuggucacguuccuccugcugugcggccgcuccugcaccaccagcguguacaaggggguguacgagcuccagacccuggagcugaacauggagacgcucaacaugaccaugccgcuguccugcaccaagaacaacagccaccacuacaucauggucggcaacgagaccggccuggagcucacgcugaccaacaccuccaucaucaaccacaaguucugcaaccugagcgacgcccacaagaagaaccucuacgaccacgcccugauguccaucaucagcaccuuccaccuguccauccccaacuucaaccaguacgaggccaugagcugcgacuucaacgggggcaagaucuccgugcaguacaaccucagccacuccuacgccggggacgcggccaaccacugcggcacgguggccaacgggguccugcagaccuucaugcggauggccuggggcggcagcuacaucgcgcuggacuccgggugcggcaagugggacugcaucaugaccagcuaccaguaccucaucauccagaacaccacgugggaggaccacugccaguucucccgccccagccccaucggguaccugggccugcucucccagcggacccgcgacaucuacaucagccggcgccugcugggcaccuucaccuggacgcucagcgacuccgaggggaaggacaccccgggcggguacugccugacccgguggaugcugaucgaggccgagcucaagugcuucggcaacaccgccguggccaagugcaacgagaagcacgacgaggaguucugcgacaugcugcgccuguucgacuucaacaagcaggccauccagcggcucaaggcggaggcccagaugagcauccagcugaucaacaaggccgugaacgcccugaucaacgaccagcucaucaugaagaaccaccuccgcgacaucaugugcauccccuacugcaacuacuccaaguacugguaccugaaccacacgaccaccggcaagaccagccugcccaagugcuggcuggucuccaacggcagcuaccugaacgagacgcacuucuccgacgacaucgagcagcaggccgacaacaugaucaccgagaugcuccagaaggaguacauggagcggcaggggaagacgccccugggccugguggaccucuucguguucagcaccuccuucuaccugaucagcaucuuccugcaccuggucaagaucccgacccaccgccacaucguggggaaguccugccccaagccccaccggcucaaccacaugggcaucugcagcugcgggcuguacaagcagcccggcgugccgguccgcuggaagcggugaggacuaguaauaaggaaacuguaugaaugucugugggcaggaagugaagagauccuucuguaaagguuuuuggaauuaugucugcugaauaauaaacuuuuuugaaauaauaaaucugguagaaaaaugagaucucaaaggcucuuuucagagccaccaaaaaaaaaaaaaaaaaaaaaaaaaaaaaaaaaaaaaaaaaaaaaaaaaaaaaaaaaaaaaaaaagaauu

SEQ ID NO: 35779 - RNA, 1781 nt, Artificial Sequence
  mRNA product Design b-4 (hSL-A64-N5) comprising derived and/or modified sequence from LASV(Mad39;Clade IV)__ANH09722__GPCmut9 (opt1)
aggagagucccgcagucggcguccagcggcucugcuuguucgugugugugucguugcaggccuuauucaagcuuaccaugggccagaucgugaccuucuuccaggaggucccccacgugaucgaggaggugaugaacaucguccugaucgcccucagcauccuggccgugcugaaggggcucuacaacguggcgaccugcggccugaucgggcuggucacguuccuccugcugugcggccgcuccugcaccaccacccucuacaaggggguguacgagcugcaggcccuggagcucaacauggagacgcugaacaugaccaugccgcugagcugcaccaagaacaacucccaccacuacauccgggugggcaacgagaccggccucgagcugacgcugaccaacaccagccucaucaaccacaaguucugcaaccuguccgacgcccacaagaagaaccuguacgaccacgcccucaugagcaucaucuccaccuuccaccugagcauccccaacuucaaccaguacgaggccauguccugcgacuucaacgacgggaagaucagcguccaguacaaccugucccacacguacgcgggcgacaccgccaaccacugcgggaccguggccaacggcgugcuccagaccuucaugcgcauggccuggggcgggagcuacaucgcgcuggacuccggcugcgggggcugggacugcaucaugacgagcuaccaguaccugaucauccagaacaccaccugggaggaccacugccaguucucccggcccagccccaucggguaccucggccugcugucccagcggacccgcgacaucuacaucagccggcgccuccugggcacguucaccuggacccuguccgacagcgaggggaaggacaccccgggcggguacugccucacgcgguggaugcugaucgaggccgagcugaagugcuucggcaacaccgccgucgccaagugcaacgagaagcacgacgaggaguucugcgacaugcuccgccuguucgacuucaacaagcaggccauccagcggcugaaggcggaggcccagaugagcauccagcucaucaacaaggccgugaacgcccugaucaacgaccagcugaucaugaagaaccaccuccgcgacaucaugugcauccccuacugcaacuacuccaaguacugguaccugaaccacaccgugaccggcaagacgagccugcccaagugcuggcucgucuccaacggcagcuaccugaacgagacccacuucuccgacgacaucgagcagcaggccgacaacaugaucaccgagaugcugcagaaggaguacauggagcggcaggggaagacgccccucggccugguggaccuguucguguucagcaccuccuucuaccugaucagcaucuuccuccaccuggucaagaucccgacccaccgccacgugguggggaagcccugccccaagccccaccggcugaaccacaugggcaucugcuccugcggguucuacaagcagccgggcguccccgugcgcuggaagcggugaggacuaguaauaaggaaacuguaugaaugucugugggcaggaagugaagagauccuucuguaaagguuuuuggaauuaugucugcugaauaauaaacuuuuuugaaauaauaaaucugguagaaaaaugagaucucaaaggcucuuuucagagccaccaaaaaaaaaaaaaaaaaaaaaaaaaaaaaaaaaaaaaaaaaaaaaaaaaaaaaaaaaaaaaaaaagaauu

SEQ ID NO: 35780 - RNA, 1781 nt, Artificial Sequence
  mRNA product Design b-4 (hSL-A64-N5) comprising derived and/or modified sequence from LASV(Z0947-SLE-2011;Clade IV)__AIT17840__GPCmut9 (opt1)
aggagagucccgcagucggcguccagcggcucugcuuguucgugugugugucguugcaggccuuauucaagcuuaccaugggccagaucgugaccuucuuccaggaggucccccacgugaucgaggaggugaugaacaucguccugaucgcccucagcauccuggccgugcugaaggggcucuacaacuucgcgaccugcggccugguggggcuggucacguuccuccugcugugcggccgcuccugcaccaucagccucuacaaggggguguacgagcugcagacccuggagcucaacauggagacccugaacaugacgaugccgcuguccugcaccaagaacaacagccaccacuacaucauggugggcaacgagaccggccucgagcugacccugacgaacaccuccaucaucaaccacaaguucugcaaccucagcgacgcccacaagaagaaccuguacgaccacgcccugauguccaucaucagcaccuuccaccucuccauccccaacuucaaccaguacgaggccaugagcugcgacuucaacgggggcaagaucuccguccaguacaaccugagccacuccuacgccggggacgcggccaaccacugcggcaccguggccaacggggugcugcagacguucaugcggauggccuggggcggcagcuacaucgcgcucgacuccgggugcgaccggugggacugcaucaugaccagcuaccaguaccugaucauccagaacaccaccugggaggaccacugccaguucucccgccccagccccaucggcuaccuggggcuccugucccagcggacgcgcgacaucuacaucagccggcgccugcucggcaccuucaccuggacccugagcgacuccgagggcaaggacacgcccgggggcuacugccugacccgguggaugcucaucgaggccgagcugaagugcuucgggaacaccgccgucgccaagugcaacgagaagcacgacgaggaguucugcgacaugcugcgccucuucgacuucaacaagcaggccauccagcggcugaaggcggaggcccagaugagcauccagcugaucaacaaggccgugaacgcccucaucaacgaccagcugaucaugaagaaccaccuccgcgacaucaugugcauccccuacugcaacuacuccaaguacugguaccugaaccacaccacgaccgggaagaccagccugcccaagugcuggcugguguccaacggcagcuaccucaacgagacccacuucuccgacgacaucgagcagcaggccgacaacaugaucacggagaugcugcagaaggaguacauggagcggcagggcaagaccccgcuggggcucgucgaccuguucguguucagcaccuccuucuaccugaucagcaucuuccugcaccucgugaagaucccgacccaccgccacaucgucggcaagcccugccccaagccccaccggcugaaccacauggggaucugcuccugcggccuguacaagcagccgggggugcccgugaaguggaagcgcugaggacuaguaauaaggaaacuguaugaaugucugugggcaggaagugaagagauccuucuguaaagguuuuuggaauuaugucugcugaauaauaaacuuuuuugaaauaauaaaucugguagaaaaaugagaucucaaaggcucuuuucagagccaccaaaaaaaaaaaaaaaaaaaaaaaaaaaaaaaaaaaaaaaaaaaaaaaaaaaaaaaaaaaaaaaaagaauu

SEQ ID NO: 35781 - RNA, 1781 nt, Artificial Sequence
  mRNA product Design b-4 (hSL-A64-N5) comprising derived and/or modified sequence from LASV(Josiah;Clade IV)__NP_694870__GPCmut9 (opt1)
aggagagucccgcagucggcguccagcggcucugcuuguucgugugugugucguugcaggccuuauucaagcuuaccaugggccagaucgugaccuucuuccaggaggucccccacgugaucgaggaggugaugaacaucguccugaucgcccucagcgugcuggccgugcugaaggggcucuacaacuucgcgaccugcggccuggucgggcuggugacguuccuccugcugugcggccgcuccugcaccaccagccucuacaaggggguguacgagcugcagacccuggagcucaacauggagacgcugaacaugaccaugccgcuguccugcaccaagaacaacagccaccacuacaucauggucggcaacgagaccggccucgagcugacgcugaccaacaccuccaucaucaaccacaaguucugcaaccucagcgacgcccacaagaagaaccuguacgaccacgcccugauguccaucaucagcaccuuccaccucuccauccccaacuucaaccaguacgaggccaugagcugcgacuucaacgggggcaagaucuccgugcaguacaaccugagccacuccuacgccggggacgcggccaaccacugcggcacgguggccaacgggguccugcagaccuucaugcggauggccuggggcggcagcuacaucgcgcucgacuccgggugcggcaacugggacugcaucaugaccagcuaccaguaccugaucauccagaacaccacgugggaggaccacugccaguucucccgccccagccccaucggguaccugggccuccugucccagcggacccgcgacaucuacaucagccggcgccugcucggcaccuucaccuggacgcugagcgacuccgaggggaaggacaccccgggcggguacugccugacccgguggaugcucaucgaggccgagcugaagugcuucggcaacaccgccguggccaagugcaacgagaagcacgacgaggaguucugcgacaugcugcgccucuucgacuucaacaagcaggccauccagcggcugaaggcggaggcccagaugagcauccagcugaucaacaaggccgugaacgcccucaucaacgaccagcugaucaugaagaaccaccuccgcgacaucaugugcauccccuacugcaacuacuccaaguacugguaccugaaccacacgaccaccgggcggaccagccugcccaagugcuggcuggucuccaacggcagcuaccucaacgagacgcacuucuccgacgacaucgagcagcaggccgacaacaugaucaccgagaugcugcagaaggaguacauggagcgccagggcaagacgccccuggggcugguggaccucuucguguucagcaccuccuucuaccugaucagcaucuuccugcaccucgucaagaucccgacccaccggcacaucgugggcaaguccugccccaagccccaccgccugaaccacauggggaucugcagcugcggccuguacaagcagcccggggugccggucaaguggaagcggugaggacuaguaauaaggaaacuguaugaaugucugugggcaggaagugaagagauccuucuguaaagguuuuuggaauuaugucugcugaauaauaaacuuuuuugaaauaauaaaucugguagaaaaaugagaucucaaaggcucuuuucagagccaccaaaaaaaaaaaaaaaaaaaaaaaaaaaaaaaaaaaaaaaaaaaaaaaaaaaaaaaaaaaaaaaaagaauu

SEQ ID NO: 35782 - RNA, 1778 nt, Artificial Sequence
  mRNA product Design b-4 (hSL-A64-N5) comprising derived and/or modified sequence from LASV(LP;Clade I)__AAF86701__GPCmut9 (opt1)
aggagagucccgcagucggcguccagcggcucugcuuguucgugugugugucguugcaggccuuauucaagcuuaccaugggccagaucaucaccuucuuccaggaggugccccacgucaucgaggaggugaugaacaucgugcugaucgcccucagccugcuggccauccucaaggggcuguacaacaucgcgaccugcggcaucaucgggcuggucgccuuccucuuccugugcggcaaguccugcagccugacgcucaagggcggguacgagcugcagacccuggagcucaacauggagacccugaacaugaccaugccgcuguccugcacgaagaacagcucccaccacuacauccgcgugggcaacgagaccgggcucgagcugacccugaccaacacgagcaucaucaaccacaaguucugcaaccucuccgacgcccacaagaagaaccuguacgaccacgcccugaugagcaucaucuccaccuuccaccucagcauccccaacuucaaccaguacgaggccauguccugcgacuucaacggcgggaagaucagcgugcaguacaaccugucccacagcuacgcgggcgacgccgccgagcacugcgggaccgucgccaacggcgugcugcagaccuucaugcggauggcguggggcgggcgcuacaucgcccucgacuccggcugcgggaacugggacugcaucaugacgagcuaccaguaccugaucauccagaacaccaccugggaggaccacugccaguucucccggcccagccccaucggcuaccugggccuccugucccagcgcacccgggacaucuacaucagccgccggcugcucgggacguucaccuggacccugagcgacuccgagggcaacgagacccccgggggcuacugccugacgcgcuggaugcucaucgaggccgagcugaagugcuucgggaacaccgccguggccaagugcaacgagaagcacgacgaggaguucugcgacaugcugcggcuguucgacuucaacaagcaggcgauccgccggcugaaggccgaggcccagaugagcauccagcugaucaacaaggccgucaacgcccucaucaacgaccagcugaucaugaagaaccaccuccgcgacaucaugugcauccccuacugcaacuacuccaaguacugguaccucaaccacaccagcuccggccggaccagccugcccaagugcuggcugaucuccaacggcagcuaccucaacgagacgcaguucuccgacgacaucgagcagcaggcggacaacaugaucaccgagaugcugcagaaggaguacaucgagcgccaggggaagaccccgcugggccugguggacaucuucaucuucagcaccuccuucuaccucaucagcaucuuccugcaccugaucaagaucccgacgcaccggcacaucguggggaagcccugccccaagccccaccgccucaaccacaugggcgucugcuccugcgggcuguacaagcacccgggcgugcccaccaaguggaagcggugaggacuaguaauaaggaaacuguaugaaugucugugggcaggaagugaagagauccuucuguaaagguuuuuggaauuaugucugcugaauaauaaacuuuuuugaaauaauaaaucugguagaaaaaugagaucucaaaggcucuuuucagagccaccaaaaaaaaaaaaaaaaaaaaaaaaaaaaaaaaaaaaaaaaaaaaaaaaaaaaaaaaaaaaaaaaagaauu

SEQ ID NO: 35783 - RNA, 1778 nt, Artificial Sequence
  mRNA product Design b-4 (hSL-A64-N5) comprising derived and/or modified sequence from LASV(803213;Clade II)__AAF86703__GPCmut9 (opt1)
aggagagucccgcagucggcguccagcggcucugcuuguucgugugugugucguugcaggccuuauucaagcuuaccaugggccagaucaucaccuucuuccaggaggugccccacgucaucgaggaggugaugaacaucgugcugaucgcccucagccugcuggccauccucaaggggaucuacaacgucgcgaccugcggccuguucgggcugaucuccuuccuccugcugugcggccgcagcugcuccgugacguacaaggggguguacgagcuccagacccuggagcugaacauggccaaccucaacaugaccaugccgcugagcugcaccaagaacaacucccaccacuacaucauggucggcaacgagacgggccuggagcucacccugaccaacaccagcaucaucaaccacaaguucugcaaccuguccgacgcccacaagaagaaccucuacgaccacgcccugaugagcaucaucuccacguuccaccugagcauccccaacuucaaccaguacgaggccauguccugcgacuucaacgggggcaagaucagcgugcaguacaaccucucccacagcuucgcgguggacgccgccaaccacugcgggaccaucgccaacggcguccugcagaccuucaugcggauggcguggggcggguccuacaucgcccuggacagcggcugcgggaacugggacugcaucaugaccuccuaccaguaccucaucauccagaacacgaccugggaggaccacugccaguucagccgccccucccccaucggcuaccuggggcugcucagccagcggacccgcgacaucuacaucagccggcgccugcugggcaccuucacguggacccucuccgacagcgagggcaacgaggcccccgggggcuacugccugacccgguggaugcugaucgaggccgagcucaagugcuucgggaacaccgccguggcgaagugcaacgagaagcacgacgaggaguucugcgacaugcugcgccuguucgacuucaacaagcaggccaucaagcggcucaagacggaggcccagauguccauccagcugaucaacaaggccgugaacgcccugaucaacgaccagcucaucaugaagaaccaccuccgcgacaucaugugcauccccuacugcaacuacagccgguacugguaccugaaccacaccgucaccggcaagaccucccugccccgcugcuggcuggugagcaacggguccuaccugaacgagacgcacuucagcgacgacaucgagcagcaggcggacaacaugaucaccgagaugcuccagaaggaguacauggaccggcagggcaagaccccgcugggccugguggaccuguucgucuucuccaccagcuucuaccucaucuccaucuuccugcaccuggugaagaucccgacgcaccgccacaucguggggaagcccugccccaagccccaccggcucaaccacaugggcaucugcagcugcgggcuguacaagcacccgggcguccccgugaaguggaagcgcugaggacuaguaauaaggaaacuguaugaaugucugugggcaggaagugaagagauccuucuguaaagguuuuuggaauuaugucugcugaauaauaaacuuuuuugaaauaauaaaucugguagaaaaaugagaucucaaaggcucuuuucagagccaccaaaaaaaaaaaaaaaaaaaaaaaaaaaaaaaaaaaaaaaaaaaaaaaaaaaaaaaaaaaaaaaaagaauu

SEQ ID NO: 35784 - RNA, 1778 nt, Artificial Sequence
  mRNA product Design b-4 (hSL-A64-N5) comprising derived and/or modified sequence from LASV(GA391;Clade III)__CAA36645__GPCmut9 (opt1)
aggagagucccgcagucggcguccagcggcucugcuuguucgugugugugucguugcaggccuuauucaagcuuaccaugggccagaucgugaccuucuuccaggaggucccccacgugaucgaggaggugaugaacaucguccugaucgcccucagcauccuggccauccugaaggggcucuacaacguggcgaccugcggccugaucgggcuggugacguuccuccugcuguccggccgcagcugcucccucaucuacaaggggaccuacgagcugcagacccuggagcucaacauggagacccugaacaugacgaugccgcugagcugcaccaagaacaacucccaccacuacauccgggucggcaacgagaccggccucgagcugacccugacgaacaccagcauccucaaccacaaguucugcaaccuguccgacgcccacaagcgcaaccuguacgaccacagccucauguccaucaucagcaccuuccaccuguccauccccaacuucaaccaguacgaggccaugagcugcgacuucaacgggggcaagaucaccgugcaguacaaccugucccacagcuucgccguggacgccgcggggcacugcggcacgcucgccaacgggguccugcagaccuucaugcggauggccuggggcggcuccuacaucgcccuggacagcgggugcggcaacugggacugcaucaugaccuccuaccaguaccucaucauccagaacaccacgugggacgaccacugccaguucagccgccccucccccaucggguaccugggccugcucagccagcggacccgcgacaucuacaucagccggcgccugcugggcaccuucaccuggacgcucuccgacagcgaggggaacgagaccccgggcggguacugccugacccgguggaugcugaucgaggcggagcucaagugcuucggcaacaccgccguggccaagugcaacgagaagcacgacgaggaguucugcgacaugcugcgccuguucgacuucaacaagcaggccauccggcgccucaagacggaggcccagauguccauccagcugaucaacaaggcggugaacgcccugaucaacgaccagcucaucaugaagaaccaccuccgggacaucaugugcauccccuacugcaacuacagccgcuacugguaccugaaccacaccuccaccgggaagaccagccugccccggugcuggcugaucuccaacggcagcuaccugaacgagacgaaguucuccgacgacaucgagcagcaggccgacaacaugaucaccgagaugcugcagaaggaguacaucgaccgccagggcaagacgccccucgggcuggucgaccuguucguguucagcaccuccuucuaccucaucagcaucuuccugcaccuggugaagaucccgacccaccggcacaucgucggcaagcccugccccaagccccaccgccucaaccacauggggaucugcuccugcggccuguacaagcagccgggggugcccgugcgguggaagcgcugaggacuaguaauaaggaaacuguaugaaugucugugggcaggaagugaagagauccuucuguaaagguuuuuggaauuaugucugcugaauaauaaacuuuuuugaaauaauaaaucugguagaaaaaugagaucucaaaggcucuuuucagagccaccaaaaaaaaaaaaaaaaaaaaaaaaaaaaaaaaaaaaaaaaaaaaaaaaaaaaaaaaaaaaaaaaagaauu

SEQ ID NO: 35785 - RNA, 1781 nt, Artificial Sequence
  mRNA product Design b-4 (hSL-A64-N5) comprising derived and/or modified sequence from LASV(AV;Clade V)__CCA30314__GPCmut9 (opt1)
aggagagucccgcagucggcguccagcggcucugcuuguucgugugugugucguugcaggccuuauucaagcuuaccaugggccagaucgugaccuucuuccaggaggucccccacgugaucgaggaggugaugaacaucguccugaucgcccucagcauccuggccgugcugaaggggcucuacaacaucgcgaccugcggccugaucgggcugaucacguuccuccugcugugcggccgcuccugcagcuccaaccucuacaaggggguguacgagcugcagagccuggaccucaacauggagacccugaacaugaccaugccgcuguccugcaccaagaacaacagccaccacuacauccgggucggcaacgacacgggccucgagcugacccugaccaacaccuccauccucaaccacaaguucugcaaccugagcgacgcccacaagaaggaccuguacgaccacgcccucauguccaucaucagcacguuccaccuguccauccccaacuucaaccaguacgaggccaugagcugcgacuucaacgggggcaagaucuccgugcaguacaaccugagccacuccuacgccaucgacgcggccaaccacugcgggaccguggccaacggcauccuccagaccuucaugcgcauggccuggggcgggagcuacaucgcgcuggacuccggcugcgggaacugggacugcaucaugaccagcuaccaguaccugaucauccagaacacgaccugggagaaccacugccaguucucccggcccagccccaucggcuaccucgggcugcugagccagcgcacccgggacaucuacaucucccgccggcuccugggcaccuucacguggacccugagcgacuccgagggcaacgccacccccgggggcuacugccucacccgcuggaugcugaucgaggccgagcugaagugcuucgggaacacggccgucgccaagugcaacgagaagcacgacgaggaguucugcgacaugcuccggcuguucgacuucaacaagcaggcgaucagccgccugaaguccgaggcccagaugagcauccagcucaucaacaaggccgugaacgcccugaucaacgaccagcugaucaugaagaaccaccuccgggacaucaugugcauccccuacugcaacuacuccaaguacugguaccugaaccacaccaucaccggcaagaccagccugcccaagugcuggcucguguccaacgggagcuaccugaacgagacgcacuucuccgacgacaucgagcagcaggccgacaacaugaucaccgagaugcugcagaaggaguacauggagcgccagggcaagaccccgcugggccucgucgaccuguucguguucagcaccuccuucuaccugaucagcaucuuccuccggcuggugaagaucccgacgcaccgccacaucgucgggaagcccugccccaagccccaccggcugaaccacaugggcaucugcuccugcgggcucuacaagcagccgggcgugcccgugcgcuggaagcggugaggacuaguaauaaggaaacuguaugaaugucugugggcaggaagugaagagauccuucuguaaagguuuuuggaauuaugucugcugaauaauaaacuuuuuugaaauaauaaaucugguagaaaaaugagaucucaaaggcucuuuucagagccaccaaaaaaaaaaaaaaaaaaaaaaaaaaaaaaaaaaaaaaaaaaaaaaaaaaaaaaaaaaaaaaaaagaauu

SEQ ID NO: 35786 - RNA, 1778 nt, Artificial Sequence
  mRNA product Design b-4 (hSL-A64-N5) comprising derived and/or modified sequence from LASV(Togo/2016/7082;Clade VI)__AMR44577__GPCmut9 (opt1)
aggagagucccgcagucggcguccagcggcucugcuuguucgugugugugucguugcaggccuuauucaagcuuaccaugggccagaucaucaccuucuuccaggaggugccccacgucaucgaggaggugaugaacaucgugcugaucgcccucagccugcuggccauccucaagggggucuacaacguggcgaccugcggcaucaucgggcuggugacguuccuguuccucugcggccgcuccugcagccugaucuacaagggguccuacgagcugcagacccucgagcugaacauggagacccugaacaugaccaugccgcucagcugcacgaagaacuccagccaccacuacauccgggucggcaacgagaccggccuggagcugacccucaccaacacguccaucaucaaccacaaguucugcaaccugagcgacgcccacaagcgcaaccuguacgaccacgcccucauguccauccugagcaccuuccaccuguccauccccaacuucaaccaguacgaggccaugagcugcgacuucaacgggggcaagaucuccgugcaguacaaccucagccacgccuacgcgguggacgccgccgagcacugcgggaccgucgccaacggcgugcugcagaccuucaugcggauggcguggggcggguccuacaucgcccuggacagcggcugcgggaacugggacugcaucaugacguccuaccaguaccucaucauccagaacaccaccugggaggaccacugccaguucagccgccccucccccaucggcuaccuggggcugcucagccagcggacccgcgacaucuacaucagccggcgccugcugggcacguucaccuggacccucuccgacagcgagggcaacgagacccccgggggcuacugccugacgcgguggaugcugaucgaggccgagcucaagugcuucgggaacaccgccguggccaagugcaacgagaagcacgacgaggaguucugcgacaugcugcgccuguucgacuucaacaagcaggcgauccagcggcucaaguccgaggcccagaugagcauccagcugaucaacaaggccgucaacgcccugaucaacgaccagcucaucaugaagaaccaccuccgcgacaugaugugcauccccuacugcaacuacuccaaguacugguaccugaaccacaccagcuccggccggaccagccugcccaagugcuggcugguguccaacgggagcuaccugaacgagacgcacuucuccgacgacaucgagcagcaggccgacaacaugaucaccgagaugcuccagaaggaguacaucgaccgccagggcaagaccccgcugggccugguggaccuguucgucuucagcaccuccuucuaccucaucagcaucuuccugcaccugaucaagaucccgacgcaccggcacaucguggggaagcccugccccaagccccaccgccucaaccacaugggcaucugcuccugcgggcuguacaagcagccgggcgugcccacccgguggaagcgcugaggacuaguaauaaggaaacuguaugaaugucugugggcaggaagugaagagauccuucuguaaagguuuuuggaauuaugucugcugaauaauaaacuuuuuugaaauaauaaaucugguagaaaaaugagaucucaaaggcucuuuucagagccaccaaaaaaaaaaaaaaaaaaaaaaaaaaaaaaaaaaaaaaaaaaaaaaaaaaaaaaaaaaaaaaaaagaauu

SEQ ID NO: 35787 - RNA, 1778 nt, Artificial Sequence
  mRNA product Design b-4 (hSL-A64-N5) comprising derived and/or modified sequence from LASV(KAK-428;Clade n.d. (VII))__ANH09740__GPCmut9 (opt1)
aggagagucccgcagucggcguccagcggcucugcuuguucgugugugugucguugcaggccuuauucaagcuuaccaugggccagaucgugaccuucuuccaggaggucccccacgugaucgaggaggugaugaacaucguccugaucgcccucagccugcuggccauccucaaggggcuguacaacuucgcgaccugcggcgugaucgggcugaucacguuccuccugcugugcggccgcuccugcagcgccaccuacaaggggcaguacgagcuccagacccuggagcugaacauggagucccucaacaugaccaugccgcugagcugcacgaagaacaacucccaccacuacauccgggccggcaacaacaccggccuggagcucacccugaccaacacgagcaucaucucccacaaguucugcaaccugagcgacgcccacaagaagaaccucuacgaccacacccugauguccaucaucaccaccuuccaccugagcauccccaacuucaaccaguacgaggccauguccugcgacuucaacgggggcaagaucagcauccaguacaaccucucccacagcuacgcgggggacgccgcccagcacugcggcacgguggccaacgggguccugcagaccuucaugcgcauggcguggggcggcuccuaccuggcccucgacagcgggugccggggcugggacugcaucaucuccagcuaccaguaccugaucauccagaacaccaccugggacgaccacugccaguucucccgccccagccccaucggguaccugggcuucgugagccagaagacgcgggacaucuacaucucccgccggcuccugggcaccuucaccuggacccugagcgacuccgaggggcacgacaugccgggcggguacugccucacgcgcuggaugcugaucgaggccgaccugaagugcuucggcaacaccgccguggccaagugcaacgagaagcacgacgaggaguucugcgacauguggcggcuguucgacuucaacaagcaggcgauccagcgccugaaggccgaggcccagaugaacauccagcugaucaacaaggccgucaacgcccucaucaacgaccagcugaugaugaagaaccaccuccgggacaucaugugcauccccuacugcaacuacagcaaguucugguaccucaacaacaccaccacggggcgcaccucccugccccggugcuggcugaucagcaacggcuccuaccucaacgagacccacuucagcgacgacaucgagcagcaggcggacaacaugaucaccgagaugcugcagaaggaguacauggaccgccagggcaagacgccccuggggcucguggaccuguucguguucuccaccagcuucuaccugaucaccaucuuccugcaccucgucaagaucccgacccaccggcacaucgugggcaagcccugccccaagccccaccgccugaaccacauggggaucugcuccugcggccuguacaagcagccgggggugcccguccgguggaagcgcugaggacuaguaauaaggaaacuguaugaaugucugugggcaggaagugaagagauccuucuguaaagguuuuuggaauuaugucugcugaauaauaaacuuuuuugaaauaauaaaucugguagaaaaaugagaucucaaaggcucuuuucagagccaccaaaaaaaaaaaaaaaaaaaaaaaaaaaaaaaaaaaaaaaaaaaaaaaaaaaaaaaaaaaaaaaaagaauu

SEQ ID NO: 35788 - RNA, 1778 nt, Artificial Sequence; identical to SEQ ID NO: 35782
  mRNA product Design b-4 (hSL-A64-N5) comprising derived and/or modified sequence from LASV(Pinneo-NIG-1969;Clade I)__AIT17836__GPCmut9 (opt1)

SEQ ID NO: 35789 - RNA, 1778 nt, Artificial Sequence
  mRNA product Design b-4 (hSL-A64-N5) comprising derived and/or modified sequence from LASV(ISTH0009-NIG-2011;Clade II)__AIT17404__GPCmut9 (opt1)
aggagagucccgcagucggcguccagcggcucugcuuguucgugugugugucguugcaggccuuauucaagcuuaccaugggccagaucaucaccuucuuccaggaggugccccacgucaucgaggaggugaugaacaucgugcugaucgcccucagccugcuggccauccucaaggggaucuacaacgucgcgaccugcggccuguucgggcugguguccuuccuccugcugugcggccgcagcugcuccacgaccuacaaggggguguacgagcuccagacccuggagcuggacauggccagccucaacaugaccaugccgcuguccugcacgaagaacaacagccaccacuacaucauggucggcaacgagaccggccuggagcucacccugaccaacacguccaucaucaaccacaaguucugcaaccugagcgacgcccacaagaagaaccucuacgaccacgcccugauguccaucaucagcaccuuccaccuguccauccccaacuucaaccaguacgaggccaugagcugcgacuucaacgggggcaagaucuccgugcaguacaaccucagccacgcguacgccguggacgccgccaaccacugcgggaccaucgcgaacggcguccugcagaccuucaugcggauggccuggggcggguccuacaucgcccuggacagcggcugcggguccugggacugcaucaugacgagcuaccaguaccucaucauccagaacaccaccugggaggaccacugccaguucucccgccccagccccaucggcuaccuggggcugcucagccagcggacccgcgacaucuacaucucccggcgccugcugggcacguucaccuggacccucagcgacuccgagggcaacgagacccccgggggcuacugccugacgcgguggaugcugaucgaggccgagcucaagugcuucgggaacaccgccguggcgaagugcaacgagaagcacgacgaggaguucugcgacaugcugcgccuguucgacuucaacaagcaggccauccggcgccucaagaccgaggcccagaugagcauccagcugaucaacaaggccgugaacgcccugaucaacgaccagcucaucaugaagaaccaccuccgggacaucaugugcaucccguacugcaacuacuccaaguacugguaccugaaccacaccgucacgggcaagaccagccugccccgcugcuggcugguguccaacgggagcuaccugaacgagacccacuucuccgacgacaucgagcagcaggcggacaacaugaucaccgagcuccugcagaaggaguacauggaccggcagggcaagacgccccugggccugguggaccucuucgucuucagcaccuccuucuaccugaucagcaucuuccugcaccucaucaagaucccgacccaccgccacaucaccgggaagcccugccccaagccccaccggcugaaccacaugggcaucugcuccugcgggcuguacaagcacccgggcgugcccgugaaguggaagcgcugaggacuaguaauaaggaaacuguaugaaugucugugggcaggaagugaagagauccuucuguaaagguuuuuggaauuaugucugcugaauaauaaacuuuuuugaaauaauaaaucugguagaaaaaugagaucucaaaggcucuuuucagagccaccaaaaaaaaaaaaaaaaaaaaaaaaaaaaaaaaaaaaaaaaaaaaaaaaaaaaaaaaaaaaaaaaagaauu

SEQ ID NO: 35790 - RNA, 1778 nt, Artificial Sequence
  mRNA product Design b-4 (hSL-A64-N5) comprising derived and/or modified sequence from LASV(ISTH2010-NIG-2012;Clade II)__AIT17482__GPCmut9 (opt1)
aggagagucccgcagucggcguccagcggcucugcuuguucgugugugugucguugcaggccuuauucaagcuuaccaugggccagaucaucaccuucuuccaggaggugccccacgucaucgaggaggugaugaacaucgugcugaucgcccucagccugcuggccauccucaaggggaucuacaacgucgcgaccugcggccuguucgggcugguguccuuccuccugcugugcggccgcagcugcuccacgaccuacaaggggguguacgagcuccagacccuggagcuggacauggccagccucaacaugaccaugccgcuguccugcacgaagaacaacagccaccacuacaucauggucggcaacgagaccggccuggagcucacccugaccaacacguccaucaucaaccacaaguucugcaaccugagcgacgcccacaagaagaaccucuacgaccacgcccugauguccaucaucagcaccuuccaccuguccauccccaacuucaaccaguacgaggccaugagcugcgacuucaacgggggcaagaucuccgugcaguacaaccucagccacgcguacgccguggacgccgccaaccacugcgggaccaucgcgaacggcguccugcagaccuucaugcggauggccuggggcggguccuacaucgcccuggacagcggcugcggguccugggacugcaucaugacgagcuaccaguaccucaucauccagaacaucaccugggaggaccacugccaguucucccgccccagccccaucggcuaccuggggcugcucagccagcggacccgcgacaucuacaucucccggcgccugcugggcaccuucacguggacccucagcgacuccgagggcaacgagacccccgggggcuacugccugacccgguggaugcugaucgaggccgagcucaagugcuucgggaacacggccguggcgaagugcaacgagaagcacgacgaggaguucugcgacaugcugcgccuguucgacuucaacaagcaggccauccggcgccucaagaccgaggcccagaugagcauccagcugaucaacaaggccgugaacgcccugaucaacgaccagcucaucaugaagaaccaccuccgggacaucaugugcauccccuacugcaacuacuccaaguacugguaccugaaccacaccgucaccggcaagacgagccugccccgcugcuggcugguguccaacgggagcuaccugaacgagacccacuucuccgacgacaucgagcagcaggcggacaacaugaucaccgagcuccugcagaaggaguacaucgaccggcagggcaagaccccgcugggccugguggaccucuucgucuucagcacguccuucuaccugaucagcaucuuccugcaccucgugaagaucccgacccaccgccacguggucgggaagcccugccccaagccccaccggcugaaccacaugggcaucugcuccugcgggcuguacaagcacccgggcgugcccgugaaguggaagcgcugaggacuaguaauaaggaaacuguaugaaugucugugggcaggaagugaagagauccuucuguaaagguuuuuggaauuaugucugcugaauaauaaacuuuuuugaaauaauaaaucugguagaaaaaugagaucucaaaggcucuuuucagagccaccaaaaaaaaaaaaaaaaaaaaaaaaaaaaaaaaaaaaaaaaaaaaaaaaaaaaaaaaaaaaaaaaagaauu

SEQ ID NO: 35791 - RNA, 1778 nt, Artificial Sequence
  mRNA product Design b-4 (hSL-A64-N5) comprising derived and/or modified sequence from LASV(Lassa virus/H.sapiens-wt/NGA/2015/ISTH_0543;Clade II)__AVO03639__GPCmut9 (opt1)
aggagagucccgcagucggcguccagcggcucugcuuguucgugugugugucguugcaggccuuauucaagcuuaccaugggccagaucaucaccuucuuccaggaggugccccacgucaucgaggaggugaugaacaucgugcugaucgcccucagccugcuggccauccucaaggggaucuacaacgucgcgaccugcggccuguucgggcugguguccuuccuccugcugugcggccgcagcugcuccacgaccuacaaggggguguacgagcuccagacccuggagcuggacauggccaaccucaacaugaccaugccgcugagcugcacgaagaacaacucccaccacuacaucauggucggcaacgagaccggccuggagcucacccugaccaacacgagcaucaucaaccacaaguucugcaaccuguccgacgcccacaagaagaaccucuacgaccacgcccugaugagcaucaucuccaccuuccaccugagcauccccaacuucaaccaguacgaggccauguccugcgacuucaacgggggcaagaucagcgugcaguacaaccucucccacaccuacgcgguggacgccgccaaccacugcgggaccaucgccaacggcguccugcagacguucaugcggauggcguggggcgggagcuacaucgcccuggacuccggcugcgggagcugggacugcaucaugaccuccuaccaguaccucgugauccagaacaccaccugggaggaccacugccaguucagccgccccucccccaucggcuaccuggggcugcucagccagcggacgcgcgacaucuacaucagccggcgccugcugggcaccuucaccuggacccucuccgacagcgagggcaacgagacgcccgggggcuacugccugacccgguggaugcugaucgaggccgagcucaagugcuucgggaacaccgccguggccaagugcaacgagaagcacgacgaggaguucugcgacaugcugcgccuguucgacuucaacaagcaggcgauccggcgccucaagaccgaggcccagauguccauccagcugaucaacaaggccgucaacgcccugaucaacgaccagcucaucaugaagaaccaccuccgggacaucaugugcauccccuacugcaacuacagcaaguacugguaccugaaccacacggugaccggcaagaccucccugccccgcugcuggcuggugagcaacggguccuaccugaacgagacccacuucagcgacgacaucgagcagcaggccgacaacaugaucacggagcuccugcagaaggaguacaucgaccggcagggcaagaccccgcugggccuggucgaccucuucguguucuccaccagcuucuaccugaucuccaucuuccugcaccucgugaagaucccgacccaccgccacaucacggggaagcccugccccaagccccaccggcugaaccacaugggcaucugcagcugcgggcuguacaagcacccgggcguccccgugaaguggaagcgcugaggacuaguaauaaggaaacuguaugaaugucugugggcaggaagugaagagauccuucuguaaagguuuuuggaauuaugucugcugaauaauaaacuuuuuugaaauaauaaaucugguagaaaaaugagaucucaaaggcucuuuucagagccaccaaaaaaaaaaaaaaaaaaaaaaaaaaaaaaaaaaaaaaaaaaaaaaaaaaaaaaaaaaaaaaaaagaauu

SEQ ID NO: 35792 - RNA, 1778 nt, Artificial Sequence
  mRNA product Design b-4 (hSL-A64-N5) comprising derived and/or modified sequence from LASV(Lassa virus/H.sapiens-wt/NGA/2016/ISTH_0009;Clade II)__AVO03571__GPCmut9 (opt1)
aggagagucccgcagucggcguccagcggcucugcuuguucgugugugugucguugcaggccuuauucaagcuuaccaugggccagaucaucaccuucuuccaggaggugccccacgucaucgaggaggugaugaacaucgugcugaucgcccucagccugcuggccauccucaaggggaucuacaacgucgcgaccugcggccugcuggggcucguguccuuccugcugcucugcggccgcagcugcuccacgaccuacaaggggguguacgagcugcagacccuggagcucgacauggccagccugaacaugaccaugccgcuguccugcacgaagaacaacagccaccacuacaucauggucggcaacgagaccggccucgagcugacccugaccaacacguccaucaucaaccacaaguucugcaaccucagcgacgcccacaagaagaaccuguacgaccacgcccugauguccaucaucagcaccuuccaccucuccauccccaacuucaaccaguacgaggccaugagcugcgacuucaacgggggccggaucuccgugcaguacaaccugagccacuccuacgcgguggacgccgccaaccacugcgggaccaucgccaacggcguccugcagaccuucaugcgcauggcguggggcgggagcuacaucgcccucgacuccggcugcgggagcugggacugcaucaugacguccuaccaguaccugaucauccagaacaccaccugggaggaccacugccaguucagccggcccagccccaucggcuaccuggggcuccugucccagcgcacccgggacaucuacaucagccgccggcugcucggcacguucaccuggacccuguccgacagcgagggcaacgagacccccgggggcuacugccugacgcgcuggaugcucaucgaggccgagcugaagugcuucgggaacaccgccguggccaagugcaacgagaagcacgacgaggaguucugcgacaugcugcggcuguucgacuucaacaagcaggcgauccgccggcugaagaccgaggcccagauguccauccagcugaucaacaaggccgugaacgcccucaucaacgaccagcugaucaugaagaaccaccuccgcgacaucaugugcaucccguacugcaacuacagcaaguacugguaccucaaccacaccgucacgggcaagaccucccugccccggugcuggcuggugagcaacggguccuaccucaacgagacccacuucagcgacgacaucgagcagcaggccgacaacaugaucaccgagcugcugcagaaggaguacaucgaccgccagggcaagacgccccugggccucguggaccuguucgucuucuccaccagcuucuaccugaucuccaucuuccuccaccuggugaagaucccgacccaccggcacaucaccgggaagcccugccccaagccccaccgccugaaccacaugggcaucugcagcugcgggcucuacaaccacccgggcgugcccgucaaguggaagcggugaggacuaguaauaaggaaacuguaugaaugucugugggcaggaagugaagagauccuucuguaaagguuuuuggaauuaugucugcugaauaauaaacuuuuuugaaauaauaaaucugguagaaaaaugagaucucaaaggcucuuuucagagccaccaaaaaaaaaaaaaaaaaaaaaaaaaaaaaaaaaaaaaaaaaaaaaaaaaaaaaaaaaaaaaaaaagaauu

SEQ ID NO: 35793 - RNA, 1778 nt, Artificial Sequence
  mRNA product Design b-4 (hSL-A64-N5) comprising derived and/or modified sequence from LASV(Lassa virus/H.sapiens-wt/NGA/2016/ISTH_0017;Clade II)__AVO03567__GPCmut9 (opt1)
aggagagucccgcagucggcguccagcggcucugcuuguucgugugugugucguugcaggccuuauucaagcuuaccaugggccagaucaucaccuucuuccaggaggugccccacgucaucgaggaggugaugaacaucgugcugaucgcccucagccugcuggccauccucaaggggaucuacaacgucgcgaccugcggccuguucgggcugguguccuuccuccugcugugcggccgcagcugcuccacgaccuacaaggggguguacgagcuccagacccuggagcuggacauggccagccucaacaugaccaugccgcuguccugcacgaagaacaacagccaccacuacaucauggucggcaacgagaccggccuggagcucacccugaccaacacguccaucaucaaccacaaguucugcaaccugagcgacgcccacaagaagaaccucuacgaccacgcccugauguccaucaucagcaccuuccaccuguccauccccaacuucaaccaguacgaggccaugagcugcgacuucaacgggggcaagaucuccgugcaguacaaccucagccacaccuacgcgaucgacgccgccaaccacugcgggaccaucgccaacggcgugcugcagacguucaugcggauggcguggggcggguccuacaucgcccuggacagcggcugcggguccugggacugcaucaugaccagcuaccaguaccucaucauccagaacaccaccugggaggaccacugccaguucucccgccccagccccaucggcuaccuggggcugcucagccagcggacgcgcgacaucuacaucucccggcgccugcugggcaccuucaccuggacccucagcgacuccgagggcaacgagacgcccgggggcuacugccugacccgguggaugcugaucgaggccgagcucaagugcuucgggaacaccgccgucgccaagugcaacgagaagcacgacgaggaguucugcgacaugcugcgccuguucgacuucaacaagcaggcgauccggcgccucaagaccgaggcccagaugagcauccagcugaucaacaaggccgugaacgcccugaucaacgaccagcucaucaugaagaaccaccuccgggacaucaugugcauccccuacugcaacuacuccaaguacugguaccugaaccacacggugaccggcaagaccagccugccccgcugcuggcuggucuccaacgggagcuaccugaacgagacccacuucuccgacgacaucgagcagcaggccgacaacaugaucacggagcuccugcagaaggaguacauggaccggcagggcaagaccccgcugggccugguggaccucuucguguucagcaccuccuucuaccugaucagcaucuuccugcaccucguccgcaucccgacccaccggcacgugaucgggaagcccugccccaagccccaccgccugaaccacaugggcaucugcuccugcgggcuguacaagcacccgggcgugcccgucaaguggaagcggugaggacuaguaauaaggaaacuguaugaaugucugugggcaggaagugaagagauccuucuguaaagguuuuuggaauuaugucugcugaauaauaaacuuuuuugaaauaauaaaucugguagaaaaaugagaucucaaaggcucuuuucagagccaccaaaaaaaaaaaaaaaaaaaaaaaaaaaaaaaaaaaaaaaaaaaaaaaaaaaaaaaaaaaaaaaaagaauu

SEQ ID NO: 35794 - RNA, 1778 nt, Artificial Sequence
  mRNA product Design b-4 (hSL-A64-N5) comprising derived and/or modified sequence from LASV(Lassa virus/H.sapiens-wt/NGA/2018/ISTH_0959;Clade II)__AVV65099__GPCmut9 (opt1)
aggagagucccgcagucggcguccagcggcucugcuuguucgugugugugucguugcaggccuuauucaagcuuaccaugggccagaucaucaccuucuuccaggaggugccccacgucaucgaggaggugaugaacaucgugcugaucgcccucagccugcuggccauccucaaggggaucuacaacgucgugaccugcggccuguucgggcugguguccuuccuccugcugugcggccgcagcugcuccacgaccuacaagggggucuacgagcuccagacccuggagcuggacauggcgagccucaacaugaccaugccgcuguccugcacgaagaacaacagccaccacuacaucauggugggcaacgagaccggccuggagcucacccugaccaacacguccaucaucaaccacaaguucugcaaccugagcgacgcccacaagaagaaccucuacgaccacgcccugauguccaucaucagcaccuuccaccuguccauccccaacuucaaccaguacgaggccaugagcugcgacuucaacgggggcaagaucuccgugcaguacaaccucagccacgccuacgcgaucgacgccgccaaccacugcgggaccaucgccaacggcguccugcagaccuucaugcggauggcguggggcggguccuacaucgcccuggacagcggcugcggguccugggacugcaucaugacgagcuaccaguaccucaucauccagaacaccaccugggaggaccacugccaguucucccgccccagccccaucggcuaccuggggcugcucagccagcggacccgcgacaucuacaucucccggcgccugcugggcacguucaccuggacccucagcgacuccgagggcaacgagacccccgggggcuacugccugacgcgguggaugcugaucgaggccgagcucaagugcuucgggaacaccgccguggccaagugcaacgagaagcacgacgaggaguucugcgacaugcugcgccuguucgacuucaacaagcaggcgauccggcgccucaagaccgaggcccagaugagcauccagcugaucaacaaggccgugaacgcccugaucaacgaccagcucaucaugaagaaccaccuccgggacaucaugugcaucccguacugcaacuacuccaaguacugguaccugaaccacaccgucacgggcaagaccagccugccccgcugcuggcugguguccaacgggagcuaccugaacgagacccacuucuccgacgacaucgagcagcaggccgacaacaugaucaccgagcuccugcagaaggaguacaucgaccggcagggcaagacgccccugggccugguggaccucuucgucuucagcaccuccuucuaccugaucagcaucuuccugcaccucgugaagaucccgacccaccgccacgugaucgggaagcccugccccaagccccaccggcugaaccacaugggcaucugcuccugcgggcuguacaagcacccgggcguccccgugaaguggaagcgcugaggacuaguaauaaggaaacuguaugaaugucugugggcaggaagugaagagauccuucuguaaagguuuuuggaauuaugucugcugaauaauaaacuuuuuugaaauaauaaaucugguagaaaaaugagaucucaaaggcucuuuucagagccaccaaaaaaaaaaaaaaaaaaaaaaaaaaaaaaaaaaaaaaaaaaaaaaaaaaaaaaaaaaaaaaaaagaauu

SEQ ID NO: 35795 - RNA, 1778 nt, Artificial Sequence
  mRNA product Design b-4 (hSL-A64-N5) comprising derived and/or modified sequence from LASV(LASV003-NIG-2008;Clade II)__AIT17580__GPCmut9 (opt1)
aggagagucccgcagucggcguccagcggcucugcuuguucgugugugugucguugcaggccuuauucaagcuuaccaugggccagaucaucaccuucuuccaggaggugccccacgucaucgaggaggugaugaacaucgugcugaucgcccucagccugcuggccauccucaaggggaucuacaacgucgcgaccugcggccuguucgggcugguguccuuccuccugcugugcggccgcagcugcuccacgaccuacaaggggguguacgagcuccagacccuggagcuggacauggccagccucaacaugaccaugccgcuguccugcacgaagaacaacagccaccacuacaucauggucggcaacgagaccggccuggagcucacccugaccaacacguccaucaucaaccacaaguucugcaaccugagcgacgcccacaagaagaaccucuacgaccacgcccugauguccaucaucagcaccuuccaccuguccauccccaacuucaaccaguacgaggccaugagcugcgacuucaacgggggcaagaucuccgugcaguacaaccucagccacaccuacgcgguggacgccgccaaccacugcgggaccaucgccaacggcguccugcagacguucaugcggauggcguggggcggguccuacaucgcccuggacagcggcugcggguccugggacugcaucaugaccagcuaccaguaccucaucauccagaacaccaccugggaggaccacugccaguucucccgccccagccccaucggcuaccuggggcugcucagccagcggacgcgcgacaucuacaucucccggcgccugcugggcaccuucaccuggacccucagcgacuccgagagcaacgagacgccgggcggguacugccugacccgguggaugcugaucgaggccgagcucaagugcuucggcaacaccgccguggccaagugcaacgagaagcacgacgaggaguucugcgacaugcugcgccuguucgacuucaacaagcaggcgauccggcgccucaaggccgaggcccagauguccauccagcugaucaacaaggccgugaacgcccugaucaacgaccagcucaucaugaagaaccaccuccgggacaucaugugcauccccuacugcaacuacagcaaguacugguaccugaaccacaccgucacggggcgcaccucccugccccggugcuggcuggugagcaacggcuccuaccugaacgagacccacuucagcgacgacaucgagcagcaggcggacaacaugaucaccgagcuccugcagaaggaguacauggaccgccaggggaagacgccccugggccugguggaccucuucgucuucuccaccagcuucuaccugaucuccaucuuccugcaccucgugaagaucccgacccaccggcacgugaucggcaagcccugccccaagccccaccgccugaaccacauggggaucugcagcugcggccuguacaagcacccggggguccccgugaaguggaagcggugaggacuaguaauaaggaaacuguaugaaugucugugggcaggaagugaagagauccuucuguaaagguuuuuggaauuaugucugcugaauaauaaacuuuuuugaaauaauaaaucugguagaaaaaugagaucucaaaggcucuuuucagagccaccaaaaaaaaaaaaaaaaaaaaaaaaaaaaaaaaaaaaaaaaaaaaaaaaaaaaaaaaaaaaaaaaagaauu

SEQ ID NO: 35796 - RNA, 1778 nt, Artificial Sequence
  mRNA product Design b-4 (hSL-A64-N5) comprising derived and/or modified sequence from LASV(LASV035-NIG-2009;Clade II)__AIT17588__GPCmut9 (opt1)
aggagagucccgcagucggcguccagcggcucugcuuguucgugugugugucguugcaggccuuauucaagcuuaccaugggccagaucaucaccuucuuccaggaggugccccacgucaucgaggaggugaugaacaucgugcugaucgcccucagccugcuggccauccucaaggggaucuacaacgucgcgaccugcggccuguucgggcugguguccuuccuccugcugugcggccgcagcugcuccacgaccuacaaggggguguacgagcuccagacccuggagcuggacauggccagccucaacaugaccaugccgcuguccugcacgaagaacaacagccaccacuacaucauggucggcaacgagaccggccuggagcucacccugaccaacacguccaucaucaaccacaaguucugcaaccugagcgacgcccacaagaagaaccucuacgaccacgcccugauguccaucaucagcaccuuccaccuguccauccccaacuucaaccaguacgaggccaugagcugcgacuucaacgggggcaagaucuccgugcaguacaaccucagccacgcguacgccguggacgccgccaaccacugcgggaccaucgcgaacggcguccugcagaccuucaugcggauggccuggggcggguccuacaucgcccuggacagcggcugcggguccugggacugcaucaugacgagcuaccaguaccucaucauccagaacaccaccugggaggaccacugccaguucucccgccccagccccaucggcuaccuggggcugcucagccagcggacccgcgacaucuacaucucccggcgccugcugggcacguucaccuggacccucagcgacuccgagggcaacgagacccccgggggcuacugccugacgcgguggaugcugaucgaggccgagcucaagugcuucgggaacaccgccguggcgaagugcaacgagaagcacgacgaggaguucugcgacaugcugcgccuguucgacuucaacaagcaggccauccggcgccucaaggccgaggcccagaugagcauccagcugaucaacaaggccgugaacgcgcugaucaacgaccagcucaucaugaagaaccaccuccgggacaucaugugcauccccuacugcaacuacuccaaguacugguaccugaaccacaccgucaccggcaagacgagccugccccgcugcuggcugguguccaacgggagcuaccugaacgagacccacuucuccgacgacaucgagcagcaggccgacaacaugaucaccgagcuccugcagaaggaguacaucgaccggcagggcaagaccccgcugggccugguggaccucuucgucuucagcacguccuucuaccugaucagcaucuuccugcaccucgugaagaucccgacccaccgccacgugaucgggaagcccugccccaagccccaccggcugaaccacaugggcaucugcuccugcgggcuguacaagcacccgggcguccccgugaaguggaagcgcugaggacuaguaauaaggaaacuguaugaaugucugugggcaggaagugaagagauccuucuguaaagguuuuuggaauuaugucugcugaauaauaaacuuuuuugaaauaauaaaucugguagaaaaaugagaucucaaaggcucuuuucagagccaccaaaaaaaaaaaaaaaaaaaaaaaaaaaaaaaaaaaaaaaaaaaaaaaaaaaaaaaaaaaaaaaaagaauu

SEQ ID NO: 35797 - RNA, 1778 nt, Artificial Sequence
  mRNA product Design b-4 (hSL-A64-N5) comprising derived and/or modified sequence from LASV(LASV1000-NIG-2009;Clade II)__AIT17782__GPCmut9 (opt1)
aggagagucccgcagucggcguccagcggcucugcuuguucgugugugugucguugcaggccuuauucaagcuuaccaugggccagaucaucaccuucuuccaggaggugccccacgucaucgaggaggugaugaacaucgugcugaucgcccucagccugcuggccauccucaaggggaucuacaacgucgcgaccugcggccuguucgggcugguguccuuccuccugcugugcggccgcagcugcuccacgaccuacaaggggguguacgagcuccagacccuggagcuggacauggccagccucaacaugaccaugccgcuguccugcacgaagaacaacagccaccacuacaucauggucggcaacgagaccggccuggagcucacccugaccaacacguccaucaucaaccacaaguucugcaaccugagcgacgcccacaagaagaaccucuacgaccacgcccugauguccaucaucagcaccuuccaccuguccauccccaacuucaaccaguacgaggccaugagcugcgacuucaacgggggcaagaucuccgugcaguacaaccucagccacaccuacgcgguggacgccgccaaccacugcgggaccaucgccaacggcguccugcagacguucaugcggauggcguggggcggguccuacaucgcccuggacagcggcugcggguccugggacugcaucaugaccagcuaccaguaccucaucauccagaacaccaccugggaggaccacugccaguucucccgccccagccccaucggcuaccuggggcugcucagccagcggacgcgcgacaucuacaucucccggcgccugcugggcaccuucaccuggacccucagcgacuccgagggcaacgagacgcccgggggcuacugccugacccgguggaugcugaucgaggccgagcucaagugcuucgggaacaccgccguggccaagugcaacgagaagcacgacgaggaguucugcgacaugcugcgccuguucgacuucaacaagcaggcgaucaagcggcucaagaccgaggcccagaugagcauccagcugaucaacaaggccgugaacgcccugaucaacgaccagcucaucaugaagaaccaccuccgcgacaucaugugcauccccuacugcaacuacuccaaguacugguaccugaaccacacggucaccggcaagaccagccugccccggugcuggcugguguccaacgggagcuaccugaacgagacccacuucuccgacgacaucgagcagcaggccgacaacaugaucacggagcuccugcagaaggaguacaucgaccgccagggcaagaccccgcugggccugguggaccucuucgucuucagcaccuccuucuaccugaucagcaucuuccugcaccucgugaagaucccgacccaccggcacguggucgggaagcccugccccaagccccaccgccugaaccacaugggcaucugcuccugcgggcuguacaagcacccgggcgugcccgugaaguggaagcggugaggacuaguaauaaggaaacuguaugaaugucugugggcaggaagugaagagauccuucuguaaagguuuuuggaauuaugucugcugaauaauaaacuuuuuugaaauaauaaaucugguagaaaaaugagaucucaaaggcucuuuucagagccaccaaaaaaaaaaaaaaaaaaaaaaaaaaaaaaaaaaaaaaaaaaaaaaaaaaaaaaaaaaaaaaaaagaauu

SEQ ID NO: 35798 - RNA, 1778 nt, Artificial Sequence
  mRNA product Design b-4 (hSL-A64-N5) comprising derived and/or modified sequence from LASV(LASV221-NIG-2010;Clade II)__AIT17624__GPCmut9 (opt1)
aggagagucccgcagucggcguccagcggcucugcuuguucgugugugugucguugcaggccuuauucaagcuuaccaugggccagaucaucaccuucuuccaggaggugccccacgucaucgaggaggugaugaacaucgugcugaucgcccucagccugcuggccauccucaaggggaucuacaacgucgcgaccugcggccuguucgggcugguguccuuccuccugcugugcggccgcagcugcuccacgaccuacaaggggguguacgagcuccagacccuggagcuggacauggccagccucaacaugaccaugccgcuguccugcacgaagaacaacagccaccacuacaucauggucggcaacgagaccggccuggagcucacccugaccaacacguccaucaucaaccacaaguucugcaaccugagcgacgcccacaagaagaaccucuacgaccacgcccugauguccaucaucagcaccuuccaccuguccauccccaacuucaaccaguacgaggccaugagcugcgacuucaacgggggcaagaucuccgugcaguacaaccucagccacaccuacgcgaucgacgccgccaaccacugcgggaccaucgccaacggcgugcugcagacguucaugcggauggcguggggcggguccuacaucgcccuggacagcggcugcggguccugggacugcaucaugaccagcuaccaguaccucaucauccagaacaccaccugggaggaccacugccaguucucccgccccagccccaucggcuaccuggggcugcucagccagcggacgcgcgacaucuacaucucccggcgccugcugggcaccuucaccuggacccucagcgacuccgagggcaacgagacgcccgggggcuacugccugacccgguggaugcugaucgaggccgagcucaagugcuucgggaacaccgccgucgccaagugcaacgagaagcacgacgaggaguucugcgacaugcugcgccuguucgacuucaacaagcaggcgauccggcgccucaagaccgaggcccagaugagcauccagcugaucaacaaggccgugaacgcccugaucaacgaccagcucaucaugaagaaccaccuccgggacaucaugugcauccccuacugcaacuacuccaaguacugguaccugaaccacacggugaccggcaagaccagccugccccgcugcuggcuggucuccaacgggagcuaccugaacgagacccacuucuccgacgacaucgagcagcaggccgacaacaugaucacggagaugcuccagaaggaguacauggaccggcagggcaagaccccgcugggccugguggaccuguucguguucagcaccuccuucuaccucaucagcaucuuccugcaccuggucaagaucccgacccaccgccacgugaucgggaagcccugccccaagccccaccggcucaaccacaugggcaucugcuccugcgggcuguacaagcacccgggcgugcccgucaaguggaagcgcugaggacuaguaauaaggaaacuguaugaaugucugugggcaggaagugaagagauccuucuguaaagguuuuuggaauuaugucugcugaauaauaaacuuuuuugaaauaauaaaucugguagaaaaaugagaucucaaaggcucuuuucagagccaccaaaaaaaaaaaaaaaaaaaaaaaaaaaaaaaaaaaaaaaaaaaaaaaaaaaaaaaaaaaaaaaaagaauu

SEQ ID NO: 35799 - RNA, 1778 nt, Artificial Sequence
  mRNA product Design b-4 (hSL-A64-N5) comprising derived and/or modified sequence from LASV(LASV237-NIG-2010;Clade II)__AIT17638__GPCmut9 (opt1)
aggagagucccgcagucggcguccagcggcucugcuuguucgugugugugucguugcaggccuuauucaagcuuaccaugggccagaucaucaccuucuuccaggaggugccccacgucaucgaggaggugaugaacaucgugcugaucgcccucagccugcuggccauccucaaggggaucuacaacgucgcgaccugcggccuguucgggcugguguccuuccuccugcugugcggccgcagcugcuccacgaccuacaaggggguguacgagcuccagacccuggagcuggacauggccagccucaacaugaccaugccgcuguccugcacgaagaacaacagccaccacuacaucauggucggcaacgagaccggccuggagcucacccugaccaacacguccaucaucaaccacaaguucugcaaccugagcgacgcccacaagaaggaccucuacgaccacgcccugauguccaucaucagcaccuuccaccuguccauccccaacuucaaccaguacgaggccaugagcugcgacuucaacgggggcaagaucuccgugcaguacaaccucagccacaccuacgcgguggacgccgccaaccacugcgggaccaucgccaacggcguccugcagacguucaugcggauggcguggggcggguccuacaucgcccuggacagcggcugcggguccugggacugcaucaugaccagcuaccaguaccucaucauccagaacaccaccugggaggaccacugccaguucucccgccccagccccaucggcuaccuggggcugcucagccagcggacgcgcgacaucuacaucucccggcgccugcugggcaccuucaccuggacccucagcgacuccgagggcaacgagacgcccgggggcuacugccugacccgguggaugcugaucgaggccgagcucaagugcuucgggaacaccgccguggccaagugcaacgagaagcacgacgaggaguucugcgacaugcugcgccuguucgacuucaacaagcaggcgauccggcgccucaagaccgaggcccagaugagcauccagcugaucaacaaggccgugaacgcccugaucaacgaccagcucaucaugaagaaccaccuccgggacaucaugugcauccccuacugcaacuacuccaaguacugguaccugaaccacacggucaccggcaagaccagccugccccgcugcuggcugguguccaacgggagcuaccugaacgagacccacuucuccgacgacaucgagcagcaggccgacaacaugaucacggagcuccugcagaaggaguacauggaccggcagggcaagaccccgcugggccugguggaccucuucgucuucagcaccuccuucuaccugaucagcaucuuccugcaccucaucaagaucccgacccaccgccacaucacggggaagcccugccccaagccccaccggcugaaccacaugggcaucugcuccugcgggcuguacaagcacccgggcgugcccgugaaguggaagcgcugaggacuaguaauaaggaaacuguaugaaugucugugggcaggaagugaagagauccuucuguaaagguuuuuggaauuaugucugcugaauaauaaacuuuuuugaaauaauaaaucugguagaaaaaugagaucucaaaggcucuuuucagagccaccaaaaaaaaaaaaaaaaaaaaaaaaaaaaaaaaaaaaaaaaaaaaaaaaaaaaaaaaaaaaaaaaagaauu

SEQ ID NO: 35800 - RNA, 1778 nt, Artificial Sequence
  mRNA product Design b-4 (hSL-A64-N5) comprising derived and/or modified sequence from LASV(LASV253-NIG-2011;Clade II)__AIT17670__GPCmut9 (opt1)
aggagagucccgcagucggcguccagcggcucugcuuguucgugugugugucguugcaggccuuauucaagcuuaccaugggccagaucaucaccuucuuccaggaggugccccacgucaucgaggaggugaugaacaucgugcugaucgcccucagccugcuggccauccucaaggggaucuacaacgucgcgaccugcggccuguucgggcugguguccuuccuccugcugugcggccgcagcugcuccacgaccuacaaggggguguacgagcuccagacccuggagcuggacauggccagccucaacaugaccaugccgcuguccugcacgaagaacaacagccaccacuacaucauggucggcaacgagaccggccuggagcucacccugaccaacacguccaucaucaaccacaaguucugcaaccugagcgacgcccacaagaagaaccucuacgaccacgcccugauguccaucaucagcaccuuccaccuguccauccccaacuucaaccaguacgaggccaugagcugcgacuucaacgggggcaagaucuccgugcaguacaaccucagccacaccuacgcgguggacgccgccaaccacugcgggaccaucgccaacggcguccugcagacguucaugcggauggcguggggcggguccuacaucgcccuggacagcggcugcggguccugggacugcaucaugaccagcuaccaguaccucaucauccagaacaccaccugggaggaccacugccaguucucccgccccagccccaucggcuaccuggggcugcucagccagcggacgcgcgacaucuacaucucccggcgccugcugggcaccuucaccuggacccucagcgacuccgagggcaacgagacgcccgggggcuacugccugacccgguggaugcugaucgaggccgagcucaagugcuucgggaacaccgccguggccaagugcaacgagaagcacgacgaggaguucugcgacaugcugcgccuguucgacuucaacaagcaggcgauccggcgccucaaggccgaggcccagaugagcauccagcugaucaacaaggccgugaacgcccugaucaacgaccagcucaucaugaagaaccaccuccgggacaucaugugcaucccguacugcaacuacuccaaguacugguaccugaaccacaccgucacgggccgcaccagccugccccggugcuggcugguguccaacgggagcuaccugaacgagacccacuucuccgacgacaucgagcagcaggcggacaacaugaucaccgagcuccugcagaaggaguacaucgaccgccagggcaagacgccccugggccugguggaccucuucgucuucagcaccuccuucuaccugaucagcaucuuccugcaccucgugaagaucccgacccaccggcacaucaucgggaagcccugccccaagccccaccgccugaaccacaugggcaucugcuccugcgggcuguacaagcacccgggcgugcccgucaaguggaagcggugaggacuaguaauaaggaaacuguaugaaugucugugggcaggaagugaagagauccuucuguaaagguuuuuggaauuaugucugcugaauaauaaacuuuuuugaaauaauaaaucugguagaaaaaugagaucucaaaggcucuuuucagagccaccaaaaaaaaaaaaaaaaaaaaaaaaaaaaaaaaaaaaaaaaaaaaaaaaaaaaaaaaaaaaaaaaagaauu

SEQ ID NO: 35801 - RNA, 1778 nt, Artificial Sequence
  mRNA product Design b-4 (hSL-A64-N5) comprising derived and/or modified sequence from LASV(LASV254-NIG-2011;Clade II)__AIT17674__GPCmut9 (opt1)
aggagagucccgcagucggcguccagcggcucugcuuguucgugugugugucguugcaggccuuauucaagcuuaccaugggccagaucaucaccuucuuccaggaggugccccacgucaucgaggaggugaugaacaucgugcugaucgcccucagccugcuggccauccucaaggggaucuacaacgucgcgaccugcggccuguucgggcugguguccuuccuccugcugugcggccgcagcugcuccacgaccuacaaggggguguacgagcuccagacccuggagcuggacaugaccaaccucaacaugacgaugccgcugagcugcaccaagaacaacucccaccacuacaucauggucggcaacgagaccggccuggagcucacccugacgaacaccagcaucaucaaccacaaguucugcaaccuguccgacgcccacaagaagaaccucuacaaccacgcccugaugagcaucaucuccaccuuccaccugagcauccccaacuucaaccaguacgaggccauguccugcgacuucaacgggggcaagaucagcgugcaguacaaccucucccacagcuacgccguggacgcggccaaccacugcgggaccaucgccaacggcguccugcagacguucaugcggauggccuggggcggguccuacaucgcgcuggacagcggcugcgggaacugggacugcaucaugaccuccuaccaguaccucaucauccagaacaccaccugggaggaccacugccaguucagccgccccucccccaucggcuaccuggggcugcucagccagcggacgcgcgacaucuacaucagccggcgccugcugggcaccuucaccuggacccucuccgacagcgagggcaacgagacgcccgggggcuacugccugacccgguggaugcugaucgaggccgagcucaagugcuucgggaacaccgccguggccaagugcaacgagaagcacgacgaggaguucugcgacaugcugcgccuguucgacuucaacaagcaggccauccggcgccucaagaccgaggcgcaggccaacauccagcugaucaacaaggccgugaacgcccugaucaacgaccagcucaucaugaagaaccaccuccgggacaucaugugcauccccuacugcaacuacuccaaguacugguaccugaaccacacggucaccggcaagaccagccugccccgcugcuggcugguguccaacgggagcuaccugaacgagacccacuucuccgacgacaucgagcagcaggccgacaacaugaucacggagcuccugcagaaggaguacauggaccggcagggcaagaccccgcugggccugguggaccucuucgucuucagcaccuccuucuaccugaucagcaucuuccugcaccucgugaagaucccgacccaccgccacgugaucgggaagcccugccccaagccccaccggcugaaccacaugggcaucugcuccugcgggcuguacaagcacccgggcguccccgugaaguggaagcgcugaggacuaguaauaaggaaacuguaugaaugucugugggcaggaagugaagagauccuucuguaaagguuuuuggaauuaugucugcugaauaauaaacuuuuuugaaauaauaaaucugguagaaaaaugagaucucaaaggcucuuuucagagccaccaaaaaaaaaaaaaaaaaaaaaaaaaaaaaaaaaaaaaaaaaaaaaaaaaaaaaaaaaaaaaaaaagaauu

SEQ ID NO: 35802 - RNA, 1778 nt, Artificial Sequence
  mRNA product Design b-4 (hSL-A64-N5) comprising derived and/or modified sequence from LASV(Nig08-A19;Clade III)__ADU56618__GPCmut9 (opt1)
aggagagucccgcagucggcguccagcggcucugcuuguucgugugugugucguugcaggccuuauucaagcuuaccaugggccagaucgugaccuucuuccaggaggucccccacgugaucgaggaggugaugaacaucguccugaucgcccucagcauccuggccauccugaaggggcucuacaacaucgcgaccugcggccugaucgggcuggugacguuccuccugcuguccggccgcagcugcuccaugaccuacaaggggguguacgagcuccagacccuggagcugaacaugaacacccucaacaugacgaugccgcugagcugcaccaagaacaacucccaccacuacaucauggucggcaacgagaccggccuggagcucacccugacgaacaccagccugcuccaccacaaguucugcaaccuguccgacgcccacaagaagaaccuguacgaccacacccucaugagcaucaucuccaccuuccaccugagcauccccaacuucaaccaguacgaggccauguccugcgacuucaacgggggcaagaucacggugcaguacaaccugagccacuccuacgccaucgacgccgcgaaccacugcgggaccguggccaacggcguccuccagaccuucaugcggauggccuggggcgggagcuacaucgcccuggacuccggcugcgggaagugggacugcaucaugaccagcuaccaguaccugaucauccagaacacgaccugggaggaccacugccaguucucccgccccagccccaucggcuaccucgggcugcugucccagcggacccgcgacaucuacaucagccggcgccuccugggcaccuucacguggacccugagcgacuccgagggcaacgagacccccgggggcuacugccucacccgguggaugcugaucgaggcggagcugaagugcuucgggaacacggccguggccaagugcaacgagaagcacgacgaggaguucugcgacaugcuccgccuguucgacuucaacaagcaggccauccggcgccugaaggccgaggcgcagaugagcauccagcucaucaacaaggccgugaacgcccugaucaacgaccagcugaucaugaagaaccaccuccgggacaucaugugcauccccuacugcaacuacuccaaguacugguaccugaaccacaccagcaccggccgcaccucccugccccggugcuggcucgucagcaacggguccuaccugaacgagacgcacuucagcgacgacaucgagcagcaggccgacaacaugaucaccgagaugcugcagaaggaguaccuggaccgccagggcaagaccccgcucggccugguggaccuguucguguucuccaccagcuucuaccucaucuccaucuuccugcaccuggucaagaucccgacgcaccggcacaucguggggaagcccugccccaagccccaccgccucaaccacaugggcaucugcagcugcgggcuguacaagcagccgggcgugcccguccgguggaagcgcugaggacuaguaauaaggaaacuguaugaaugucugugggcaggaagugaagagauccuucuguaaagguuuuuggaauuaugucugcugaauaauaaacuuuuuugaaauaauaaaucugguagaaaaaugagaucucaaaggcucuuuucagagccaccaaaaaaaaaaaaaaaaaaaaaaaaaaaaaaaaaaaaaaaaaaaaaaaaaaaaaaaaaaaaaaaaagaauu

SEQ ID NO: 35803 - RNA, 1781 nt, Artificial Sequence
  mRNA product Design b-4 (hSL-A64-N5) comprising derived and/or modified sequence from LASV(G1180-SLE-2010;Clade IV)__AIT17168__GPCmut9 (opt1)
aggagagucccgcagucggcguccagcggcucugcuuguucgugugugugucguugcaggccuuauucaagcuuaccaugggccagaucgugaccuucuuccaggaggucccccacgugaucgaggaggugaugaacaucguccugaucgcccucagcauccuggccgugcugaaggggcucuacaacuucgcgaccugcggccugguggggcugcucaccuuccugcugcucugcggccgcuccugcaccgccagccgguacaagggggucuacgagcugcagacccuggagcucaacauggagacccugaacaugacgaugccgcuguccugcaccaagaacaacagccaccacuacaucauggugggcaacgagaccggccucgagcugacccugacgaacaccuccaucaucaaccacaaguucugcaaccucagcgacgcccacaagaagaaccuguacgaccacgcccugauguccaucaucagcaccuuccaccucuccauccccaacuucaaccaguacgaggccaugagcugcgacuucaacgggggcaagaucuccgugcaguacaaccugagccacuccuacgcgggggacgccgccaaccacugcggcaccgucgccaacggggugcugcagacguucaugcgcauggcguggggcggcagcuacaucgcccucgacuccgggugcggcagcugggacugcaucaugaccuccuaccaguaccugaucauccagaacaccaccugggaggaccacugccaguucagccggcccucccccaucggguaccugggccuccugagccagcgcacgcgggacaucuacaucagccgccggcugcucggcaccuucaccuggacccuguccgacagcgaggggaaggacacgccgggcggguacugccugacccgcuggaugcucaucgaggccgagcugaagugcuucggcaacaccgccguggccaagugcaacgagaagcacgacgaggaguucugcgacaugcugcggcuguucgacuucaacaagcaggcgauccagcgccugaaggccgaggcccagauguccauccagcugaucaacaaggccgucaacgcccucaucaacgaccagcugaucaugaagaaccaccuccgggacaucaugugcauccccuacugcaacuacagcaaguacugguaccucaaccacaccacgaccgggaagaccucccugcccaagugcuggcuggugagcaacggcuccuaccucaacgagacccacuucagcgacgacaucgagcagcaggcggacaacaugaucacggagaugcugcagaaggaguacauggagcgccagggcaagacgccccuggggcugguggaccucuucgucuucuccaccagcuucuaccugaucuccaucuuccugcaccucgugaagaucccgacccaccggcacaucgugggcaagagcugccccaagccccaccgccugaaccacauggggaucugcuccugcggccuguacaagcagcccggggucccggugaaguggaagcggugaggacuaguaauaaggaaacuguaugaaugucugugggcaggaagugaagagauccuucuguaaagguuuuuggaauuaugucugcugaauaauaaacuuuuuugaaauaauaaaucugguagaaaaaugagaucucaaaggcucuuuucagagccaccaaaaaaaaaaaaaaaaaaaaaaaaaaaaaaaaaaaaaaaaaaaaaaaaaaaaaaaaaaaaaaaaagaauu

SEQ ID NO: 35804 - RNA, 1781 nt, Artificial Sequence
  mRNA product Design b-4 (hSL-A64-N5) comprising derived and/or modified sequence from LASV(G1442-SLE-2011;Clade IV)__AIT17180__GPCmut9 (opt1)
aggagagucccgcagucggcguccagcggcucugcuuguucgugugugugucguugcaggccuuauucaagcuuaccaugggccagaucgugaccuucuuccaggaggucccccacgugaucgaggaggugaugaacaucguccugaucgcccucagcauccuggccgugcugaaggggcucuacaacguggcgaccugcggccugaucgggcuggucacguuccuccugcugugcggccgcuccugcaccaccacccucuacaaggggguguacgagcugcagacgcuggagcucaacauggagacccugaacaugaccaugccgcugagcugcaccaagaacaacucccaccacuacauccgggugggcaacgagacgggccucgagcugacccugaccaacaccagcaucaucaaccacaaguucugcaaccucuccgacgcccacaagaagaaccuguacgaccacgcccugaugagcaucaucuccacguuccaccucagcauccccaacuucaaccaguacgaggccauguccugcgacuucaacgggggcaagaucagcguccaguacaaccugucccacagcuacgccggggacgcggccaaccacugcggcaccguggccaacggggugcugcagaccuucaugcgcauggccuggggcggcuccuacaucgcgcucgacagcgggugcggcaacugggacugcaucaugaccuccuaccaguaccugaucauccagaacacgaccugggacgaccacugccaguucagccggcccucccccaucggguaccugggccuccugagccagcgcacccgggacgucuacaucucccgccggcugcucggcaccuucacguggacccugagcgacagcgaggggaaggacaccccgggcggguacugccugacccgcuggaugcucaucgaggccgagcugaagugcuucggcaacacggccguggccaagugcaacgagaagcacgacgaggaguucugcgacaugcugcggcuguucgacuucaacaagcaggccauccagcgccugaaggcggaggcccagauguccauccagcugaucaacaaggccgugaacgcccucaucaacgaccagcugaucaugaagaaccaccuccgggacaucaugugcauccccuacugcaacuacagcaaguacugguaccucaacaacaccgccaccgggaagaccucccugcccaagugcuggcugaucagcaacggcuccuaccucaacgagacgcacuucagcgacgacaucgagcaggaggcggacaacaugaucaccgagaugcugcagaaggaguacauggagcgccagggcaagacgccccuggggcuggucgaccucuucguguucuccaccagcuucuaccugaucuccaucuuccugcaccucgugaagaucccgacccaccggcacaucgucggcaagagcugccccaagccccaccgccugaaccacauggggaucugcuccugcggccuguacaagcagcccggggugccggugcgguggaagcgcugaggacuaguaauaaggaaacuguaugaaugucugugggcaggaagugaagagauccuucuguaaagguuuuuggaauuaugucugcugaauaauaaacuuuuuugaaauaauaaaucugguagaaaaaugagaucucaaaggcucuuuucagagccaccaaaaaaaaaaaaaaaaaaaaaaaaaaaaaaaaaaaaaaaaaaaaaaaaaaaaaaaaaaaaaaaaagaauu

SEQ ID NO: 35805 - RNA, 1781 nt, Artificial Sequence
  mRNA product Design b-4 (hSL-A64-N5) comprising derived and/or modified sequence from LASV(G3010-SLE-2013;Clade IV)__AIT17344__GPCmut9 (opt1)
aggagagucccgcagucggcguccagcggcucugcuuguucgugugugugucguugcaggccuuauucaagcuuaccaugggccagaucgugaccuucuuccaggaggucccccacgugaucgaggaggugaugaacaucguccugaucgcccucagcauccuggccgugcugaaggggcucuacaacuucgcgaccugcggccugguggggcuggucacguuccuccugcugugcggccgcuccugcaccaccagccucuacaaggggguguacgagcugcagacccuggagcucaacauggagacgcugaacaugaccaugccgcuguccugcaccaagaacaacagccaccacuacaucauggugggcaacgagaccggccucgagcugacgcugaccaacaccuccaucaucaaccacaaguucugcaaccucagcgacgcccacaagaagaaccuguacaaccacgcccugauguccaucaucagcaccuuccaccucuccauccccaacuucaaccaguacgaggccaugagcugcgacuucaacgggggcaagaucuccguccaguacaaccugagccacuccuacgccggggacgcggccagccacugcggcacgguggccaacggggugcugcagaccuucaugcggauggccuggggcggcuccuacaucgcgcucgacagcgggugcggcaagugggacugcaucaugaccuccuaccaguaccugaucauccagaacaccacgugggaggaccacugccaguucagccgccccucccccaucggguaccugggccuccugagccagcggacccgcgacaucuacaucagccggcgccugcucggcaccuucaccuggacgcuguccgacagcgaggggaaggacaccccgggcggguacugccugacccgguggaugcucaucgaggccgagcugaagugcuucggcaacaccgccgucgccaagugcaacgagaagcacgacgaggaguucugcgacaugcugcgccucuucgacuucaacaagcaggccauccagcggcugaagacggaggcgcagauguccauccagcugaucaacaaggccgugaacgcccucaucaacgaccagcugaucaugaagaaccaccuccgcgacaucaugugcauccccuacugcaacuacagcaaguacugguaccugaaccacaccaccaccgggaagacgucccugcccaagugcuggcuggugagcaacggcuccuaccucaacgagacccacuucagcgacgacaucgagcagcaggccgacaacaugaucaccgagaugcugcagaaggaguacauggagcggcagggcaagacgccccuggggcuggucgaccucuucguguucuccaccagcuucuaccugaucuccaucuuccugcaccucgugaagaucccgacccaccgccacaucgucggcaagagcugccccaagccccaccggcugaaccacauggggaucugcuccugcggccuguacaagcagcccggggugccggugcgcuggaagcggugaggacuaguaauaaggaaacuguaugaaugucugugggcaggaagugaagagauccuucuguaaagguuuuuggaauuaugucugcugaauaauaaacuuuuuugaaauaauaaaucugguagaaaaaugagaucucaaaggcucuuuucagagccaccaaaaaaaaaaaaaaaaaaaaaaaaaaaaaaaaaaaaaaaaaaaaaaaaaaaaaaaaaaaaaaaaagaauu

SEQ ID NO: 35806 - RNA, 1781 nt, Artificial Sequence
  mRNA product Design b-4 (hSL-A64-N5) comprising derived and/or modified sequence from LASV(G502-SLE-2009;Clade IV)__AIT17126__GPCmut9 (opt1)
aggagagucccgcagucggcguccagcggcucugcuuguucgugugugugucguugcaggccuuauucaagcuuaccaugggccagaucgugaccuucuuccaggaggucccccacgugaucgaggaggugaugaacaucguccugaucgcccucagcauccuggccgugcugaaggggcucuacaacuucgcgaccugcggccugguggggcugcucacguuccugcugcucugcggccgcuccugcaccaccgggcuguacaagggcgucuacgagcugcagacccucgagcugaacauggagacgcugaacaugaccaugccgcucagcugcaccaagaacaacucccaccacuacaucauggugggcaacgagaccgggcuggagcugacgcucaccaacaccagcaucaucaaccacaaguucugcaaccuguccgacgcccacaagaagaaccuguacgaccacgcccucaugagcaucaucuccaccuuccaccugagcauccccaacuucaaccaguacgaggccauguccugcgacuucaacggcgggaagaucagcgugcaguacaaccugucccacagcuacgccggcgacgcggccgaccacugcgggacggucgccaacggcgugcuccagaccuucaugcggauggccuggggcggguccuacaucgcgcuggacagcggcugcgggcgcugggacugcaucaugaccuccuaccaguaccugaucauccagaacaccacgugggaggaccacugccaguucagccggcccucccccaucggcuaccucggccugcugagccagcgcacccgggacaucuacaucucccgccggcuccuggggaccuucaccuggacgcugagcgacagcgagggcaaggacacccccgggggcuacugccucacccgcuggaugcugaucgaggccgagcugaagugcuucgggaacaccgccguggccaagugcaacgagaagcacgacgaggaguucugcgacaugcuccggcuguucgacuucaacaagcaggccauccagcgccugaaggcggaggcccagauguccauccagcucaucaacaaggccgucaacgcccugaucaacgaccagcuggugaugaagaaccaccuccgggacaucaugugcauccccuacugcaacuacagccgcuacugguaccugaaccacacgaccaccggccggaccucccugcccaagugcuggcucgugagcaacggcuccuaccugaacgagacgcacuucagcgacgacaucgagcagcaggccgacaacaugaucaccgagaugcugcagaaggaguacauggagcgccaggggaagaccccgcugggccucgucgaccuguucguguucuccaccagcuucuaccugaucuccaucuuccuccaccuggugaagaucccgacgcaccggcacaucgucggcaagagcugccccaagccccaccgccugaaccacauggggaucugcuccugcgggcucuacaagcagcccggcgugccggugaaguggaagcggugaggacuaguaauaaggaaacuguaugaaugucugugggcaggaagugaagagauccuucuguaaagguuuuuggaauuaugucugcugaauaauaaacuuuuuugaaauaauaaaucugguagaaaaaugagaucucaaaggcucuuuucagagccaccaaaaaaaaaaaaaaaaaaaaaaaaaaaaaaaaaaaaaaaaaaaaaaaaaaaaaaaaaaaaaaaaagaauu

SEQ ID NO: 35807 - RNA, 1781 nt, Artificial Sequence
  mRNA product Design b-4 (hSL-A64-N5) comprising derived and/or modified sequence from LASV(G733-SLE-2010;Clade IV)__AIT17154__GPCmut9 (opt1)
aggagagucccgcagucggcguccagcggcucugcuuguucgugugugugucguugcaggccuuauucaagcuuaccaugggccagaucgugaccuucuuccaggaggucccccacgugaucgaggaggugaugaacaucguccugaucgcccucagcauccuggccgugcugaaggggcucuacaacuucgcgaccugcggcaucguggggcuggucuccuuccugcuccugugcggccgcagcugcacgaccucccuguacaaggggguguacgagcuccagacccuggagcugaacauggagacccucaacaugacgaugccgcugagcugcaccaagaacaacucccaccacuacaucauggugggcaacgagaccggccuggagcucacccugacgaacaccagcaucaucaaccacaaguucugcaaccuguccgacgcccacaagaagaaccucuacgaccacgcccugaugagcaucaucuccaccuuccaccugagcauccccaacuucaaccaguacgaggccauguccugcgacuucaacgggggcaagaucagcguccaguacaaccucucccacagcuacgccggggacgcggccaaccacugcggcaccaucgccaacggggugcugcagacguucaugcggauggccuggggcggcuccuacaucgcgcuggacagcgggugcgaccgcugggacugcaucaugaccuccuaccaguaccucaucauccagaacaccaccugggaggaccacugccaguucagccggcccucccccaucggcuaccuggggcugcucagccagcgcacgcgggacaucuacaucagccgccggcugcugggcaccuucaccuggacccucuccgacagcgagggcaaggacacgcccgggggcuacugccugacccgcuggaugcugaucgaggccgagcucaagugcuucgggaacaccgccguggccaagugcaacgagaagcacgacgaggaguucugcgacaugcugcggcuguucgacuucaacaagcaggccauccagcgccucaaggcggaggcccagauguccauccagcugaucaacaaggccgucaacgcccugaucaacgaccagcucaucaugaagaaccaccuccgggacaucaugugcauccccuacugcaacuacagcaaguacugguaccugaaccacaccacgaccggcaagaccucccugcccaagugcuggcuggugagcaacggguccuaccugaacgagacccacuucagcgacgacaucgagcagcaggccgacaacaugaucacggagaugcuccagaaggaguacauggagcgccagggcaagaccccgcugggccugguggaccuguucgucuucuccaccagcuucuaccucaucuccaucuuccugcaccuggugaagaucccgacccaccggcacguggucggcaagagcugccccaagccccaccgccucaaccacauggggaucugcuccugcgggcuguacggccagcccggggugccggugaaguggaagcggugaggacuaguaauaaggaaacuguaugaaugucugugggcaggaagugaagagauccuucuguaaagguuuuuggaauuaugucugcugaauaauaaacuuuuuugaaauaauaaaucugguagaaaaaugagaucucaaaggcucuuuucagagccaccaaaaaaaaaaaaaaaaaaaaaaaaaaaaaaaaaaaaaaaaaaaaaaaaaaaaaaaaaaaaaaaaagaauu

SEQ ID NO: 35808 - RNA, 1781 nt, Artificial Sequence
  mRNA product Design b-4 (hSL-A64-N5) comprising derived and/or modified sequence from MOPV/LASV reassortant(IGS-1;Clade IV)__AFY05576__GPCmut9 (opt1)
aggagagucccgcagucggcguccagcggcucugcuuguucgugugugugucguugcaggccuuauucaagcuuaccaugggccagaucgugaccuucuuccaggaggucccccacgugaucgaggaggugaugaacaucguccugaucgcccucagcgugcuggccgugcugaaggggcucuacaacuucgcgaccugcggccuggucgggcuggugacguuccuccugcugugcggccgcuccugcaccaccagccucuacaaggggguguacgagcugcagacccuggagcucaacauggagacgcugaacaugaccaugccgcuguccugcaccaagaacaacagccaccacuacaucauggucggcaacgagaccggccucgagcugacgcugaccaacaccuccaucaucaaccacaaguucugcaaccucagcgacgcccacaagaagaaccuguacgaccacgcccugauguccaucaucagcaccuuccaccucuccauccccaacuucaaccaguacgaggccaugagcugcgacuucaacgggggcaagaucuccgugcaguacaaccugagccacuccuacgccggggacgcggccaaccacugcggcacgguggccaacgggguccugcagaccuucaugcggauggccuggggcggcagcuacaucgcgcucgacuccgggugcggcaacugggacugcaucaugaccagcuaccaguaccugaucauccagaacaccacgugggaggaccacugccaguucucccgccccagccccaucggguaccugggccuccugucccagcggacccgcgacaucuacaucagccggcgccugcucggcaccuucaccuggacgcugagcgacuccgagggggaggacaccccgggcggguacugccugacccgguggaugcucaucgaggccgagcugaagugcuucggcaacaccgccguggccaagugcaacgagaagcacgacgaggaguucugcgacaugcugcgccucuucgacuucaacaagcaggccauccagcggcugaaggcggaggcccagaugagcauccagcugaucaacaaggccgugaacgcccucaucaacgaccagcugaucaugaagaaccaccuccgcgacaucaugugcauccccuacugcaacuacuccaaguacugguaccugaaccacacgaccaccgggcggaccagccugcccaagugcuggcuggucuccaacggcagcuaccucaacgagacgcacuucuccgacgacaucgagcagcaggccgacaacaugaucaccgagaugcugcagaaggaguacauggagcgccagggcaagacgccccuggggcugguggaccucuucguguucagcaccuccuucuaccugaucagcaucuuccugcaccucgucaagaucccgacccaccggcacaucgugggcaaguccugccccaagccccaccgccugaaccacauggggaucugcagcugcggccuguacaagcagcccggggugccggucaaguggaagcggugaggacuaguaauaaggaaacuguaugaaugucugugggcaggaagugaagagauccuucuguaaagguuuuuggaauuaugucugcugaauaauaaacuuuuuugaaauaauaaaucugguagaaaaaugagaucucaaaggcucuuuucagagccaccaaaaaaaaaaaaaaaaaaaaaaaaaaaaaaaaaaaaaaaaaaaaaaaaaaaaaaaaaaaaaaaaagaauu

SEQ ID NO: 35809 - RNA, 1781 nt, Artificial Sequence
  mRNA product Design b-4 (hSL-A64-N5) comprising derived and/or modified sequence from LASV(LM765-SLE-2012;Clade IV)__AIT17814__GPCmut9 (opt1)
aggagagucccgcagucggcguccagcggcucugcuuguucgugugugugucguugcaggccuuauucaagcuuaccaugggccagaucgugaccuucuuccaggaggucccccacgugaucgaggaggugaugaacaucguccugaucgcccucagcauccuggccgugcugaaggggcucuacaacuucgcgaccugcggccugguggggcuggucacguuccuccugcugugcggccgcuccugcaccaccagccucuacaaggggguguacgagcugcagacccuggagcucaacauggagacgcugaacaugaccaugccgcuguccugcaccaagaacaacagccaccacuacaucauggugggcaacgagaccggccucgagcugacgcugaccaacaccuccaucaucgaccacaaguucugcaaccucagcgacgcccaccggaagaaccuguacgaccacgcccugauguccaucaucagcaccuuccaccucuccauccccaacuucaaccaguacgaggccaugagcugcgacuucaacgggggcaagaucuccguccaguacaaccugagccacuccuacgccaaggacgcggccgaccacugcgggacgguggccaacggcgugcugcagaccuucaugcgcauggccuggggcgggagcuacaucgcgcucgacuccggcugcgggcggugggacugcaucaugaccagcuaccaguaccugaucauccagaacaccacgugggaggaccacugccaguucucccgccccagccccaucggcuaccuggggcuccugucccagcggacccgcgacaucuacaucagccggcgccugcucggcaccuucaccuggacgcugagcgacuccgagggcaaggacacccccgggggcuacugccugacccgguggaugcucaucgaggccgagcugaagugcuucgggaacaccgccgucgccaagugcaacgagaagcacgacgaggaguucugcgacaugcugcgccucuucgacuucaacaagcaggccauccagcggcugaaggcggaggcccagaugagcauccagcugaucaacaaggccgugaacgcccucaucaacgaccagcugaucaugaagaaccaccuccgcgacaucaugugcauccccuacugcaacuacuccaaguacugguaccugaaccacacgaccaccggcaagaccagccugcccaagugcuggcugguguccaacgggagcuaccucaacgagacgcacuucuccgacgacaucgagcagcaggccgacaacaugaucaccgagaugcugcagaaggaguacauggagcggcagggcaagaccccgcugggccuggucgaccucuucguguucagcaccuccuucuaccugaucagcaucuuccugcaccucgugaagaucccgacgcaccgccacaucgucgggaagcccugccccaagccccaccggcugaaccacaugggcaucugcuccugcgggcuguacaagcagccgggcgugcccgugaaguggaagcgcugaggacuaguaauaaggaaacuguaugaaugucugugggcaggaagugaagagauccuucuguaaagguuuuuggaauuaugucugcugaauaauaaacuuuuuugaaauaauaaaucugguagaaaaaugagaucucaaaggcucuuuucagagccaccaaaaaaaaaaaaaaaaaaaaaaaaaaaaaaaaaaaaaaaaaaaaaaaaaaaaaaaaaaaaaaaaagaauu

SEQ ID NO: 35810 - RNA, 1781 nt, Artificial Sequence
  mRNA product Design b-4 (hSL-A64-N5) comprising derived and/or modified sequence from LASV(LM776-SLE-2012;Clade IV)__AIT17824__GPCmut9 (opt1)
aggagagucccgcagucggcguccagcggcucugcuuguucgugugugugucguugcaggccuuauucaagcuuaccaugggccagaucgugaccuucuuccaggaggucccccacgugaucgaggaggugaugaacaucguccugaucgcccucagcauccuggccgugcugaaggggcucuacaacuucgcgaccugcggccugguggggcuggucacguuccuccugcugugcggccgcuccugcaccaccagcguguacaaggggguguacgagcuccagacccuggagcugaacauggagacgcucaacaugaccaugccgcuguccugcaccaagaacaacagccaccacuacaucauggucggcaacgagaccggccuggagcucacgcugaccaacaccuccaucaucaaccacaaguucugcaaccugagcgacgcccacaagaagaaccucuacgaccacgcccugauguccaucaucagcaccuuccaccuguccauccccaacuucaaccaguacgaggccaugagcugcgacuucaacgggggcaagaucuccgugcaguacaaccucagccacuccuacgccggggacgcggccaaccacugcggcacgguggccaacgggguccugcagaccuucaugcggauggccuggggcggcagcuacaucgcgcuggacuccgggugcggcaagugggacugcaucaugaccagcuaccaguaccucaucauccagaacaccacgugggaggaccacugccaguucucccgccccagccccaucggguaccugggccugcucucccagcggacccgcgacaucuacaucagccggcgccugcugggcaccuucaccuggacgcucagcgacuccgaggggaaggacaccccgggcggguacugccugacccgguggaugcugaucgaggccgagcucaagugcuucggcaacaccgccguggccaagugcaacgagaagcacgacgaggaguucugcgacaugcugcgccuguucgacuucaacaagcaggccauccagcggcucaaggcggaggcccagaugagcauccagcugaucaacaaggccgugaacgcccugaucaacgaccagcucaucaugaagaaccaccuccgcgacaucaugugcauccccuacugcaacuacuccaaguacugguaccugaaccacacgaccaccgggaagaccagccugcccaagugcuggcuggucuccaacggcagcuaccugaacgagacgcacuucuccgacgacaucgagcagcaggccgacaacaugaucaccgagaugcuccagaaggaguacauggagcggcagggcaagacgccccuggggcugguggaccuguucguguucagcaccuccuucuaccucaucagcaucuuccugcaccuggucaagaucccgacccaccgccacaucgugggcaaguccugccccaagccccaccggcucaaccacauggggaucugcagcugcggccuguacaagcagcccggggugccgguccgcuggaagcggugaggacuaguaauaaggaaacuguaugaaugucugugggcaggaagugaagagauccuucuguaaagguuuuuggaauuaugucugcugaauaauaaacuuuuuugaaauaauaaaucugguagaaaaaugagaucucaaaggcucuuuucagagccaccaaaaaaaaaaaaaaaaaaaaaaaaaaaaaaaaaaaaaaaaaaaaaaaaaaaaaaaaaaaaaaaaagaauu

SEQ ID NO: 35811 - RNA, 1781 nt, Artificial Sequence
  mRNA product Design b-4 (hSL-A64-N5) comprising derived and/or modified sequence from LASV(Mad39;Clade IV)__ANH09722__GPCmut9 (opt1)
aggagagucccgcagucggcguccagcggcucugcuuguucgugugugugucguugcaggccuuauucaagcuuaccaugggccagaucgugaccuucuuccaggaggucccccacgugaucgaggaggugaugaacaucguccugaucgcccucagcauccuggccgugcugaaggggcucuacaacguggcgaccugcggccugaucgggcuggucacguuccuccugcugugcggccgcuccugcaccaccacccucuacaaggggguguacgagcugcaggcccuggagcucaacauggagacgcugaacaugaccaugccgcugagcugcaccaagaacaacucccaccacuacauccgggugggcaacgagaccggccucgagcugacgcugaccaacaccagccucaucaaccacaaguucugcaaccuguccgacgcccacaagaagaaccuguacgaccacgcccucaugagcaucaucuccaccuuccaccugagcauccccaacuucaaccaguacgaggccauguccugcgacuucaacgacgggaagaucagcguccaguacaaccugucccacacguacgcgggcgacaccgccaaccacugcgggaccguggccaacggcgugcuccagaccuucaugcgcauggccuggggcgggagcuacaucgcgcuggacuccggcugcgggggcugggacugcaucaugacgagcuaccaguaccugaucauccagaacaccaccugggaggaccacugccaguucucccggcccagccccaucggguaccucggccugcugucccagcgcacccgggacaucuacaucagccgccggcuccugggcacguucaccuggacccuguccgacagcgaggggaaggacaccccgggcggguacugccucacgcgcuggaugcugaucgaggccgagcugaagugcuucggcaacaccgccgucgccaagugcaacgagaagcacgacgaggaguucugcgacaugcuccggcuguucgacuucaacaagcaggccauccagcgccugaaggcggaggcccagaugagcauccagcucaucaacaaggccgugaacgcccugaucaacgaccagcugaucaugaagaaccaccuccgggacaucaugugcauccccuacugcaacuacuccaaguacugguaccugaaccacaccgugaccgggaagacgagccugcccaagugcuggcucgucuccaacggcagcuaccugaacgagacccacuucuccgacgacaucgagcagcaggccgacaacaugaucaccgagaugcugcagaaggaguacauggagcgccagggcaagacgccccuggggcucguggaccuguucguguucagcaccuccuucuaccugaucagcaucuuccuccaccuggucaagaucccgacccaccggcacguggugggcaagcccugccccaagccccaccgccugaaccacauggggaucugcuccugcggcuucuacaagcagccggggguccccgugcgguggaagcgcugaggacuaguaauaaggaaacuguaugaaugucugugggcaggaagugaagagauccuucuguaaagguuuuuggaauuaugucugcugaauaauaaacuuuuuugaaauaauaaaucugguagaaaaaugagaucucaaaggcucuuuucagagccaccaaaaaaaaaaaaaaaaaaaaaaaaaaaaaaaaaaaaaaaaaaaaaaaaaaaaaaaaaaaaaaaaagaauu

SEQ ID NO: 35812 - RNA, 1781 nt, Artificial Sequence
  mRNA product Design b-4 (hSL-A64-N5) comprising derived and/or modified sequence from LASV(Z0947-SLE-2011;Clade IV)__AIT17840__GPCmut9 (opt1)
aggagagucccgcagucggcguccagcggcucugcuuguucgugugugugucguugcaggccuuauucaagcuuaccaugggccagaucgugaccuucuuccaggaggucccccacgugaucgaggaggugaugaacaucguccugaucgcccucagcauccuggccgugcugaaggggcucuacaacuucgcgaccugcggccugguggggcuggucacguuccuccugcugugcggccgcuccugcaccaucagccucuacaaggggguguacgagcugcagacccuggagcucaacauggagacccugaacaugacgaugccgcuguccugcaccaagaacaacagccaccacuacaucauggugggcaacgagaccggccucgagcugacccugacgaacaccuccaucaucaaccacaaguucugcaaccucagcgacgcccacaagaagaaccuguacgaccacgcccugauguccaucaucagcaccuuccaccucuccauccccaacuucaaccaguacgaggccaugagcugcgacuucaacgggggcaagaucuccguccaguacaaccugagccacuccuacgccggggacgcggccaaccacugcggcaccguggccaacggggugcugcagacguucaugcggauggccuggggcggcagcuacaucgcgcucgacuccgggugcgaccgcugggacugcaucaugaccagcuaccaguaccugaucauccagaacaccaccugggaggaccacugccaguucucccggcccagccccaucggcuaccuggggcuccugucccagcgcacgcgggacaucuacaucagccgccggcugcucggcaccuucaccuggacccugagcgacuccgagggcaaggacacgcccgggggcuacugccugacccgcuggaugcucaucgaggccgagcugaagugcuucgggaacaccgccgucgccaagugcaacgagaagcacgacgaggaguucugcgacaugcugcggcuguucgacuucaacaagcaggccauccagcgccugaaggcggaggcccagaugagcauccagcugaucaacaaggccgugaacgcccucaucaacgaccagcugaucaugaagaaccaccuccgggacaucaugugcauccccuacugcaacuacuccaaguacugguaccucaaccacaccacgaccggcaagaccagccugcccaagugcuggcugguguccaacgggagcuaccucaacgagacccacuucuccgacgacaucgagcagcaggccgacaacaugaucacggagaugcugcagaaggaguacauggagcgccagggcaagaccccgcugggccuggucgaccucuucguguucagcaccuccuucuaccugaucagcaucuuccugcaccucgugaagaucccgacccaccggcacaucgucgggaagcccugccccaagccccaccgccugaaccacaugggcaucugcuccugcgggcuguacaagcagccgggcgugcccgugaaguggaagcggugaggacuaguaauaaggaaacuguaugaaugucugugggcaggaagugaagagauccuucuguaaagguuuuuggaauuaugucugcugaauaauaaacuuuuuugaaauaauaaaucugguagaaaaaugagaucucaaaggcucuuuucagagccaccaaaaaaaaaaaaaaaaaaaaaaaaaaaaaaaaaaaaaaaaaaaaaaaaaaaaaaaaaaaaaaaaagaauu

SEQ ID NO: 35813 - RNA, 1781 nt, Artificial Sequence
  mRNA product Design b-4 (hSL-A64-N5) comprising derived and/or modified sequence from LASV(Josiah;Clade IV)__NP_694870__GPCmut9 (opt4)
aggagagucccgcagucggcguccagcggcucugcuuguucgugugugugucguugcaggccuuauucaagcuuaccaugggccagaucgugaccuucuuccaggaggugccccacgugaucgaggaggugaugaacaucgugcugaucgcccugagcgugcuggccgugcugaagggccuguacaacuucgccaccugcggccuggugggccuggugaccuuccugcugcugugcggcagaagcugcaccaccagccuguacaagggcguguacgagcugcagacccuggagcugaacauggagacccugaacaugaccaugccccugagcugcaccaagaacaacagccaccacuacaucauggugggcaacgagaccggccuggagcugacccugaccaacaccagcaucaucaaccacaaguucugcaaccugagcgacgcccacaagaagaaccuguacgaccacgcccugaugagcaucaucagcaccuuccaccugagcauccccaacuucaaccaguacgaggccaugagcugcgacuucaacggcggcaagaucagcgugcaguacaaccugagccacagcuacgccggcgacgccgccaaccacugcggcaccguggccaacggcgugcugcagaccuucaugagaauggccuggggcggcagcuacaucgcccuggacagcggcugcggcaacugggacugcaucaugaccagcuaccaguaccugaucauccagaacaccaccugggaggaccacugccaguucagcagacccagccccaucggcuaccugggccugcugagccagagaaccagagacaucuacaucagcagaagacugcugggcaccuucaccuggacccugagcgacagcgagggcaaggacacccccggcggcuacugccugaccagauggaugcugaucgaggccgagcugaagugcuucggcaacaccgccguggccaagugcaacgagaagcacgacgaggaguucugcgacaugcugagacuguucgacuucaacaagcaggccauccagagacugaaggccgaggcccagaugagcauccagcugaucaacaaggccgugaacgcccugaucaacgaccagcugaucaugaagaaccaccugagagacaucaugugcauccccuacugcaacuacagcaaguacugguaccugaaccacaccaccaccggcagaaccagccugcccaagugcuggcuggugagcaacggcagcuaccugaacgagacccacuucagcgacgacaucgagcagcaggccgacaacaugaucaccgagaugcugcagaaggaguacauggagagacagggcaagaccccccugggccugguggaccuguucguguucagcaccagcuucuaccugaucagcaucuuccugcaccuggugaagauccccacccacagacacaucgugggcaagagcugccccaagccccacagacugaaccacaugggcaucugcagcugcggccuguacaagcagcccggcgugcccgugaaguggaagagaugaggacuaguaauaaggaaacuguaugaaugucugugggcaggaagugaagagauccuucuguaaagguuuuuggaauuaugucugcugaauaauaaacuuuuuugaaauaauaaaucugguagaaaaaugagaucucaaaggcucuuuucagagccaccaaaaaaaaaaaaaaaaaaaaaaaaaaaaaaaaaaaaaaaaaaaaaaaaaaaaaaaaaaaaaaaaagaauu

SEQ ID NO: 35814 - RNA, 1778 nt, Artificial Sequence
  mRNA product Design b-4 (hSL-A64-N5) comprising derived and/or modified sequence from LASV(LP;Clade I)__AAF86701__GPCmut9 (opt4)
aggagagucccgcagucggcguccagcggcucugcuuguucgugugugugucguugcaggccuuauucaagcuuaccaugggccagaucaucaccuucuuccaggaggugccccacgugaucgaggaggugaugaacaucgugcugaucgcccugagccugcuggccauccugaagggccuguacaacaucgccaccugcggcaucaucggccugguggccuuccuguuccugugcggcaagagcugcagccugacccugaagggcggcuacgagcugcagacccuggagcugaacauggagacccugaacaugaccaugccccugagcugcaccaagaacagcagccaccacuacaucagagugggcaacgagaccggccuggagcugacccugaccaacaccagcaucaucaaccacaaguucugcaaccugagcgacgcccacaagaagaaccuguacgaccacgcccugaugagcaucaucagcaccuuccaccugagcauccccaacuucaaccaguacgaggccaugagcugcgacuucaacggcggcaagaucagcgugcaguacaaccugagccacagcuacgccggcgacgccgccgagcacugcggcaccguggccaacggcgugcugcagaccuucaugagaauggccuggggcggcagauacaucgcccuggacagcggcugcggcaacugggacugcaucaugaccagcuaccaguaccugaucauccagaacaccaccugggaggaccacugccaguucagcagacccagccccaucggcuaccugggccugcugagccagagaaccagagacaucuacaucagcagaagacugcugggcaccuucaccuggacccugagcgacagcgagggcaacgagacccccggcggcuacugccugaccagauggaugcugaucgaggccgagcugaagugcuucggcaacaccgccguggccaagugcaacgagaagcacgacgaggaguucugcgacaugcugagacuguucgacuucaacaagcaggccaucagaagacugaaggccgaggcccagaugagcauccagcugaucaacaaggccgugaacgcccugaucaacgaccagcugaucaugaagaaccaccugagagacaucaugugcauccccuacugcaacuacagcaaguacugguaccugaaccacaccagcagcggcagaaccagccugcccaagugcuggcugaucagcaacggcagcuaccugaacgagacccaguucagcgacgacaucgagcagcaggccgacaacaugaucaccgagaugcugcagaaggaguacaucgagagacagggcaagaccccccugggccugguggacaucuucaucuucagcaccagcuucuaccugaucagcaucuuccugcaccugaucaagauccccacccacagacacaucgugggcaagcccugccccaagccccacagacugaaccacaugggcgugugcagcugcggccuguacaagcaccccggcgugcccaccaaguggaagagaugaggacuaguaauaaggaaacuguaugaaugucugugggcaggaagugaagagauccuucuguaaagguuuuuggaauuaugucugcugaauaauaaacuuuuuugaaauaauaaaucugguagaaaaaugagaucucaaaggcucuuuucagagccaccaaaaaaaaaaaaaaaaaaaaaaaaaaaaaaaaaaaaaaaaaaaaaaaaaaaaaaaaaaaaaaaaagaauu

SEQ ID NO: 35815 - RNA, 1778 nt, Artificial Sequence
  mRNA product Design b-4 (hSL-A64-N5) comprising derived and/or modified sequence from LASV(803213;Clade II)__AAF86703__GPCmut9 (opt4)
aggagagucccgcagucggcguccagcggcucugcuuguucgugugugugucguugcaggccuuauucaagcuuaccaugggccagaucaucaccuucuuccaggaggugccccacgugaucgaggaggugaugaacaucgugcugaucgcccugagccugcuggccauccugaagggcaucuacaacguggccaccugcggccuguucggccugaucagcuuccugcugcugugcggcagaagcugcagcgugaccuacaagggcguguacgagcugcagacccuggagcugaacauggccaaccugaacaugaccaugccccugagcugcaccaagaacaacagccaccacuacaucauggugggcaacgagaccggccuggagcugacccugaccaacaccagcaucaucaaccacaaguucugcaaccugagcgacgcccacaagaagaaccuguacgaccacgcccugaugagcaucaucagcaccuuccaccugagcauccccaacuucaaccaguacgaggccaugagcugcgacuucaacggcggcaagaucagcgugcaguacaaccugagccacagcuucgccguggacgccgccaaccacugcggcaccaucgccaacggcgugcugcagaccuucaugagaauggccuggggcggcagcuacaucgcccuggacagcggcugcggcaacugggacugcaucaugaccagcuaccaguaccugaucauccagaacaccaccugggaggaccacugccaguucagcagacccagccccaucggcuaccugggccugcugagccagagaaccagagacaucuacaucagcagaagacugcugggcaccuucaccuggacccugagcgacagcgagggcaacgaggcccccggcggcuacugccugaccagauggaugcugaucgaggccgagcugaagugcuucggcaacaccgccguggccaagugcaacgagaagcacgacgaggaguucugcgacaugcugagacuguucgacuucaacaagcaggccaucaagagacugaagaccgaggcccagaugagcauccagcugaucaacaaggccgugaacgcccugaucaacgaccagcugaucaugaagaaccaccugagagacaucaugugcauccccuacugcaacuacagcagauacugguaccugaaccacaccgugaccggcaagaccagccugcccagaugcuggcuggugagcaacggcagcuaccugaacgagacccacuucagcgacgacaucgagcagcaggccgacaacaugaucaccgagaugcugcagaaggaguacauggacagacagggcaagaccccccugggccugguggaccuguucguguucagcaccagcuucuaccugaucagcaucuuccugcaccuggugaagauccccacccacagacacaucgugggcaagcccugccccaagccccacagacugaaccacaugggcaucugcagcugcggccuguacaagcaccccggcgugcccgugaaguggaagagaugaggacuaguaauaaggaaacuguaugaaugucugugggcaggaagugaagagauccuucuguaaagguuuuuggaauuaugucugcugaauaauaaacuuuuuugaaauaauaaaucugguagaaaaaugagaucucaaaggcucuuuucagagccaccaaaaaaaaaaaaaaaaaaaaaaaaaaaaaaaaaaaaaaaaaaaaaaaaaaaaaaaaaaaaaaaaagaauu

SEQ ID NO: 35816 - RNA, 1778 nt, Artificial Sequence
  mRNA product Design b-4 (hSL-A64-N5) comprising derived and/or modified sequence from LASV(GA391;Clade III)__CAA36645__GPCmut9 (opt4)
aggagagucccgcagucggcguccagcggcucugcuuguucgugugugugucguugcaggccuuauucaagcuuaccaugggccagaucgugaccuucuuccaggaggugccccacgugaucgaggaggugaugaacaucgugcugaucgcccugagcauccuggccauccugaagggccuguacaacguggccaccugcggccugaucggccuggugaccuuccugcugcugagcggcagaagcugcagccugaucuacaagggcaccuacgagcugcagacccuggagcugaacauggagacccugaacaugaccaugccccugagcugcaccaagaacaacagccaccacuacaucagagugggcaacgagaccggccuggagcugacccugaccaacaccagcauccugaaccacaaguucugcaaccugagcgacgcccacaagagaaaccuguacgaccacagccugaugagcaucaucagcaccuuccaccugagcauccccaacuucaaccaguacgaggccaugagcugcgacuucaacggcggcaagaucaccgugcaguacaaccugagccacagcuucgccguggacgccgccggccacugcggcacccuggccaacggcgugcugcagaccuucaugagaauggccuggggcggcagcuacaucgcccuggacagcggcugcggcaacugggacugcaucaugaccagcuaccaguaccugaucauccagaacaccaccugggacgaccacugccaguucagcagacccagccccaucggcuaccugggccugcugagccagagaaccagagacaucuacaucagcagaagacugcugggcaccuucaccuggacccugagcgacagcgagggcaacgagacccccggcggcuacugccugaccagauggaugcugaucgaggccgagcugaagugcuucggcaacaccgccguggccaagugcaacgagaagcacgacgaggaguucugcgacaugcugagacuguucgacuucaacaagcaggccaucagaagacugaagaccgaggcccagaugagcauccagcugaucaacaaggccgugaacgcccugaucaacgaccagcugaucaugaagaaccaccugagagacaucaugugcauccccuacugcaacuacagcagauacugguaccugaaccacaccagcaccggcaagaccagccugcccagaugcuggcugaucagcaacggcagcuaccugaacgagaccaaguucagcgacgacaucgagcagcaggccgacaacaugaucaccgagaugcugcagaaggaguacaucgacagacagggcaagaccccccugggccugguggaccuguucguguucagcaccagcuucuaccugaucagcaucuuccugcaccuggugaagauccccacccacagacacaucgugggcaagcccugccccaagccccacagacugaaccacaugggcaucugcagcugcggccuguacaagcagcccggcgugcccgugagauggaagagaugaggacuaguaauaaggaaacuguaugaaugucugugggcaggaagugaagagauccuucuguaaagguuuuuggaauuaugucugcugaauaauaaacuuuuuugaaauaauaaaucugguagaaaaaugagaucucaaaggcucuuuucagagccaccaaaaaaaaaaaaaaaaaaaaaaaaaaaaaaaaaaaaaaaaaaaaaaaaaaaaaaaaaaaaaaaaagaauu

SEQ ID NO: 35817 - RNA, 1781 nt, Artificial Sequence
  mRNA product Design b-4 (hSL-A64-N5) comprising derived and/or modified sequence from LASV(AV;Clade V)__CCA30314__GPCmut9 (opt4)
aggagagucccgcagucggcguccagcggcucugcuuguucgugugugugucguugcaggccuuauucaagcuuaccaugggccagaucgugaccuucuuccaggaggugccccacgugaucgaggaggugaugaacaucgugcugaucgcccugagcauccuggccgugcugaagggccuguacaacaucgccaccugcggccugaucggccugaucaccuuccugcugcugugcggcagaagcugcagcagcaaccuguacaagggcguguacgagcugcagagccuggaccugaacauggagacccugaacaugaccaugccccugagcugcaccaagaacaacagccaccacuacaucagagugggcaacgacaccggccuggagcugacccugaccaacaccagcauccugaaccacaaguucugcaaccugagcgacgcccacaagaaggaccuguacgaccacgcccugaugagcaucaucagcaccuuccaccugagcauccccaacuucaaccaguacgaggccaugagcugcgacuucaacggcggcaagaucagcgugcaguacaaccugagccacagcuacgccaucgacgccgccaaccacugcggcaccguggccaacggcauccugcagaccuucaugagaauggccuggggcggcagcuacaucgcccuggacagcggcugcggcaacugggacugcaucaugaccagcuaccaguaccugaucauccagaacaccaccugggagaaccacugccaguucagcagacccagccccaucggcuaccugggccugcugagccagagaaccagagacaucuacaucagcagaagacugcugggcaccuucaccuggacccugagcgacagcgagggcaacgccacccccggcggcuacugccugaccagauggaugcugaucgaggccgagcugaagugcuucggcaacaccgccguggccaagugcaacgagaagcacgacgaggaguucugcgacaugcugagacuguucgacuucaacaagcaggccaucagcagacugaagagcgaggcccagaugagcauccagcugaucaacaaggccgugaacgcccugaucaacgaccagcugaucaugaagaaccaccugagagacaucaugugcauccccuacugcaacuacagcaaguacugguaccugaaccacaccaucaccggcaagaccagccugcccaagugcuggcuggugagcaacggcagcuaccugaacgagacccacuucagcgacgacaucgagcagcaggccgacaacaugaucaccgagaugcugcagaaggaguacauggagagacagggcaagaccccccugggccugguggaccuguucguguucagcaccagcuucuaccugaucagcaucuuccugagacuggugaagauccccacccacagacacaucgugggcaagcccugccccaagccccacagacugaaccacaugggcaucugcagcugcggccuguacaagcagcccggcgugcccgugagauggaagagaugaggacuaguaauaaggaaacuguaugaaugucugugggcaggaagugaagagauccuucuguaaagguuuuuggaauuaugucugcugaauaauaaacuuuuuugaaauaauaaaucugguagaaaaaugagaucucaaaggcucuuuucagagccaccaaaaaaaaaaaaaaaaaaaaaaaaaaaaaaaaaaaaaaaaaaaaaaaaaaaaaaaaaaaaaaaaagaauu

SEQ ID NO: 35818 - RNA, 1778 nt, Artificial Sequence
  mRNA product Design b-4 (hSL-A64-N5) comprising derived and/or modified sequence from LASV(Togo/2016/7082;Clade VI)__AMR44577__GPCmut9 (opt4)
aggagagucccgcagucggcguccagcggcucugcuuguucgugugugugucguugcaggccuuauucaagcuuaccaugggccagaucaucaccuucuuccaggaggugccccacgugaucgaggaggugaugaacaucgugcugaucgcccugagccugcuggccauccugaagggcguguacaacguggccaccugcggcaucaucggccuggugaccuuccuguuccugugcggcagaagcugcagccugaucuacaagggcagcuacgagcugcagacccuggagcugaacauggagacccugaacaugaccaugccccugagcugcaccaagaacagcagccaccacuacaucagagugggcaacgagaccggccuggagcugacccugaccaacaccagcaucaucaaccacaaguucugcaaccugagcgacgcccacaagagaaaccuguacgaccacgcccugaugagcauccugagcaccuuccaccugagcauccccaacuucaaccaguacgaggccaugagcugcgacuucaacggcggcaagaucagcgugcaguacaaccugagccacgccuacgccguggacgccgccgagcacugcggcaccguggccaacggcgugcugcagaccuucaugagaauggccuggggcggcagcuacaucgcccuggacagcggcugcggcaacugggacugcaucaugaccagcuaccaguaccugaucauccagaacaccaccugggaggaccacugccaguucagcagacccagccccaucggcuaccugggccugcugagccagagaaccagagacaucuacaucagcagaagacugcugggcaccuucaccuggacccugagcgacagcgagggcaacgagacccccggcggcuacugccugaccagauggaugcugaucgaggccgagcugaagugcuucggcaacaccgccguggccaagugcaacgagaagcacgacgaggaguucugcgacaugcugagacuguucgacuucaacaagcaggccauccagagacugaagagcgaggcccagaugagcauccagcugaucaacaaggccgugaacgcccugaucaacgaccagcugaucaugaagaaccaccugagagacaugaugugcauccccuacugcaacuacagcaaguacugguaccugaaccacaccagcagcggcagaaccagccugcccaagugcuggcuggugagcaacggcagcuaccugaacgagacccacuucagcgacgacaucgagcagcaggccgacaacaugaucaccgagaugcugcagaaggaguacaucgacagacagggcaagaccccccugggccugguggaccuguucguguucagcaccagcuucuaccugaucagcaucuuccugcaccugaucaagauccccacccacagacacaucgugggcaagcccugccccaagccccacagacugaaccacaugggcaucugcagcugcggccuguacaagcagcccggcgugcccaccagauggaagagaugaggacuaguaauaaggaaacuguaugaaugucugugggcaggaagugaagagauccuucuguaaagguuuuuggaauuaugucugcugaauaauaaacuuuuuugaaauaauaaaucugguagaaaaaugagaucucaaaggcucuuuucagagccaccaaaaaaaaaaaaaaaaaaaaaaaaaaaaaaaaaaaaaaaaaaaaaaaaaaaaaaaaaaaaaaaaagaauu

SEQ ID NO: 35819 - RNA, 1778 nt, Artificial Sequence
  mRNA product Design b-4 (hSL-A64-N5) comprising derived and/or modified sequence from LASV(KAK-428;Clade n.d. (VII))__ANH09740__GPCmut9 (opt4)
aggagagucccgcagucggcguccagcggcucugcuuguucgugugugugucguugcaggccuuauucaagcuuaccaugggccagaucgugaccuucuuccaggaggugccccacgugaucgaggaggugaugaacaucgugcugaucgcccugagccugcuggccauccugaagggccuguacaacuucgccaccugcggcgugaucggccugaucaccuuccugcugcugugcggcagaagcugcagcgccaccuacaagggccaguacgagcugcagacccuggagcugaacauggagagccugaacaugaccaugccccugagcugcaccaagaacaacagccaccacuacaucagagccggcaacaacaccggccuggagcugacccugaccaacaccagcaucaucagccacaaguucugcaaccugagcgacgcccacaagaagaaccuguacgaccacacccugaugagcaucaucaccaccuuccaccugagcauccccaacuucaaccaguacgaggccaugagcugcgacuucaacggcggcaagaucagcauccaguacaaccugagccacagcuacgccggcgacgccgcccagcacugcggcaccguggccaacggcgugcugcagaccuucaugagaauggccuggggcggcagcuaccuggcccuggacagcggcugcagaggcugggacugcaucaucagcagcuaccaguaccugaucauccagaacaccaccugggacgaccacugccaguucagcagacccagccccaucggcuaccugggcuucgugagccagaagaccagagacaucuacaucagcagaagacugcugggcaccuucaccuggacccugagcgacagcgagggccacgacaugcccggcggcuacugccugaccagauggaugcugaucgaggccgaccugaagugcuucggcaacaccgccguggccaagugcaacgagaagcacgacgaggaguucugcgacauguggagacuguucgacuucaacaagcaggccauccagagacugaaggccgaggcccagaugaacauccagcugaucaacaaggccgugaacgcccugaucaacgaccagcugaugaugaagaaccaccugagagacaucaugugcauccccuacugcaacuacagcaaguucugguaccugaacaacaccaccaccggcagaaccagccugcccagaugcuggcugaucagcaacggcagcuaccugaacgagacccacuucagcgacgacaucgagcagcaggccgacaacaugaucaccgagaugcugcagaaggaguacauggacagacagggcaagaccccccugggccugguggaccuguucguguucagcaccagcuucuaccugaucaccaucuuccugcaccuggugaagauccccacccacagacacaucgugggcaagcccugccccaagccccacagacugaaccacaugggcaucugcagcugcggccuguacaagcagcccggcgugcccgugagauggaagagaugaggacuaguaauaaggaaacuguaugaaugucugugggcaggaagugaagagauccuucuguaaagguuuuuggaauuaugucugcugaauaauaaacuuuuuugaaauaauaaaucugguagaaaaaugagaucucaaaggcucuuuucagagccaccaaaaaaaaaaaaaaaaaaaaaaaaaaaaaaaaaaaaaaaaaaaaaaaaaaaaaaaaaaaaaaaaagaauu

SEQ ID NO: 35820 - RNA, 1778 nt, Artificial Sequence; identical to SEQ ID NO: 35814
  mRNA product Design b-4 (hSL-A64-N5) comprising derived and/or modified sequence from LASV(Pinneo-NIG-1969;Clade I)__AIT17836__GPCmut9 (opt4)

SEQ ID NO: 35821 - RNA, 1778 nt, Artificial Sequence
  mRNA product Design b-4 (hSL-A64-N5) comprising derived and/or modified sequence from LASV(ISTH0009-NIG-2011;Clade II)__AIT17404__GPCmut9 (opt4)
aggagagucccgcagucggcguccagcggcucugcuuguucgugugugugucguugcaggccuuauucaagcuuaccaugggccagaucaucaccuucuuccaggaggugccccacgugaucgaggaggugaugaacaucgugcugaucgcccugagccugcuggccauccugaagggcaucuacaacguggccaccugcggccuguucggccuggugagcuuccugcugcugugcggcagaagcugcagcaccaccuacaagggcguguacgagcugcagacccuggagcuggacauggccagccugaacaugaccaugccccugagcugcaccaagaacaacagccaccacuacaucauggugggcaacgagaccggccuggagcugacccugaccaacaccagcaucaucaaccacaaguucugcaaccugagcgacgcccacaagaagaaccuguacgaccacgcccugaugagcaucaucagcaccuuccaccugagcauccccaacuucaaccaguacgaggccaugagcugcgacuucaacggcggcaagaucagcgugcaguacaaccugagccacgccuacgccguggacgccgccaaccacugcggcaccaucgccaacggcgugcugcagaccuucaugagaauggccuggggcggcagcuacaucgcccuggacagcggcugcggcagcugggacugcaucaugaccagcuaccaguaccugaucauccagaacaccaccugggaggaccacugccaguucagcagacccagccccaucggcuaccugggccugcugagccagagaaccagagacaucuacaucagcagaagacugcugggcaccuucaccuggacccugagcgacagcgagggcaacgagacccccggcggcuacugccugaccagauggaugcugaucgaggccgagcugaagugcuucggcaacaccgccguggccaagugcaacgagaagcacgacgaggaguucugcgacaugcugagacuguucgacuucaacaagcaggccaucagaagacugaagaccgaggcccagaugagcauccagcugaucaacaaggccgugaacgcccugaucaacgaccagcugaucaugaagaaccaccugagagacaucaugugcauccccuacugcaacuacagcaaguacugguaccugaaccacaccgugaccggcaagaccagccugcccagaugcuggcuggugagcaacggcagcuaccugaacgagacccacuucagcgacgacaucgagcagcaggccgacaacaugaucaccgagcugcugcagaaggaguacauggacagacagggcaagaccccccugggccugguggaccuguucguguucagcaccagcuucuaccugaucagcaucuuccugcaccugaucaagauccccacccacagacacaucaccggcaagcccugccccaagccccacagacugaaccacaugggcaucugcagcugcggccuguacaagcaccccggcgugcccgugaaguggaagagaugaggacuaguaauaaggaaacuguaugaaugucugugggcaggaagugaagagauccuucuguaaagguuuuuggaauuaugucugcugaauaauaaacuuuuuugaaauaauaaaucugguagaaaaaugagaucucaaaggcucuuuucagagccaccaaaaaaaaaaaaaaaaaaaaaaaaaaaaaaaaaaaaaaaaaaaaaaaaaaaaaaaaaaaaaaaaagaauu

SEQ ID NO: 35822 - RNA, 1778 nt, Artificial Sequence
  mRNA product Design b-4 (hSL-A64-N5) comprising derived and/or modified sequence from LASV(ISTH2010-NIG-2012;Clade II)__AIT17482__GPCmut9 (opt4)
aggagagucccgcagucggcguccagcggcucugcuuguucgugugugugucguugcaggccuuauucaagcuuaccaugggccagaucaucaccuucuuccaggaggugccccacgugaucgaggaggugaugaacaucgugcugaucgcccugagccugcuggccauccugaagggcaucuacaacguggccaccugcggccuguucggccuggugagcuuccugcugcugugcggcagaagcugcagcaccaccuacaagggcguguacgagcugcagacccuggagcuggacauggccagccugaacaugaccaugccccugagcugcaccaagaacaacagccaccacuacaucauggugggcaacgagaccggccuggagcugacccugaccaacaccagcaucaucaaccacaaguucugcaaccugagcgacgcccacaagaagaaccuguacgaccacgcccugaugagcaucaucagcaccuuccaccugagcauccccaacuucaaccaguacgaggccaugagcugcgacuucaacggcggcaagaucagcgugcaguacaaccugagccacgccuacgccguggacgccgccaaccacugcggcaccaucgccaacggcgugcugcagaccuucaugagaauggccuggggcggcagcuacaucgcccuggacagcggcugcggcagcugggacugcaucaugaccagcuaccaguaccugaucauccagaacaucaccugggaggaccacugccaguucagcagacccagccccaucggcuaccugggccugcugagccagagaaccagagacaucuacaucagcagaagacugcugggcaccuucaccuggacccugagcgacagcgagggcaacgagacccccggcggcuacugccugaccagauggaugcugaucgaggccgagcugaagugcuucggcaacaccgccguggccaagugcaacgagaagcacgacgaggaguucugcgacaugcugagacuguucgacuucaacaagcaggccaucagaagacugaagaccgaggcccagaugagcauccagcugaucaacaaggccgugaacgcccugaucaacgaccagcugaucaugaagaaccaccugagagacaucaugugcauccccuacugcaacuacagcaaguacugguaccugaaccacaccgugaccggcaagaccagccugcccagaugcuggcuggugagcaacggcagcuaccugaacgagacccacuucagcgacgacaucgagcagcaggccgacaacaugaucaccgagcugcugcagaaggaguacaucgacagacagggcaagaccccccugggccugguggaccuguucguguucagcaccagcuucuaccugaucagcaucuuccugcaccuggugaagauccccacccacagacacguggugggcaagcccugccccaagccccacagacugaaccacaugggcaucugcagcugcggccuguacaagcaccccggcgugcccgugaaguggaagagaugaggacuaguaauaaggaaacuguaugaaugucugugggcaggaagugaagagauccuucuguaaagguuuuuggaauuaugucugcugaauaauaaacuuuuuugaaauaauaaaucugguagaaaaaugagaucucaaaggcucuuuucagagccaccaaaaaaaaaaaaaaaaaaaaaaaaaaaaaaaaaaaaaaaaaaaaaaaaaaaaaaaaaaaaaaaaagaauu

SEQ ID NO: 35823 - RNA, 1778 nt, Artificial Sequence
  mRNA product Design b-4 (hSL-A64-N5) comprising derived and/or modified sequence from LASV(Lassa virus/H.sapiens-wt/NGA/2015/ISTH_0543;Clade II)__AVO03639__GPCmut9 (opt4)
aggagagucccgcagucggcguccagcggcucugcuuguucgugugugugucguugcaggccuuauucaagcuuaccaugggccagaucaucaccuucuuccaggaggugccccacgugaucgaggaggugaugaacaucgugcugaucgcccugagccugcuggccauccugaagggcaucuacaacguggccaccugcggccuguucggccuggugagcuuccugcugcugugcggcagaagcugcagcaccaccuacaagggcguguacgagcugcagacccuggagcuggacauggccaaccugaacaugaccaugccccugagcugcaccaagaacaacagccaccacuacaucauggugggcaacgagaccggccuggagcugacccugaccaacaccagcaucaucaaccacaaguucugcaaccugagcgacgcccacaagaagaaccuguacgaccacgcccugaugagcaucaucagcaccuuccaccugagcauccccaacuucaaccaguacgaggccaugagcugcgacuucaacggcggcaagaucagcgugcaguacaaccugagccacaccuacgccguggacgccgccaaccacugcggcaccaucgccaacggcgugcugcagaccuucaugagaauggccuggggcggcagcuacaucgcccuggacagcggcugcggcagcugggacugcaucaugaccagcuaccaguaccuggugauccagaacaccaccugggaggaccacugccaguucagcagacccagccccaucggcuaccugggccugcugagccagagaaccagagacaucuacaucagcagaagacugcugggcaccuucaccuggacccugagcgacagcgagggcaacgagacccccggcggcuacugccugaccagauggaugcugaucgaggccgagcugaagugcuucggcaacaccgccguggccaagugcaacgagaagcacgacgaggaguucugcgacaugcugagacuguucgacuucaacaagcaggccaucagaagacugaagaccgaggcccagaugagcauccagcugaucaacaaggccgugaacgcccugaucaacgaccagcugaucaugaagaaccaccugagagacaucaugugcauccccuacugcaacuacagcaaguacugguaccugaaccacaccgugaccggcaagaccagccugcccagaugcuggcuggugagcaacggcagcuaccugaacgagacccacuucagcgacgacaucgagcagcaggccgacaacaugaucaccgagcugcugcagaaggaguacaucgacagacagggcaagaccccccugggccugguggaccuguucguguucagcaccagcuucuaccugaucagcaucuuccugcaccuggugaagauccccacccacagacacaucaccggcaagcccugccccaagccccacagacugaaccacaugggcaucugcagcugcggccuguacaagcaccccggcgugcccgugaaguggaagagaugaggacuaguaauaaggaaacuguaugaaugucugugggcaggaagugaagagauccuucuguaaagguuuuuggaauuaugucugcugaauaauaaacuuuuuugaaauaauaaaucugguagaaaaaugagaucucaaaggcucuuuucagagccaccaaaaaaaaaaaaaaaaaaaaaaaaaaaaaaaaaaaaaaaaaaaaaaaaaaaaaaaaaaaaaaaaagaauu

SEQ ID NO: 35824 - RNA, 1778 nt, Artificial Sequence
  mRNA product Design b-4 (hSL-A64-N5) comprising derived and/or modified sequence from LASV(Lassa virus/H.sapiens-wt/NGA/2016/ISTH_0009;Clade II)__AVO03571__GPCmut9 (opt4)
aggagagucccgcagucggcguccagcggcucugcuuguucgugugugugucguugcaggccuuauucaagcuuaccaugggccagaucaucaccuucuuccaggaggugccccacgugaucgaggaggugaugaacaucgugcugaucgcccugagccugcuggccauccugaagggcaucuacaacguggccaccugcggccugcugggccuggugagcuuccugcugcugugcggcagaagcugcagcaccaccuacaagggcguguacgagcugcagacccuggagcuggacauggccagccugaacaugaccaugccccugagcugcaccaagaacaacagccaccacuacaucauggugggcaacgagaccggccuggagcugacccugaccaacaccagcaucaucaaccacaaguucugcaaccugagcgacgcccacaagaagaaccuguacgaccacgcccugaugagcaucaucagcaccuuccaccugagcauccccaacuucaaccaguacgaggccaugagcugcgacuucaacggcggcagaaucagcgugcaguacaaccugagccacagcuacgccguggacgccgccaaccacugcggcaccaucgccaacggcgugcugcagaccuucaugagaauggccuggggcggcagcuacaucgcccuggacagcggcugcggcagcugggacugcaucaugaccagcuaccaguaccugaucauccagaacaccaccugggaggaccacugccaguucagcagacccagccccaucggcuaccugggccugcugagccagagaaccagagacaucuacaucagcagaagacugcugggcaccuucaccuggacccugagcgacagcgagggcaacgagacccccggcggcuacugccugaccagauggaugcugaucgaggccgagcugaagugcuucggcaacaccgccguggccaagugcaacgagaagcacgacgaggaguucugcgacaugcugagacuguucgacuucaacaagcaggccaucagaagacugaagaccgaggcccagaugagcauccagcugaucaacaaggccgugaacgcccugaucaacgaccagcugaucaugaagaaccaccugagagacaucaugugcauccccuacugcaacuacagcaaguacugguaccugaaccacaccgugaccggcaagaccagccugcccagaugcuggcuggugagcaacggcagcuaccugaacgagacccacuucagcgacgacaucgagcagcaggccgacaacaugaucaccgagcugcugcagaaggaguacaucgacagacagggcaagaccccccugggccugguggaccuguucguguucagcaccagcuucuaccugaucagcaucuuccugcaccuggugaagauccccacccacagacacaucaccggcaagcccugccccaagccccacagacugaaccacaugggcaucugcagcugcggccuguacaaccaccccggcgugcccgugaaguggaagagaugaggacuaguaauaaggaaacuguaugaaugucugugggcaggaagugaagagauccuucuguaaagguuuuuggaauuaugucugcugaauaauaaacuuuuuugaaauaauaaaucugguagaaaaaugagaucucaaaggcucuuuucagagccaccaaaaaaaaaaaaaaaaaaaaaaaaaaaaaaaaaaaaaaaaaaaaaaaaaaaaaaaaaaaaaaaaagaauu

SEQ ID NO: 35825 - RNA, 1778 nt, Artificial Sequence
  mRNA product Design b-4 (hSL-A64-N5) comprising derived and/or modified sequence from LASV(Lassa virus/H.sapiens-wt/NGA/2016/ISTH_0017;Clade II)__AVO03567__GPCmut9 (opt4)
aggagagucccgcagucggcguccagcggcucugcuuguucgugugugugucguugcaggccuuauucaagcuuaccaugggccagaucaucaccuucuuccaggaggugccccacgugaucgaggaggugaugaacaucgugcugaucgcccugagccugcuggccauccugaagggcaucuacaacguggccaccugcggccuguucggccuggugagcuuccugcugcugugcggcagaagcugcagcaccaccuacaagggcguguacgagcugcagacccuggagcuggacauggccagccugaacaugaccaugccccugagcugcaccaagaacaacagccaccacuacaucauggugggcaacgagaccggccuggagcugacccugaccaacaccagcaucaucaaccacaaguucugcaaccugagcgacgcccacaagaagaaccuguacgaccacgcccugaugagcaucaucagcaccuuccaccugagcauccccaacuucaaccaguacgaggccaugagcugcgacuucaacggcggcaagaucagcgugcaguacaaccugagccacaccuacgccaucgacgccgccaaccacugcggcaccaucgccaacggcgugcugcagaccuucaugagaauggccuggggcggcagcuacaucgcccuggacagcggcugcggcagcugggacugcaucaugaccagcuaccaguaccugaucauccagaacaccaccugggaggaccacugccaguucagcagacccagccccaucggcuaccugggccugcugagccagagaaccagagacaucuacaucagcagaagacugcugggcaccuucaccuggacccugagcgacagcgagggcaacgagacccccggcggcuacugccugaccagauggaugcugaucgaggccgagcugaagugcuucggcaacaccgccguggccaagugcaacgagaagcacgacgaggaguucugcgacaugcugagacuguucgacuucaacaagcaggccaucagaagacugaagaccgaggcccagaugagcauccagcugaucaacaaggccgugaacgcccugaucaacgaccagcugaucaugaagaaccaccugagagacaucaugugcauccccuacugcaacuacagcaaguacugguaccugaaccacaccgugaccggcaagaccagccugcccagaugcuggcuggugagcaacggcagcuaccugaacgagacccacuucagcgacgacaucgagcagcaggccgacaacaugaucaccgagcugcugcagaaggaguacauggacagacagggcaagaccccccugggccugguggaccuguucguguucagcaccagcuucuaccugaucagcaucuuccugcaccuggugagaauccccacccacagacacgugaucggcaagcccugccccaagccccacagacugaaccacaugggcaucugcagcugcggccuguacaagcaccccggcgugcccgugaaguggaagagaugaggacuaguaauaaggaaacuguaugaaugucugugggcaggaagugaagagauccuucuguaaagguuuuuggaauuaugucugcugaauaauaaacuuuuuugaaauaauaaaucugguagaaaaaugagaucucaaaggcucuuuucagagccaccaaaaaaaaaaaaaaaaaaaaaaaaaaaaaaaaaaaaaaaaaaaaaaaaaaaaaaaaaaaaaaaaagaauu

SEQ ID NO: 35826 - RNA, 1778 nt, Artificial Sequence
  mRNA product Design b-4 (hSL-A64-N5) comprising derived and/or modified sequence from LASV(Lassa virus/H.sapiens-wt/NGA/2018/ISTH_0959;Clade II)__AVV65099__GPCmut9 (opt4)
aggagagucccgcagucggcguccagcggcucugcuuguucgugugugugucguugcaggccuuauucaagcuuaccaugggccagaucaucaccuucuuccaggaggugccccacgugaucgaggaggugaugaacaucgugcugaucgcccugagccugcuggccauccugaagggcaucuacaacguggugaccugcggccuguucggccuggugagcuuccugcugcugugcggcagaagcugcagcaccaccuacaagggcguguacgagcugcagacccuggagcuggacauggccagccugaacaugaccaugccccugagcugcaccaagaacaacagccaccacuacaucauggugggcaacgagaccggccuggagcugacccugaccaacaccagcaucaucaaccacaaguucugcaaccugagcgacgcccacaagaagaaccuguacgaccacgcccugaugagcaucaucagcaccuuccaccugagcauccccaacuucaaccaguacgaggccaugagcugcgacuucaacggcggcaagaucagcgugcaguacaaccugagccacgccuacgccaucgacgccgccaaccacugcggcaccaucgccaacggcgugcugcagaccuucaugagaauggccuggggcggcagcuacaucgcccuggacagcggcugcggcagcugggacugcaucaugaccagcuaccaguaccugaucauccagaacaccaccugggaggaccacugccaguucagcagacccagccccaucggcuaccugggccugcugagccagagaaccagagacaucuacaucagcagaagacugcugggcaccuucaccuggacccugagcgacagcgagggcaacgagacccccggcggcuacugccugaccagauggaugcugaucgaggccgagcugaagugcuucggcaacaccgccguggccaagugcaacgagaagcacgacgaggaguucugcgacaugcugagacuguucgacuucaacaagcaggccaucagaagacugaagaccgaggcccagaugagcauccagcugaucaacaaggccgugaacgcccugaucaacgaccagcugaucaugaagaaccaccugagagacaucaugugcauccccuacugcaacuacagcaaguacugguaccugaaccacaccgugaccggcaagaccagccugcccagaugcuggcuggugagcaacggcagcuaccugaacgagacccacuucagcgacgacaucgagcagcaggccgacaacaugaucaccgagcugcugcagaaggaguacaucgacagacagggcaagaccccccugggccugguggaccuguucguguucagcaccagcuucuaccugaucagcaucuuccugcaccuggugaagauccccacccacagacacgugaucggcaagcccugccccaagccccacagacugaaccacaugggcaucugcagcugcggccuguacaagcaccccggcgugcccgugaaguggaagagaugaggacuaguaauaaggaaacuguaugaaugucugugggcaggaagugaagagauccuucuguaaagguuuuuggaauuaugucugcugaauaauaaacuuuuuugaaauaauaaaucugguagaaaaaugagaucucaaaggcucuuuucagagccaccaaaaaaaaaaaaaaaaaaaaaaaaaaaaaaaaaaaaaaaaaaaaaaaaaaaaaaaaaaaaaaaaagaauu

SEQ ID NO: 35827 - RNA, 1778 nt, Artificial Sequence
  mRNA product Design b-4 (hSL-A64-N5) comprising derived and/or modified sequence from LASV(LASV003-NIG-2008;Clade II)__AIT17580__GPCmut9 (opt4)
aggagagucccgcagucggcguccagcggcucugcuuguucgugugugugucguugcaggccuuauucaagcuuaccaugggccagaucaucaccuucuuccaggaggugccccacgugaucgaggaggugaugaacaucgugcugaucgcccugagccugcuggccauccugaagggcaucuacaacguggccaccugcggccuguucggccuggugagcuuccugcugcugugcggcagaagcugcagcaccaccuacaagggcguguacgagcugcagacccuggagcuggacauggccagccugaacaugaccaugccccugagcugcaccaagaacaacagccaccacuacaucauggugggcaacgagaccggccuggagcugacccugaccaacaccagcaucaucaaccacaaguucugcaaccugagcgacgcccacaagaagaaccuguacgaccacgcccugaugagcaucaucagcaccuuccaccugagcauccccaacuucaaccaguacgaggccaugagcugcgacuucaacggcggcaagaucagcgugcaguacaaccugagccacaccuacgccguggacgccgccaaccacugcggcaccaucgccaacggcgugcugcagaccuucaugagaauggccuggggcggcagcuacaucgcccuggacagcggcugcggcagcugggacugcaucaugaccagcuaccaguaccugaucauccagaacaccaccugggaggaccacugccaguucagcagacccagccccaucggcuaccugggccugcugagccagagaaccagagacaucuacaucagcagaagacugcugggcaccuucaccuggacccugagcgacagcgagagcaacgagacccccggcggcuacugccugaccagauggaugcugaucgaggccgagcugaagugcuucggcaacaccgccguggccaagugcaacgagaagcacgacgaggaguucugcgacaugcugagacuguucgacuucaacaagcaggccaucagaagacugaaggccgaggcccagaugagcauccagcugaucaacaaggccgugaacgcccugaucaacgaccagcugaucaugaagaaccaccugagagacaucaugugcauccccuacugcaacuacagcaaguacugguaccugaaccacaccgugaccggcagaaccagccugcccagaugcuggcuggugagcaacggcagcuaccugaacgagacccacuucagcgacgacaucgagcagcaggccgacaacaugaucaccgagcugcugcagaaggaguacauggacagacagggcaagaccccccugggccugguggaccuguucguguucagcaccagcuucuaccugaucagcaucuuccugcaccuggugaagauccccacccacagacacgugaucggcaagcccugccccaagccccacagacugaaccacaugggcaucugcagcugcggccuguacaagcaccccggcgugcccgugaaguggaagagaugaggacuaguaauaaggaaacuguaugaaugucugugggcaggaagugaagagauccuucuguaaagguuuuuggaauuaugucugcugaauaauaaacuuuuuugaaauaauaaaucugguagaaaaaugagaucucaaaggcucuuuucagagccaccaaaaaaaaaaaaaaaaaaaaaaaaaaaaaaaaaaaaaaaaaaaaaaaaaaaaaaaaaaaaaaaaagaauu

SEQ ID NO: 35828 - RNA, 1778 nt, Artificial Sequence
  mRNA product Design b-4 (hSL-A64-N5) comprising derived and/or modified sequence from LASV(LASV035-NIG-2009;Clade II)__AIT17588__GPCmut9 (opt4)
aggagagucccgcagucggcguccagcggcucugcuuguucgugugugugucguugcaggccuuauucaagcuuaccaugggccagaucaucaccuucuuccaggaggugccccacgugaucgaggaggugaugaacaucgugcugaucgcccugagccugcuggccauccugaagggcaucuacaacguggccaccugcggccuguucggccuggugagcuuccugcugcugugcggcagaagcugcagcaccaccuacaagggcguguacgagcugcagacccuggagcuggacauggccagccugaacaugaccaugccccugagcugcaccaagaacaacagccaccacuacaucauggugggcaacgagaccggccuggagcugacccugaccaacaccagcaucaucaaccacaaguucugcaaccugagcgacgcccacaagaagaaccuguacgaccacgcccugaugagcaucaucagcaccuuccaccugagcauccccaacuucaaccaguacgaggccaugagcugcgacuucaacggcggcaagaucagcgugcaguacaaccugagccacgccuacgccguggacgccgccaaccacugcggcaccaucgccaacggcgugcugcagaccuucaugagaauggccuggggcggcagcuacaucgcccuggacagcggcugcggcagcugggacugcaucaugaccagcuaccaguaccugaucauccagaacaccaccugggaggaccacugccaguucagcagacccagccccaucggcuaccugggccugcugagccagagaaccagagacaucuacaucagcagaagacugcugggcaccuucaccuggacccugagcgacagcgagggcaacgagacccccggcggcuacugccugaccagauggaugcugaucgaggccgagcugaagugcuucggcaacaccgccguggccaagugcaacgagaagcacgacgaggaguucugcgacaugcugagacuguucgacuucaacaagcaggccaucagaagacugaaggccgaggcccagaugagcauccagcugaucaacaaggccgugaacgcccugaucaacgaccagcugaucaugaagaaccaccugagagacaucaugugcauccccuacugcaacuacagcaaguacugguaccugaaccacaccgugaccggcaagaccagccugcccagaugcuggcuggugagcaacggcagcuaccugaacgagacccacuucagcgacgacaucgagcagcaggccgacaacaugaucaccgagcugcugcagaaggaguacaucgacagacagggcaagaccccccugggccugguggaccuguucguguucagcaccagcuucuaccugaucagcaucuuccugcaccuggugaagauccccacccacagacacgugaucggcaagcccugccccaagccccacagacugaaccacaugggcaucugcagcugcggccuguacaagcaccccggcgugcccgugaaguggaagagaugaggacuaguaauaaggaaacuguaugaaugucugugggcaggaagugaagagauccuucuguaaagguuuuuggaauuaugucugcugaauaauaaacuuuuuugaaauaauaaaucugguagaaaaaugagaucucaaaggcucuuuucagagccaccaaaaaaaaaaaaaaaaaaaaaaaaaaaaaaaaaaaaaaaaaaaaaaaaaaaaaaaaaaaaaaaaagaauu

SEQ ID NO: 35829 - RNA, 1778 nt, Artificial Sequence
  mRNA product Design b-4 (hSL-A64-N5) comprising derived and/or modified sequence from LASV(LASV1000-NIG-2009;Clade II)__AIT17782__GPCmut9 (opt4)
aggagagucccgcagucggcguccagcggcucugcuuguucgugugugugucguugcaggccuuauucaagcuuaccaugggccagaucaucaccuucuuccaggaggugccccacgugaucgaggaggugaugaacaucgugcugaucgcccugagccugcuggccauccugaagggcaucuacaacguggccaccugcggccuguucggccuggugagcuuccugcugcugugcggcagaagcugcagcaccaccuacaagggcguguacgagcugcagacccuggagcuggacauggccagccugaacaugaccaugccccugagcugcaccaagaacaacagccaccacuacaucauggugggcaacgagaccggccuggagcugacccugaccaacaccagcaucaucaaccacaaguucugcaaccugagcgacgcccacaagaagaaccuguacgaccacgcccugaugagcaucaucagcaccuuccaccugagcauccccaacuucaaccaguacgaggccaugagcugcgacuucaacggcggcaagaucagcgugcaguacaaccugagccacaccuacgccguggacgccgccaaccacugcggcaccaucgccaacggcgugcugcagaccuucaugagaauggccuggggcggcagcuacaucgcccuggacagcggcugcggcagcugggacugcaucaugaccagcuaccaguaccugaucauccagaacaccaccugggaggaccacugccaguucagcagacccagccccaucggcuaccugggccugcugagccagagaaccagagacaucuacaucagcagaagacugcugggcaccuucaccuggacccugagcgacagcgagggcaacgagacccccggcggcuacugccugaccagauggaugcugaucgaggccgagcugaagugcuucggcaacaccgccguggccaagugcaacgagaagcacgacgaggaguucugcgacaugcugagacuguucgacuucaacaagcaggccaucaagagacugaagaccgaggcccagaugagcauccagcugaucaacaaggccgugaacgcccugaucaacgaccagcugaucaugaagaaccaccugagagacaucaugugcauccccuacugcaacuacagcaaguacugguaccugaaccacaccgugaccggcaagaccagccugcccagaugcuggcuggugagcaacggcagcuaccugaacgagacccacuucagcgacgacaucgagcagcaggccgacaacaugaucaccgagcugcugcagaaggaguacaucgacagacagggcaagaccccccugggccugguggaccuguucguguucagcaccagcuucuaccugaucagcaucuuccugcaccuggugaagauccccacccacagacacguggugggcaagcccugccccaagccccacagacugaaccacaugggcaucugcagcugcggccuguacaagcaccccggcgugcccgugaaguggaagagaugaggacuaguaauaaggaaacuguaugaaugucugugggcaggaagugaagagauccuucuguaaagguuuuuggaauuaugucugcugaauaauaaacuuuuuugaaauaauaaaucugguagaaaaaugagaucucaaaggcucuuuucagagccaccaaaaaaaaaaaaaaaaaaaaaaaaaaaaaaaaaaaaaaaaaaaaaaaaaaaaaaaaaaaaaaaaagaauu

SEQ ID NO: 35830 - RNA, 1778 nt, Artificial Sequence
  mRNA product Design b-4 (hSL-A64-N5) comprising derived and/or modified sequence from LASV(LASV221-NIG-2010;Clade II)__AIT17624__GPCmut9 (opt4)
aggagagucccgcagucggcguccagcggcucugcuuguucgugugugugucguugcaggccuuauucaagcuuaccaugggccagaucaucaccuucuuccaggaggugccccacgugaucgaggaggugaugaacaucgugcugaucgcccugagccugcuggccauccugaagggcaucuacaacguggccaccugcggccuguucggccuggugagcuuccugcugcugugcggcagaagcugcagcaccaccuacaagggcguguacgagcugcagacccuggagcuggacauggccagccugaacaugaccaugccccugagcugcaccaagaacaacagccaccacuacaucauggugggcaacgagaccggccuggagcugacccugaccaacaccagcaucaucaaccacaaguucugcaaccugagcgacgcccacaagaagaaccuguacgaccacgcccugaugagcaucaucagcaccuuccaccugagcauccccaacuucaaccaguacgaggccaugagcugcgacuucaacggcggcaagaucagcgugcaguacaaccugagccacaccuacgccaucgacgccgccaaccacugcggcaccaucgccaacggcgugcugcagaccuucaugagaauggccuggggcggcagcuacaucgcccuggacagcggcugcggcagcugggacugcaucaugaccagcuaccaguaccugaucauccagaacaccaccugggaggaccacugccaguucagcagacccagccccaucggcuaccugggccugcugagccagagaaccagagacaucuacaucagcagaagacugcugggcaccuucaccuggacccugagcgacagcgagggcaacgagacccccggcggcuacugccugaccagauggaugcugaucgaggccgagcugaagugcuucggcaacaccgccguggccaagugcaacgagaagcacgacgaggaguucugcgacaugcugagacuguucgacuucaacaagcaggccaucagaagacugaagaccgaggcccagaugagcauccagcugaucaacaaggccgugaacgcccugaucaacgaccagcugaucaugaagaaccaccugagagacaucaugugcauccccuacugcaacuacagcaaguacugguaccugaaccacaccgugaccggcaagaccagccugcccagaugcuggcuggugagcaacggcagcuaccugaacgagacccacuucagcgacgacaucgagcagcaggccgacaacaugaucaccgagaugcugcagaaggaguacauggacagacagggcaagaccccccugggccugguggaccuguucguguucagcaccagcuucuaccugaucagcaucuuccugcaccuggugaagauccccacccacagacacgugaucggcaagcccugccccaagccccacagacugaaccacaugggcaucugcagcugcggccuguacaagcaccccggcgugcccgugaaguggaagagaugaggacuaguaauaaggaaacuguaugaaugucugugggcaggaagugaagagauccuucuguaaagguuuuuggaauuaugucugcugaauaauaaacuuuuuugaaauaauaaaucugguagaaaaaugagaucucaaaggcucuuuucagagccaccaaaaaaaaaaaaaaaaaaaaaaaaaaaaaaaaaaaaaaaaaaaaaaaaaaaaaaaaaaaaaaaaagaauu

SEQ ID NO: 35831 - RNA, 1778 nt, Artificial Sequence
  mRNA product Design b-4 (hSL-A64-N5) comprising derived and/or modified sequence from LASV(LASV237-NIG-2010;Clade II)__AIT17638__GPCmut9 (opt4)
aggagagucccgcagucggcguccagcggcucugcuuguucgugugugugucguugcaggccuuauucaagcuuaccaugggccagaucaucaccuucuuccaggaggugccccacgugaucgaggaggugaugaacaucgugcugaucgcccugagccugcuggccauccugaagggcaucuacaacguggccaccugcggccuguucggccuggugagcuuccugcugcugugcggcagaagcugcagcaccaccuacaagggcguguacgagcugcagacccuggagcuggacauggccagccugaacaugaccaugccccugagcugcaccaagaacaacagccaccacuacaucauggugggcaacgagaccggccuggagcugacccugaccaacaccagcaucaucaaccacaaguucugcaaccugagcgacgcccacaagaaggaccuguacgaccacgcccugaugagcaucaucagcaccuuccaccugagcauccccaacuucaaccaguacgaggccaugagcugcgacuucaacggcggcaagaucagcgugcaguacaaccugagccacaccuacgccguggacgccgccaaccacugcggcaccaucgccaacggcgugcugcagaccuucaugagaauggccuggggcggcagcuacaucgcccuggacagcggcugcggcagcugggacugcaucaugaccagcuaccaguaccugaucauccagaacaccaccugggaggaccacugccaguucagcagacccagccccaucggcuaccugggccugcugagccagagaaccagagacaucuacaucagcagaagacugcugggcaccuucaccuggacccugagcgacagcgagggcaacgagacccccggcggcuacugccugaccagauggaugcugaucgaggccgagcugaagugcuucggcaacaccgccguggccaagugcaacgagaagcacgacgaggaguucugcgacaugcugagacuguucgacuucaacaagcaggccaucagaagacugaagaccgaggcccagaugagcauccagcugaucaacaaggccgugaacgcccugaucaacgaccagcugaucaugaagaaccaccugagagacaucaugugcauccccuacugcaacuacagcaaguacugguaccugaaccacaccgugaccggcaagaccagccugcccagaugcuggcuggugagcaacggcagcuaccugaacgagacccacuucagcgacgacaucgagcagcaggccgacaacaugaucaccgagcugcugcagaaggaguacauggacagacagggcaagaccccccugggccugguggaccuguucguguucagcaccagcuucuaccugaucagcaucuuccugcaccugaucaagauccccacccacagacacaucaccggcaagcccugccccaagccccacagacugaaccacaugggcaucugcagcugcggccuguacaagcaccccggcgugcccgugaaguggaagagaugaggacuaguaauaaggaaacuguaugaaugucugugggcaggaagugaagagauccuucuguaaagguuuuuggaauuaugucugcugaauaauaaacuuuuuugaaauaauaaaucugguagaaaaaugagaucucaaaggcucuuuucagagccaccaaaaaaaaaaaaaaaaaaaaaaaaaaaaaaaaaaaaaaaaaaaaaaaaaaaaaaaaaaaaaaaaagaauu

SEQ ID NO: 35832 - RNA, 1778 nt, Artificial Sequence
  mRNA product Design b-4 (hSL-A64-N5) comprising derived and/or modified sequence from LASV(LASV253-NIG-2011;Clade II)__AIT17670__GPCmut9 (opt4)
aggagagucccgcagucggcguccagcggcucugcuuguucgugugugugucguugcaggccuuauucaagcuuaccaugggccagaucaucaccuucuuccaggaggugccccacgugaucgaggaggugaugaacaucgugcugaucgcccugagccugcuggccauccugaagggcaucuacaacguggccaccugcggccuguucggccuggugagcuuccugcugcugugcggcagaagcugcagcaccaccuacaagggcguguacgagcugcagacccuggagcuggacauggccagccugaacaugaccaugccccugagcugcaccaagaacaacagccaccacuacaucauggugggcaacgagaccggccuggagcugacccugaccaacaccagcaucaucaaccacaaguucugcaaccugagcgacgcccacaagaagaaccuguacgaccacgcccugaugagcaucaucagcaccuuccaccugagcauccccaacuucaaccaguacgaggccaugagcugcgacuucaacggcggcaagaucagcgugcaguacaaccugagccacaccuacgccguggacgccgccaaccacugcggcaccaucgccaacggcgugcugcagaccuucaugagaauggccuggggcggcagcuacaucgcccuggacagcggcugcggcagcugggacugcaucaugaccagcuaccaguaccugaucauccagaacaccaccugggaggaccacugccaguucagcagacccagccccaucggcuaccugggccugcugagccagagaaccagagacaucuacaucagcagaagacugcugggcaccuucaccuggacccugagcgacagcgagggcaacgagacccccggcggcuacugccugaccagauggaugcugaucgaggccgagcugaagugcuucggcaacaccgccguggccaagugcaacgagaagcacgacgaggaguucugcgacaugcugagacuguucgacuucaacaagcaggccaucagaagacugaaggccgaggcccagaugagcauccagcugaucaacaaggccgugaacgcccugaucaacgaccagcugaucaugaagaaccaccugagagacaucaugugcauccccuacugcaacuacagcaaguacugguaccugaaccacaccgugaccggcagaaccagccugcccagaugcuggcuggugagcaacggcagcuaccugaacgagacccacuucagcgacgacaucgagcagcaggccgacaacaugaucaccgagcugcugcagaaggaguacaucgacagacagggcaagaccccccugggccugguggaccuguucguguucagcaccagcuucuaccugaucagcaucuuccugcaccuggugaagauccccacccacagacacaucaucggcaagcccugccccaagccccacagacugaaccacaugggcaucugcagcugcggccuguacaagcaccccggcgugcccgugaaguggaagagaugaggacuaguaauaaggaaacuguaugaaugucugugggcaggaagugaagagauccuucuguaaagguuuuuggaauuaugucugcugaauaauaaacuuuuuugaaauaauaaaucugguagaaaaaugagaucucaaaggcucuuuucagagccaccaaaaaaaaaaaaaaaaaaaaaaaaaaaaaaaaaaaaaaaaaaaaaaaaaaaaaaaaaaaaaaaaagaauu

SEQ ID NO: 35833 - RNA, 1778 nt, Artificial Sequence
  mRNA product Design b-4 (hSL-A64-N5) comprising derived and/or modified sequence from LASV(LASV254-NIG-2011;Clade II)__AIT17674__GPCmut9 (opt4)
aggagagucccgcagucggcguccagcggcucugcuuguucgugugugugucguugcaggccuuauucaagcuuaccaugggccagaucaucaccuucuuccaggaggugccccacgugaucgaggaggugaugaacaucgugcugaucgcccugagccugcuggccauccugaagggcaucuacaacguggccaccugcggccuguucggccuggugagcuuccugcugcugugcggcagaagcugcagcaccaccuacaagggcguguacgagcugcagacccuggagcuggacaugaccaaccugaacaugaccaugccccugagcugcaccaagaacaacagccaccacuacaucauggugggcaacgagaccggccuggagcugacccugaccaacaccagcaucaucaaccacaaguucugcaaccugagcgacgcccacaagaagaaccuguacaaccacgcccugaugagcaucaucagcaccuuccaccugagcauccccaacuucaaccaguacgaggccaugagcugcgacuucaacggcggcaagaucagcgugcaguacaaccugagccacagcuacgccguggacgccgccaaccacugcggcaccaucgccaacggcgugcugcagaccuucaugagaauggccuggggcggcagcuacaucgcccuggacagcggcugcggcaacugggacugcaucaugaccagcuaccaguaccugaucauccagaacaccaccugggaggaccacugccaguucagcagacccagccccaucggcuaccugggccugcugagccagagaaccagagacaucuacaucagcagaagacugcugggcaccuucaccuggacccugagcgacagcgagggcaacgagacccccggcggcuacugccugaccagauggaugcugaucgaggccgagcugaagugcuucggcaacaccgccguggccaagugcaacgagaagcacgacgaggaguucugcgacaugcugagacuguucgacuucaacaagcaggccaucagaagacugaagaccgaggcccaggccaacauccagcugaucaacaaggccgugaacgcccugaucaacgaccagcugaucaugaagaaccaccugagagacaucaugugcauccccuacugcaacuacagcaaguacugguaccugaaccacaccgugaccggcaagaccagccugcccagaugcuggcuggugagcaacggcagcuaccugaacgagacccacuucagcgacgacaucgagcagcaggccgacaacaugaucaccgagcugcugcagaaggaguacauggacagacagggcaagaccccccugggccugguggaccuguucguguucagcaccagcuucuaccugaucagcaucuuccugcaccuggugaagauccccacccacagacacgugaucggcaagcccugccccaagccccacagacugaaccacaugggcaucugcagcugcggccuguacaagcaccccggcgugcccgugaaguggaagagaugaggacuaguaauaaggaaacuguaugaaugucugugggcaggaagugaagagauccuucuguaaagguuuuuggaauuaugucugcugaauaauaaacuuuuuugaaauaauaaaucugguagaaaaaugagaucucaaaggcucuuuucagagccaccaaaaaaaaaaaaaaaaaaaaaaaaaaaaaaaaaaaaaaaaaaaaaaaaaaaaaaaaaaaaaaaaagaauu

SEQ ID NO: 35834 - RNA, 1778 nt, Artificial Sequence
  mRNA product Design b-4 (hSL-A64-N5) comprising derived and/or modified sequence from LASV(Nig08-A19;Clade III)__ADU56618__GPCmut9 (opt4)
aggagagucccgcagucggcguccagcggcucugcuuguucgugugugugucguugcaggccuuauucaagcuuaccaugggccagaucgugaccuucuuccaggaggugccccacgugaucgaggaggugaugaacaucgugcugaucgcccugagcauccuggccauccugaagggccuguacaacaucgccaccugcggccugaucggccuggugaccuuccugcugcugagcggcagaagcugcagcaugaccuacaagggcguguacgagcugcagacccuggagcugaacaugaacacccugaacaugaccaugccccugagcugcaccaagaacaacagccaccacuacaucauggugggcaacgagaccggccuggagcugacccugaccaacaccagccugcugcaccacaaguucugcaaccugagcgacgcccacaagaagaaccuguacgaccacacccugaugagcaucaucagcaccuuccaccugagcauccccaacuucaaccaguacgaggccaugagcugcgacuucaacggcggcaagaucaccgugcaguacaaccugagccacagcuacgccaucgacgccgccaaccacugcggcaccguggccaacggcgugcugcagaccuucaugagaauggccuggggcggcagcuacaucgcccuggacagcggcugcggcaagugggacugcaucaugaccagcuaccaguaccugaucauccagaacaccaccugggaggaccacugccaguucagcagacccagccccaucggcuaccugggccugcugagccagagaaccagagacaucuacaucagcagaagacugcugggcaccuucaccuggacccugagcgacagcgagggcaacgagacccccggcggcuacugccugaccagauggaugcugaucgaggccgagcugaagugcuucggcaacaccgccguggccaagugcaacgagaagcacgacgaggaguucugcgacaugcugagacuguucgacuucaacaagcaggccaucagaagacugaaggccgaggcccagaugagcauccagcugaucaacaaggccgugaacgcccugaucaacgaccagcugaucaugaagaaccaccugagagacaucaugugcauccccuacugcaacuacagcaaguacugguaccugaaccacaccagcaccggcagaaccagccugcccagaugcuggcuggugagcaacggcagcuaccugaacgagacccacuucagcgacgacaucgagcagcaggccgacaacaugaucaccgagaugcugcagaaggaguaccuggacagacagggcaagaccccccugggccugguggaccuguucguguucagcaccagcuucuaccugaucagcaucuuccugcaccuggugaagauccccacccacagacacaucgugggcaagcccugccccaagccccacagacugaaccacaugggcaucugcagcugcggccuguacaagcagcccggcgugcccgugagauggaagagaugaggacuaguaauaaggaaacuguaugaaugucugugggcaggaagugaagagauccuucuguaaagguuuuuggaauuaugucugcugaauaauaaacuuuuuugaaauaauaaaucugguagaaaaaugagaucucaaaggcucuuuucagagccaccaaaaaaaaaaaaaaaaaaaaaaaaaaaaaaaaaaaaaaaaaaaaaaaaaaaaaaaaaaaaaaaaagaauu

SEQ ID NO: 35835 - RNA, 1781 nt, Artificial Sequence
  mRNA product Design b-4 (hSL-A64-N5) comprising derived and/or modified sequence from LASV(G1180-SLE-2010;Clade IV)__AIT17168__GPCmut9 (opt4)
aggagagucccgcagucggcguccagcggcucugcuuguucgugugugugucguugcaggccuuauucaagcuuaccaugggccagaucgugaccuucuuccaggaggugccccacgugaucgaggaggugaugaacaucgugcugaucgcccugagcauccuggccgugcugaagggccuguacaacuucgccaccugcggccuggugggccugcugaccuuccugcugcugugcggcagaagcugcaccgccagcagauacaagggcguguacgagcugcagacccuggagcugaacauggagacccugaacaugaccaugccccugagcugcaccaagaacaacagccaccacuacaucauggugggcaacgagaccggccuggagcugacccugaccaacaccagcaucaucaaccacaaguucugcaaccugagcgacgcccacaagaagaaccuguacgaccacgcccugaugagcaucaucagcaccuuccaccugagcauccccaacuucaaccaguacgaggccaugagcugcgacuucaacggcggcaagaucagcgugcaguacaaccugagccacagcuacgccggcgacgccgccaaccacugcggcaccguggccaacggcgugcugcagaccuucaugagaauggccuggggcggcagcuacaucgcccuggacagcggcugcggcagcugggacugcaucaugaccagcuaccaguaccugaucauccagaacaccaccugggaggaccacugccaguucagcagacccagccccaucggcuaccugggccugcugagccagagaaccagagacaucuacaucagcagaagacugcugggcaccuucaccuggacccugagcgacagcgagggcaaggacacccccggcggcuacugccugaccagauggaugcugaucgaggccgagcugaagugcuucggcaacaccgccguggccaagugcaacgagaagcacgacgaggaguucugcgacaugcugagacuguucgacuucaacaagcaggccauccagagacugaaggccgaggcccagaugagcauccagcugaucaacaaggccgugaacgcccugaucaacgaccagcugaucaugaagaaccaccugagagacaucaugugcauccccuacugcaacuacagcaaguacugguaccugaaccacaccaccaccggcaagaccagccugcccaagugcuggcuggugagcaacggcagcuaccugaacgagacccacuucagcgacgacaucgagcagcaggccgacaacaugaucaccgagaugcugcagaaggaguacauggagagacagggcaagaccccccugggccugguggaccuguucguguucagcaccagcuucuaccugaucagcaucuuccugcaccuggugaagauccccacccacagacacaucgugggcaagagcugccccaagccccacagacugaaccacaugggcaucugcagcugcggccuguacaagcagcccggcgugcccgugaaguggaagagaugaggacuaguaauaaggaaacuguaugaaugucugugggcaggaagugaagagauccuucuguaaagguuuuuggaauuaugucugcugaauaauaaacuuuuuugaaauaauaaaucugguagaaaaaugagaucucaaaggcucuuuucagagccaccaaaaaaaaaaaaaaaaaaaaaaaaaaaaaaaaaaaaaaaaaaaaaaaaaaaaaaaaaaaaaaaaagaauu

SEQ ID NO: 35836 - RNA, 1781 nt, Artificial Sequence
  mRNA product Design b-4 (hSL-A64-N5) comprising derived and/or modified sequence from LASV(G1442-SLE-2011;Clade IV)__AIT17180__GPCmut9 (opt4)
aggagagucccgcagucggcguccagcggcucugcuuguucgugugugugucguugcaggccuuauucaagcuuaccaugggccagaucgugaccuucuuccaggaggugccccacgugaucgaggaggugaugaacaucgugcugaucgcccugagcauccuggccgugcugaagggccuguacaacguggccaccugcggccugaucggccuggugaccuuccugcugcugugcggcagaagcugcaccaccacccuguacaagggcguguacgagcugcagacccuggagcugaacauggagacccugaacaugaccaugccccugagcugcaccaagaacaacagccaccacuacaucagagugggcaacgagaccggccuggagcugacccugaccaacaccagcaucaucaaccacaaguucugcaaccugagcgacgcccacaagaagaaccuguacgaccacgcccugaugagcaucaucagcaccuuccaccugagcauccccaacuucaaccaguacgaggccaugagcugcgacuucaacggcggcaagaucagcgugcaguacaaccugagccacagcuacgccggcgacgccgccaaccacugcggcaccguggccaacggcgugcugcagaccuucaugagaauggccuggggcggcagcuacaucgcccuggacagcggcugcggcaacugggacugcaucaugaccagcuaccaguaccugaucauccagaacaccaccugggacgaccacugccaguucagcagacccagccccaucggcuaccugggccugcugagccagagaaccagagacguguacaucagcagaagacugcugggcaccuucaccuggacccugagcgacagcgagggcaaggacacccccggcggcuacugccugaccagauggaugcugaucgaggccgagcugaagugcuucggcaacaccgccguggccaagugcaacgagaagcacgacgaggaguucugcgacaugcugagacuguucgacuucaacaagcaggccauccagagacugaaggccgaggcccagaugagcauccagcugaucaacaaggccgugaacgcccugaucaacgaccagcugaucaugaagaaccaccugagagacaucaugugcauccccuacugcaacuacagcaaguacugguaccugaacaacaccgccaccggcaagaccagccugcccaagugcuggcugaucagcaacggcagcuaccugaacgagacccacuucagcgacgacaucgagcaggaggccgacaacaugaucaccgagaugcugcagaaggaguacauggagagacagggcaagaccccccugggccugguggaccuguucguguucagcaccagcuucuaccugaucagcaucuuccugcaccuggugaagauccccacccacagacacaucgugggcaagagcugccccaagccccacagacugaaccacaugggcaucugcagcugcggccuguacaagcagcccggcgugcccgugagauggaagagaugaggacuaguaauaaggaaacuguaugaaugucugugggcaggaagugaagagauccuucuguaaagguuuuuggaauuaugucugcugaauaauaaacuuuuuugaaauaauaaaucugguagaaaaaugagaucucaaaggcucuuuucagagccaccaaaaaaaaaaaaaaaaaaaaaaaaaaaaaaaaaaaaaaaaaaaaaaaaaaaaaaaaaaaaaaaaagaauu

SEQ ID NO: 35837 - RNA, 1781 nt, Artificial Sequence
  mRNA product Design b-4 (hSL-A64-N5) comprising derived and/or modified sequence from LASV(G3010-SLE-2013;Clade IV)__AIT17344__GPCmut9 (opt4)
aggagagucccgcagucggcguccagcggcucugcuuguucgugugugugucguugcaggccuuauucaagcuuaccaugggccagaucgugaccuucuuccaggaggugccccacgugaucgaggaggugaugaacaucgugcugaucgcccugagcauccuggccgugcugaagggccuguacaacuucgccaccugcggccuggugggccuggugaccuuccugcugcugugcggcagaagcugcaccaccagccuguacaagggcguguacgagcugcagacccuggagcugaacauggagacccugaacaugaccaugccccugagcugcaccaagaacaacagccaccacuacaucauggugggcaacgagaccggccuggagcugacccugaccaacaccagcaucaucaaccacaaguucugcaaccugagcgacgcccacaagaagaaccuguacaaccacgcccugaugagcaucaucagcaccuuccaccugagcauccccaacuucaaccaguacgaggccaugagcugcgacuucaacggcggcaagaucagcgugcaguacaaccugagccacagcuacgccggcgacgccgccagccacugcggcaccguggccaacggcgugcugcagaccuucaugagaauggccuggggcggcagcuacaucgcccuggacagcggcugcggcaagugggacugcaucaugaccagcuaccaguaccugaucauccagaacaccaccugggaggaccacugccaguucagcagacccagccccaucggcuaccugggccugcugagccagagaaccagagacaucuacaucagcagaagacugcugggcaccuucaccuggacccugagcgacagcgagggcaaggacacccccggcggcuacugccugaccagauggaugcugaucgaggccgagcugaagugcuucggcaacaccgccguggccaagugcaacgagaagcacgacgaggaguucugcgacaugcugagacuguucgacuucaacaagcaggccauccagagacugaagaccgaggcccagaugagcauccagcugaucaacaaggccgugaacgcccugaucaacgaccagcugaucaugaagaaccaccugagagacaucaugugcauccccuacugcaacuacagcaaguacugguaccugaaccacaccaccaccggcaagaccagccugcccaagugcuggcuggugagcaacggcagcuaccugaacgagacccacuucagcgacgacaucgagcagcaggccgacaacaugaucaccgagaugcugcagaaggaguacauggagagacagggcaagaccccccugggccugguggaccuguucguguucagcaccagcuucuaccugaucagcaucuuccugcaccuggugaagauccccacccacagacacaucgugggcaagagcugccccaagccccacagacugaaccacaugggcaucugcagcugcggccuguacaagcagcccggcgugcccgugagauggaagagaugaggacuaguaauaaggaaacuguaugaaugucugugggcaggaagugaagagauccuucuguaaagguuuuuggaauuaugucugcugaauaauaaacuuuuuugaaauaauaaaucugguagaaaaaugagaucucaaaggcucuuuucagagccaccaaaaaaaaaaaaaaaaaaaaaaaaaaaaaaaaaaaaaaaaaaaaaaaaaaaaaaaaaaaaaaaaagaauu

SEQ ID NO: 35838 - RNA, 1781 nt, Artificial Sequence
  mRNA product Design b-4 (hSL-A64-N5) comprising derived and/or modified sequence from LASV(G502-SLE-2009;Clade IV)__AIT17126__GPCmut9 (opt4)
aggagagucccgcagucggcguccagcggcucugcuuguucgugugugugucguugcaggccuuauucaagcuuaccaugggccagaucgugaccuucuuccaggaggugccccacgugaucgaggaggugaugaacaucgugcugaucgcccugagcauccuggccgugcugaagggccuguacaacuucgccaccugcggccuggugggccugcugaccuuccugcugcugugcggcagaagcugcaccaccggccuguacaagggcguguacgagcugcagacccuggagcugaacauggagacccugaacaugaccaugccccugagcugcaccaagaacaacagccaccacuacaucauggugggcaacgagaccggccuggagcugacccugaccaacaccagcaucaucaaccacaaguucugcaaccugagcgacgcccacaagaagaaccuguacgaccacgcccugaugagcaucaucagcaccuuccaccugagcauccccaacuucaaccaguacgaggccaugagcugcgacuucaacggcggcaagaucagcgugcaguacaaccugagccacagcuacgccggcgacgccgccgaccacugcggcaccguggccaacggcgugcugcagaccuucaugagaauggccuggggcggcagcuacaucgcccuggacagcggcugcggcagaugggacugcaucaugaccagcuaccaguaccugaucauccagaacaccaccugggaggaccacugccaguucagcagacccagccccaucggcuaccugggccugcugagccagagaaccagagacaucuacaucagcagaagacugcugggcaccuucaccuggacccugagcgacagcgagggcaaggacacccccggcggcuacugccugaccagauggaugcugaucgaggccgagcugaagugcuucggcaacaccgccguggccaagugcaacgagaagcacgacgaggaguucugcgacaugcugagacuguucgacuucaacaagcaggccauccagagacugaaggccgaggcccagaugagcauccagcugaucaacaaggccgugaacgcccugaucaacgaccagcuggugaugaagaaccaccugagagacaucaugugcauccccuacugcaacuacagcagauacugguaccugaaccacaccaccaccggcagaaccagccugcccaagugcuggcuggugagcaacggcagcuaccugaacgagacccacuucagcgacgacaucgagcagcaggccgacaacaugaucaccgagaugcugcagaaggaguacauggagagacagggcaagaccccccugggccugguggaccuguucguguucagcaccagcuucuaccugaucagcaucuuccugcaccuggugaagauccccacccacagacacaucgugggcaagagcugccccaagccccacagacugaaccacaugggcaucugcagcugcggccuguacaagcagcccggcgugcccgugaaguggaagagaugaggacuaguaauaaggaaacuguaugaaugucugugggcaggaagugaagagauccuucuguaaagguuuuuggaauuaugucugcugaauaauaaacuuuuuugaaauaauaaaucugguagaaaaaugagaucucaaaggcucuuuucagagccaccaaaaaaaaaaaaaaaaaaaaaaaaaaaaaaaaaaaaaaaaaaaaaaaaaaaaaaaaaaaaaaaaagaauu

SEQ ID NO: 35839 - RNA, 1781 nt, Artificial Sequence
  mRNA product Design b-4 (hSL-A64-N5) comprising derived and/or modified sequence from LASV(G733-SLE-2010;Clade IV)__AIT17154__GPCmut9 (opt4)
aggagagucccgcagucggcguccagcggcucugcuuguucgugugugugucguugcaggccuuauucaagcuuaccaugggccagaucgugaccuucuuccaggaggugccccacgugaucgaggaggugaugaacaucgugcugaucgcccugagcauccuggccgugcugaagggccuguacaacuucgccaccugcggcaucgugggccuggugagcuuccugcugcugugcggcagaagcugcaccaccagccuguacaagggcguguacgagcugcagacccuggagcugaacauggagacccugaacaugaccaugccccugagcugcaccaagaacaacagccaccacuacaucauggugggcaacgagaccggccuggagcugacccugaccaacaccagcaucaucaaccacaaguucugcaaccugagcgacgcccacaagaagaaccuguacgaccacgcccugaugagcaucaucagcaccuuccaccugagcauccccaacuucaaccaguacgaggccaugagcugcgacuucaacggcggcaagaucagcgugcaguacaaccugagccacagcuacgccggcgacgccgccaaccacugcggcaccaucgccaacggcgugcugcagaccuucaugagaauggccuggggcggcagcuacaucgcccuggacagcggcugcgacagaugggacugcaucaugaccagcuaccaguaccugaucauccagaacaccaccugggaggaccacugccaguucagcagacccagccccaucggcuaccugggccugcugagccagagaaccagagacaucuacaucagcagaagacugcugggcaccuucaccuggacccugagcgacagcgagggcaaggacacccccggcggcuacugccugaccagauggaugcugaucgaggccgagcugaagugcuucggcaacaccgccguggccaagugcaacgagaagcacgacgaggaguucugcgacaugcugagacuguucgacuucaacaagcaggccauccagagacugaaggccgaggcccagaugagcauccagcugaucaacaaggccgugaacgcccugaucaacgaccagcugaucaugaagaaccaccugagagacaucaugugcauccccuacugcaacuacagcaaguacugguaccugaaccacaccaccaccggcaagaccagccugcccaagugcuggcuggugagcaacggcagcuaccugaacgagacccacuucagcgacgacaucgagcagcaggccgacaacaugaucaccgagaugcugcagaaggaguacauggagagacagggcaagaccccccugggccugguggaccuguucguguucagcaccagcuucuaccugaucagcaucuuccugcaccuggugaagauccccacccacagacacguggugggcaagagcugccccaagccccacagacugaaccacaugggcaucugcagcugcggccuguacggccagcccggcgugcccgugaaguggaagagaugaggacuaguaauaaggaaacuguaugaaugucugugggcaggaagugaagagauccuucuguaaagguuuuuggaauuaugucugcugaauaauaaacuuuuuugaaauaauaaaucugguagaaaaaugagaucucaaaggcucuuuucagagccaccaaaaaaaaaaaaaaaaaaaaaaaaaaaaaaaaaaaaaaaaaaaaaaaaaaaaaaaaaaaaaaaaagaauu

SEQ ID NO: 35840 - RNA, 1781 nt, Artificial Sequence
  mRNA product Design b-4 (hSL-A64-N5) comprising derived and/or modified sequence from MOPV/LASV reassortant(IGS-1;Clade IV)__AFY05576__GPCmut9 (opt4)
aggagagucccgcagucggcguccagcggcucugcuuguucgugugugugucguugcaggccuuauucaagcuuaccaugggccagaucgugaccuucuuccaggaggugccccacgugaucgaggaggugaugaacaucgugcugaucgcccugagcgugcuggccgugcugaagggccuguacaacuucgccaccugcggccuggugggccuggugaccuuccugcugcugugcggcagaagcugcaccaccagccuguacaagggcguguacgagcugcagacccuggagcugaacauggagacccugaacaugaccaugccccugagcugcaccaagaacaacagccaccacuacaucauggugggcaacgagaccggccuggagcugacccugaccaacaccagcaucaucaaccacaaguucugcaaccugagcgacgcccacaagaagaaccuguacgaccacgcccugaugagcaucaucagcaccuuccaccugagcauccccaacuucaaccaguacgaggccaugagcugcgacuucaacggcggcaagaucagcgugcaguacaaccugagccacagcuacgccggcgacgccgccaaccacugcggcaccguggccaacggcgugcugcagaccuucaugagaauggccuggggcggcagcuacaucgcccuggacagcggcugcggcaacugggacugcaucaugaccagcuaccaguaccugaucauccagaacaccaccugggaggaccacugccaguucagcagacccagccccaucggcuaccugggccugcugagccagagaaccagagacaucuacaucagcagaagacugcugggcaccuucaccuggacccugagcgacagcgagggcgaggacacccccggcggcuacugccugaccagauggaugcugaucgaggccgagcugaagugcuucggcaacaccgccguggccaagugcaacgagaagcacgacgaggaguucugcgacaugcugagacuguucgacuucaacaagcaggccauccagagacugaaggccgaggcccagaugagcauccagcugaucaacaaggccgugaacgcccugaucaacgaccagcugaucaugaagaaccaccugagagacaucaugugcauccccuacugcaacuacagcaaguacugguaccugaaccacaccaccaccggcagaaccagccugcccaagugcuggcuggugagcaacggcagcuaccugaacgagacccacuucagcgacgacaucgagcagcaggccgacaacaugaucaccgagaugcugcagaaggaguacauggagagacagggcaagaccccccugggccugguggaccuguucguguucagcaccagcuucuaccugaucagcaucuuccugcaccuggugaagauccccacccacagacacaucgugggcaagagcugccccaagccccacagacugaaccacaugggcaucugcagcugcggccuguacaagcagcccggcgugcccgugaaguggaagagaugaggacuaguaauaaggaaacuguaugaaugucugugggcaggaagugaagagauccuucuguaaagguuuuuggaauuaugucugcugaauaauaaacuuuuuugaaauaauaaaucugguagaaaaaugagaucucaaaggcucuuuucagagccaccaaaaaaaaaaaaaaaaaaaaaaaaaaaaaaaaaaaaaaaaaaaaaaaaaaaaaaaaaaaaaaaaagaauu

SEQ ID NO: 35841 - RNA, 1781 nt, Artificial Sequence
  mRNA product Design b-4 (hSL-A64-N5) comprising derived and/or modified sequence from LASV(LM765-SLE-2012;Clade IV)__AIT17814__GPCmut9 (opt4)
aggagagucccgcagucggcguccagcggcucugcuuguucgugugugugucguugcaggccuuauucaagcuuaccaugggccagaucgugaccuucuuccaggaggugccccacgugaucgaggaggugaugaacaucgugcugaucgcccugagcauccuggccgugcugaagggccuguacaacuucgccaccugcggccuggugggccuggugaccuuccugcugcugugcggcagaagcugcaccaccagccuguacaagggcguguacgagcugcagacccuggagcugaacauggagacccugaacaugaccaugccccugagcugcaccaagaacaacagccaccacuacaucauggugggcaacgagaccggccuggagcugacccugaccaacaccagcaucaucgaccacaaguucugcaaccugagcgacgcccacagaaagaaccuguacgaccacgcccugaugagcaucaucagcaccuuccaccugagcauccccaacuucaaccaguacgaggccaugagcugcgacuucaacggcggcaagaucagcgugcaguacaaccugagccacagcuacgccaaggacgccgccgaccacugcggcaccguggccaacggcgugcugcagaccuucaugagaauggccuggggcggcagcuacaucgcccuggacagcggcugcggcagaugggacugcaucaugaccagcuaccaguaccugaucauccagaacaccaccugggaggaccacugccaguucagcagacccagccccaucggcuaccugggccugcugagccagagaaccagagacaucuacaucagcagaagacugcugggcaccuucaccuggacccugagcgacagcgagggcaaggacacccccggcggcuacugccugaccagauggaugcugaucgaggccgagcugaagugcuucggcaacaccgccguggccaagugcaacgagaagcacgacgaggaguucugcgacaugcugagacuguucgacuucaacaagcaggccauccagagacugaaggccgaggcccagaugagcauccagcugaucaacaaggccgugaacgcccugaucaacgaccagcugaucaugaagaaccaccugagagacaucaugugcauccccuacugcaacuacagcaaguacugguaccugaaccacaccaccaccggcaagaccagccugcccaagugcuggcuggugagcaacggcagcuaccugaacgagacccacuucagcgacgacaucgagcagcaggccgacaacaugaucaccgagaugcugcagaaggaguacauggagagacagggcaagaccccccugggccugguggaccuguucguguucagcaccagcuucuaccugaucagcaucuuccugcaccuggugaagauccccacccacagacacaucgugggcaagcccugccccaagccccacagacugaaccacaugggcaucugcagcugcggccuguacaagcagcccggcgugcccgugaaguggaagagaugaggacuaguaauaaggaaacuguaugaaugucugugggcaggaagugaagagauccuucuguaaagguuuuuggaauuaugucugcugaauaauaaacuuuuuugaaauaauaaaucugguagaaaaaugagaucucaaaggcucuuuucagagccaccaaaaaaaaaaaaaaaaaaaaaaaaaaaaaaaaaaaaaaaaaaaaaaaaaaaaaaaaaaaaaaaaagaauu

SEQ ID NO: 35842 - RNA, 1781 nt, Artificial Sequence
  mRNA product Design b-4 (hSL-A64-N5) comprising derived and/or modified sequence from LASV(LM776-SLE-2012;Clade IV)__AIT17824__GPCmut9 (opt4)
aggagagucccgcagucggcguccagcggcucugcuuguucgugugugugucguugcaggccuuauucaagcuuaccaugggccagaucgugaccuucuuccaggaggugccccacgugaucgaggaggugaugaacaucgugcugaucgcccugagcauccuggccgugcugaagggccuguacaacuucgccaccugcggccuggugggccuggugaccuuccugcugcugugcggcagaagcugcaccaccagcguguacaagggcguguacgagcugcagacccuggagcugaacauggagacccugaacaugaccaugccccugagcugcaccaagaacaacagccaccacuacaucauggugggcaacgagaccggccuggagcugacccugaccaacaccagcaucaucaaccacaaguucugcaaccugagcgacgcccacaagaagaaccuguacgaccacgcccugaugagcaucaucagcaccuuccaccugagcauccccaacuucaaccaguacgaggccaugagcugcgacuucaacggcggcaagaucagcgugcaguacaaccugagccacagcuacgccggcgacgccgccaaccacugcggcaccguggccaacggcgugcugcagaccuucaugagaauggccuggggcggcagcuacaucgcccuggacagcggcugcggcaagugggacugcaucaugaccagcuaccaguaccugaucauccagaacaccaccugggaggaccacugccaguucagcagacccagccccaucggcuaccugggccugcugagccagagaaccagagacaucuacaucagcagaagacugcugggcaccuucaccuggacccugagcgacagcgagggcaaggacacccccggcggcuacugccugaccagauggaugcugaucgaggccgagcugaagugcuucggcaacaccgccguggccaagugcaacgagaagcacgacgaggaguucugcgacaugcugagacuguucgacuucaacaagcaggccauccagagacugaaggccgaggcccagaugagcauccagcugaucaacaaggccgugaacgcccugaucaacgaccagcugaucaugaagaaccaccugagagacaucaugugcauccccuacugcaacuacagcaaguacugguaccugaaccacaccaccaccggcaagaccagccugcccaagugcuggcuggugagcaacggcagcuaccugaacgagacccacuucagcgacgacaucgagcagcaggccgacaacaugaucaccgagaugcugcagaaggaguacauggagagacagggcaagaccccccugggccugguggaccuguucguguucagcaccagcuucuaccugaucagcaucuuccugcaccuggugaagauccccacccacagacacaucgugggcaagagcugccccaagccccacagacugaaccacaugggcaucugcagcugcggccuguacaagcagcccggcgugcccgugagauggaagagaugaggacuaguaauaaggaaacuguaugaaugucugugggcaggaagugaagagauccuucuguaaagguuuuuggaauuaugucugcugaauaauaaacuuuuuugaaauaauaaaucugguagaaaaaugagaucucaaaggcucuuuucagagccaccaaaaaaaaaaaaaaaaaaaaaaaaaaaaaaaaaaaaaaaaaaaaaaaaaaaaaaaaaaaaaaaaagaauu

SEQ ID NO: 35843 - RNA, 1781 nt, Artificial Sequence
  mRNA product Design b-4 (hSL-A64-N5) comprising derived and/or modified sequence from LASV(Mad39;Clade IV)__ANH09722__GPCmut9 (opt4)
aggagagucccgcagucggcguccagcggcucugcuuguucgugugugugucguugcaggccuuauucaagcuuaccaugggccagaucgugaccuucuuccaggaggugccccacgugaucgaggaggugaugaacaucgugcugaucgcccugagcauccuggccgugcugaagggccuguacaacguggccaccugcggccugaucggccuggugaccuuccugcugcugugcggcagaagcugcaccaccacccuguacaagggcguguacgagcugcaggcccuggagcugaacauggagacccugaacaugaccaugccccugagcugcaccaagaacaacagccaccacuacaucagagugggcaacgagaccggccuggagcugacccugaccaacaccagccugaucaaccacaaguucugcaaccugagcgacgcccacaagaagaaccuguacgaccacgcccugaugagcaucaucagcaccuuccaccugagcauccccaacuucaaccaguacgaggccaugagcugcgacuucaacgacggcaagaucagcgugcaguacaaccugagccacaccuacgccggcgacaccgccaaccacugcggcaccguggccaacggcgugcugcagaccuucaugagaauggccuggggcggcagcuacaucgcccuggacagcggcugcggcggcugggacugcaucaugaccagcuaccaguaccugaucauccagaacaccaccugggaggaccacugccaguucagcagacccagccccaucggcuaccugggccugcugagccagagaaccagagacaucuacaucagcagaagacugcugggcaccuucaccuggacccugagcgacagcgagggcaaggacacccccggcggcuacugccugaccagauggaugcugaucgaggccgagcugaagugcuucggcaacaccgccguggccaagugcaacgagaagcacgacgaggaguucugcgacaugcugagacuguucgacuucaacaagcaggccauccagagacugaaggccgaggcccagaugagcauccagcugaucaacaaggccgugaacgcccugaucaacgaccagcugaucaugaagaaccaccugagagacaucaugugcauccccuacugcaacuacagcaaguacugguaccugaaccacaccgugaccggcaagaccagccugcccaagugcuggcuggugagcaacggcagcuaccugaacgagacccacuucagcgacgacaucgagcagcaggccgacaacaugaucaccgagaugcugcagaaggaguacauggagagacagggcaagaccccccugggccugguggaccuguucguguucagcaccagcuucuaccugaucagcaucuuccugcaccuggugaagauccccacccacagacacguggugggcaagcccugccccaagccccacagacugaaccacaugggcaucugcagcugcggcuucuacaagcagcccggcgugcccgugagauggaagagaugaggacuaguaauaaggaaacuguaugaaugucugugggcaggaagugaagagauccuucuguaaagguuuuuggaauuaugucugcugaauaauaaacuuuuuugaaauaauaaaucugguagaaaaaugagaucucaaaggcucuuuucagagccaccaaaaaaaaaaaaaaaaaaaaaaaaaaaaaaaaaaaaaaaaaaaaaaaaaaaaaaaaaaaaaaaaagaauu

SEQ ID NO: 35844 - RNA, 1781 nt, Artificial Sequence
  mRNA product Design b-4 (hSL-A64-N5) comprising derived and/or modified sequence from LASV(Z0947-SLE-2011;Clade IV)__AIT17840__GPCmut9 (opt4)
aggagagucccgcagucggcguccagcggcucugcuuguucgugugugugucguugcaggccuuauucaagcuuaccaugggccagaucgugaccuucuuccaggaggugccccacgugaucgaggaggugaugaacaucgugcugaucgcccugagcauccuggccgugcugaagggccuguacaacuucgccaccugcggccuggugggccuggugaccuuccugcugcugugcggcagaagcugcaccaucagccuguacaagggcguguacgagcugcagacccuggagcugaacauggagacccugaacaugaccaugccccugagcugcaccaagaacaacagccaccacuacaucauggugggcaacgagaccggccuggagcugacccugaccaacaccagcaucaucaaccacaaguucugcaaccugagcgacgcccacaagaagaaccuguacgaccacgcccugaugagcaucaucagcaccuuccaccugagcauccccaacuucaaccaguacgaggccaugagcugcgacuucaacggcggcaagaucagcgugcaguacaaccugagccacagcuacgccggcgacgccgccaaccacugcggcaccguggccaacggcgugcugcagaccuucaugagaauggccuggggcggcagcuacaucgcccuggacagcggcugcgacagaugggacugcaucaugaccagcuaccaguaccugaucauccagaacaccaccugggaggaccacugccaguucagcagacccagccccaucggcuaccugggccugcugagccagagaaccagagacaucuacaucagcagaagacugcugggcaccuucaccuggacccugagcgacagcgagggcaaggacacccccggcggcuacugccugaccagauggaugcugaucgaggccgagcugaagugcuucggcaacaccgccguggccaagugcaacgagaagcacgacgaggaguucugcgacaugcugagacuguucgacuucaacaagcaggccauccagagacugaaggccgaggcccagaugagcauccagcugaucaacaaggccgugaacgcccugaucaacgaccagcugaucaugaagaaccaccugagagacaucaugugcauccccuacugcaacuacagcaaguacugguaccugaaccacaccaccaccggcaagaccagccugcccaagugcuggcuggugagcaacggcagcuaccugaacgagacccacuucagcgacgacaucgagcagcaggccgacaacaugaucaccgagaugcugcagaaggaguacauggagagacagggcaagaccccccugggccugguggaccuguucguguucagcaccagcuucuaccugaucagcaucuuccugcaccuggugaagauccccacccacagacacaucgugggcaagcccugccccaagccccacagacugaaccacaugggcaucugcagcugcggccuguacaagcagcccggcgugcccgugaaguggaagagaugaggacuaguaauaaggaaacuguaugaaugucugugggcaggaagugaagagauccuucuguaaagguuuuuggaauuaugucugcugaauaauaaacuuuuuugaaauaauaaaucugguagaaaaaugagaucucaaaggcucuuuucagagccaccaaaaaaaaaaaaaaaaaaaaaaaaaaaaaaaaaaaaaaaaaaaaaaaaaaaaaaaaaaaaaaaaagaauu

SEQ ID NO: 35845 - RNA, 1781 nt, Artificial Sequence
  mRNA product Design b-4 (hSL-A64-N5) comprising derived and/or modified sequence from LASV(Josiah;Clade IV)__NP_694870__GPCmut9 (opt5)
aggagagucccgcagucggcguccagcggcucugcuuguucgugugugugucguugcaggccuuauucaagcuuaccaugggccagaucgugaccuucuuucaagaggucccccacguuauugaagaggugaugaacaucgugcugauugcccucagcguccuggcugugcuuaaggggcuguacaauuucgccacaugcggacucguuggccuggugacguuucuucugcucugugggagauccugcaccacaucucuguauaaaggagucuacgaacugcagacccucgagcugaacauggaaacacuuaauaugaccaugccucugagcuguacaaagaacaauucccaucacuauaucauggugggcaacgagaccgggcucgagcugacgcuuaccaauacaucuauuaucaaccauaaauucugcaaucugagcgacgcgcacaagaaaaaccucuacgaucaugcucugauguccaucauuucuaccuuucaccugagcaucccgaauuucaaccaguaugaagccauguccugugacuuuaauggaggcaagauuagcguucaguacaaccucucucacuccuaugccggcgaugcugccaaucauugcgggacaguggcuaacggaguccugcaaaccuucaugcggauggccuggggcgggagcuacaucgcgcuugacucuggauguggcaacugggauugcauuaugacguccuaccaguaucugaucauucagaauacaaccugggaggaccacugucaguuuagccgccccucuccuaucggguaccucggacugcuuucccaaagaacacgggauaucuauauuagccgcagacugcucggcaccuucaccuggacacuguccgacucugaaggcaaggauacgcccgggggauacugccugacccgguggaugcucaucgaggccgagcugaaauguuuuggcaacacagcuguggccaagugcaaugaaaaacaugacgaggaguucugcgauaugcuucgccuguuugacuucaacaagcaggcuauucagagacucaaagccgaagcgcagaugagcauccaacugauuaauaaggccgugaacgcucuuaucaaugaucagcugaucaugaagaaccaccuccgggacauuauguguaucccuuauugcaauuacuccaaauauugguaccugaaccacaccacaaccgggcgcacgagccugcccaaguguuggcucgucucuaauggauccuaccugaacgaaacacauuucagcgacgauauugagcagcaagccgacaauaugaucaccgagaugcuucagaaagaauauauggagagacagggcaagaccccucuggggcucguugaucuguuuguguucucuaccagcuuuuaccugauuuccaucuuccuucaccucgugaaaaucccgacacaucggcacauugucggaaagucuugccccaaaccucaucgccugaaccacaugggcaucuguagcugcggccuguauaagcagcccggggugccuguuaaguggaaaagaugaggacuaguaauaaggaaacuguaugaaugucugugggcaggaagugaagagauccuucuguaaagguuuuuggaauuaugucugcugaauaauaaacuuuuuugaaauaauaaaucugguagaaaaaugagaucucaaaggcucuuuucagagccaccaaaaaaaaaaaaaaaaaaaaaaaaaaaaaaaaaaaaaaaaaaaaaaaaaaaaaaaaaaaaaaaaagaauu

SEQ ID NO: 35846 - RNA, 1778 nt, Artificial Sequence
  mRNA product Design b-4 (hSL-A64-N5) comprising derived and/or modified sequence from LASV(LP;Clade I)__AAF86701__GPCmut9 (opt5)
aggagagucccgcagucggcguccagcggcucugcuuguucgugugugugucguugcaggccuuauucaagcuuaccaugggccagaucauuaccuucuuucaagaggugccccacgucaucgaagagguuaugaacauugugcugaucgcccucagccugcuugcuauucugaaggggcucuacaauaucgccacaugcggaaucauuggccugguggcguuccuuuuucugugugggaaauccugcucucucacgcugaagggaggcuaugaacugcagacccucgagcugaacauggaaacacuuaauaugaccaugccucugagcuguaccaaaaacuccucucaucacuacaucagagucgggaaugagacaggacucgagcugacacuuaccaacacgagcauuaucaaucauaaguucugcaaccuguccgacgcucacaaaaagaaucucuaugaucaugcccugaugucuauuaucagcaccuuucaccuguccauuccgaacuucaaucaguacgaagccaugagcugugacuuuaacggcggcaagaucucugugcaguauaaucucucccacagcuacgcuggggaugccgcugagcauugcggaacaguugccaacggcgugcugcaaaccuucaugcggauggcguggggagggcgcuauaucgcccuugacucuggcugugggaauugggauugcauuaugacauccuaccaguaccugaucauucagaacaccacgugggaagaccacugucaguuuagcagacccucuccuaucggauaucucggccugcuuucccaacggacacgcgauauuuacaucagcagacggcugcucggcaccuucacauggacccuguccgacucugaggggaacgagacccccggaggcuauugccugacacgcuggaugcucaucgaagcugagcugaaauguuuugggaauacggccgucgcuaagugcaacgaaaaacaugaugaggaguucugcgacaugcuuagacuguuugauuucaauaagcaggccauucggcgccucaaagcggaagcccagaugagcauccagcugauuaacaaggcugugaaugcccuuaucaacgaccaacugauuaugaagaaucaccucagagauaucauguguaucccuuacugcaacuauuccaaauacugguaucugaaucacaccagcucuggacggacaucccugcccaaguguuggcucauuagcaacggcucuuaccugaaugagacccaguucagcgacgacaucgaacagcaagcugauaacaugauuacagagaugcuucagaaagaauacaucgagcgccaggggaagaccccucugggacucguugacauuuuuaucuucuccacgucuuuuuaucugauuagcaucuuccugcaucuuaucaaaauuccgacacacagacauaucgugggcaagcccugcccuaaaccccaccggcucaaucauaugggcgucuguuccugcgggcuguacaagcacccuggagugcccaccaaguggaaacgcugaggacuaguaauaaggaaacuguaugaaugucugugggcaggaagugaagagauccuucuguaaagguuuuuggaauuaugucugcugaauaauaaacuuuuuugaaauaauaaaucugguagaaaaaugagaucucaaaggcucuuuucagagccaccaaaaaaaaaaaaaaaaaaaaaaaaaaaaaaaaaaaaaaaaaaaaaaaaaaaaaaaaaaaaaaaaagaauu

SEQ ID NO: 35847 - RNA, 1778 nt, Artificial Sequence
  mRNA product Design b-4 (hSL-A64-N5) comprising derived and/or modified sequence from LASV(803213;Clade II)__AAF86703__GPCmut9 (opt5)
aggagagucccgcagucggcguccagcggcucugcuuguucgugugugugucguugcaggccuuauucaagcuuaccaugggccagaucauuaccuucuuucaagaggugccccacgucaucgaagagguuaugaacauugugcugaucgcccucagccugcuugcuauucugaaggggaucuacaauguggccacaugcggacucuucggccugaucuccuuucuucugcucugugggagaucuugcagcgucacguauaaaggaguguacgaacugcagacccuggagcucaacauggcgaaucugaacaugacaaugccucuuuccuguaccaagaauaacucucaucacuauauuaugguuggcaaugaaacagggcuggagcucacccugacaaacaccagcaucauuaaucauaaauucugcaaccuuuccgacgcucacaagaaaaaucuguacgaucaugcccucaugucuaucauuagcacguuucaccuguccaucccgaacuucaaucaguaugaggccaugagcugugacuuuaacggaggcaagauuucugugcaguacaaucugucccacagcuucgcugucgaugccgcuaaccauugcggcaccaucgccaacggggugcuccaaacauuuaugcggauggcguggggaggcucuuauaucgcccuggacuccggguguggaaauugggauugcauuaugaccagcuaccaguaccuuaucauucagaacacaaccugggaagaccacugucaguucucucgccccuccccuaucggcuaucuggggcuccugagccaaagaacgcgggauauuuacaucucccgcagacuucugggaacauuuaccuggacacucucugacagcgagggcaaugaagcucccggcggguauugccugacccgguggaugcugaucgaggccgagcucaaguguuucggaaacaccgcuguugccaaaugcaaugaaaagcaugaugaggaauuuugcgacaugcugcgccuuuucgauuucaacaaacaggcgauuaagagacugaaaacagaggcccagauguccauccagcucauuaauaaggcugugaacgcccugaucaaugaccaacuuauuaugaagaaccaucugcgggauaucauguguaucccuuacugcaauuauagccgcuacugguaucucaaccacacggucaccggcaaaacaucucugcccagauguuggcugguguccaaugggagcuaccucaacgaaacccacuuuucugacgacauugagcagcaggcugauaauaugaucacagagaugcugcaaaaggaauacauggaccggcagggaaaaaccccucuuggccugguggaucucuucgucuuuagcacguccuucuaucugauuucuaucuuucugcaccuuguuaagauuccgacacaucgccacaucguggggaaacccugcccuaagccccauagacucaaccacaugggaauuuguagcugcggccuguacaaacacccuggcgugcccgucaaguggaagcggugaggacuaguaauaaggaaacuguaugaaugucugugggcaggaagugaagagauccuucuguaaagguuuuuggaauuaugucugcugaauaauaaacuuuuuugaaauaauaaaucugguagaaaaaugagaucucaaaggcucuuuucagagccaccaaaaaaaaaaaaaaaaaaaaaaaaaaaaaaaaaaaaaaaaaaaaaaaaaaaaaaaaaaaaaaaaagaauu

SEQ ID NO: 35848 - RNA, 1778 nt, Artificial Sequence
  mRNA product Design b-4 (hSL-A64-N5) comprising derived and/or modified sequence from LASV(GA391;Clade III)__CAA36645__GPCmut9 (opt5)
aggagagucccgcagucggcguccagcggcucugcuuguucgugugugugucguugcaggccuuauucaagcuuaccaugggccagaucgugaccuucuuucaagaggucccccacguuauugaagaggugaugaacaucgugcugauugcccucagcauccuggcuauucuuaaggggcuguacaaugucgccacaugcggacucaucggccuggugacguuccuucugcucuccgggagaucuuguagccugaucuauaaaggaaccuacgaacugcagacacucgagcugaacauggaaacccuuaauaugacaaugccucuguccugcaccaagaacaauucucaucacuauauucggguuggcaacgagacagggcucgagcugacccuuacgaauaccagcauccugaaccauaaauuuuguaaucucuccgacgcgcacaagcgcaaccuguacgaucauucucugaugagcauuaucuccacauuccaccucagcauuccgaauuuuaaccaguaugaagcuaugucuugcgacuucaauggaggcaaaaucaccgugcaguacaaccugucccacagcuuugccgucgaugccgcuggccauugugggacacuugccaauggagugcugcaaaccuucaugagaauggcuuggggcgggucuuauauugcccucgacuccggaugcggcaacugggauuguaucaugacgagcuaccaguaccugaucauucagaacacaaccugggacgaucacugccaguuuucucggcccuccccuaucggguaucuuggacugcucagccaacgcacaagagacauuuacaucucccggcgccugcugggcaccuucaccuggacacucucugauagcgagggcaaugaaacgcccgggggauauugucugaccagauggaugcuuauugaggcggagcugaagugcuuuggcaacacagccguugcuaaguguaaugaaaaacaugacgaggaguucugcgauaugcuccggcuguuugacuucaacaagcaggccauccgcagacuuaaaaccgaagcucagauguccauccagcugauuaauaaggccgugaacgcgcucaucaaugaucaacugauuaugaaaaaccaucugcgggacaucaugugcauuccuuacuguaauuauagccgcuacugguaucucaaccacacaucuaccgggaagacgucccugcccagaugcuggcuuaucagcaauggaucuuaccugaacgaaacaaaguucagcgacgauaucgagcagcaggccgacaauaugauuaccgagaugcuccaaaaagaauacaucgaucggcagggcaagaccccucuggggcuggucgaccuuuuuguguucuccacaucuuuuuaucucauuagcaucuuccugcaccuggugaaaauuccgacccaccgccauaucgucggaaagcccuguccuaaaccccacagacucaaccauaugggcauuugcuccuguggccuguacaagcagccugggguucccgugcgguggaaaagaugaggacuaguaauaaggaaacuguaugaaugucugugggcaggaagugaagagauccuucuguaaagguuuuuggaauuaugucugcugaauaauaaacuuuuuugaaauaauaaaucugguagaaaaaugagaucucaaaggcucuuuucagagccaccaaaaaaaaaaaaaaaaaaaaaaaaaaaaaaaaaaaaaaaaaaaaaaaaaaaaaaaaaaaaaaaaagaauu

SEQ ID NO: 35849 - RNA, 1781 nt, Artificial Sequence
  mRNA product Design b-4 (hSL-A64-N5) comprising derived and/or modified sequence from LASV(AV;Clade V)__CCA30314__GPCmut9 (opt5)
aggagagucccgcagucggcguccagcggcucugcuuguucgugugugugucguugcaggccuuauucaagcuuaccaugggccagaucgugaccuucuuucaagaggucccccacguuauugaagaggugaugaacaucgugcugauugcccucagcauccuggcuguccuuaaggggcuguacaauauugccacaugcggacucaucggccugaucacguuccuucugcucugugggagauccugcucuagcaaccuguauaaaggaguguacgaacugcagucccucgaccugaauauggagacccuuaacaugacaaugccucugucuuguaccaagaauaacagccaucacuauauucggguuggcaaugauacagggcucgaacugacccuuacaaacaccuccauccugaaucauaaauuuugcaaccucucugacgcgcacaagaaagaucuguacgaccaugcucugaugagcauuaucuccacguuccaccucagcauuccgaauuuuaaccaguaugaggccaugucuugugauuucaauggaggcaagaucuccgugcaguacaaccugagccacucuuaugccauugacgcugccaaucauugcggcaccgucgcuaacgggauccuucaaacauuuaugcgcauggccuggggaggcuccuacaucgcgcuggauagcggguguggaaacugggacugcauuaugaccucuuaccaguaucucaucauucagaauacaaccugggagaaccacugucaguucuccagacccagcccuaucggcuaccuggggcuucugucccaacggacgcgcgauauuuauaucucuagacggcuccugggaacauuuaccuggacacugagcgacuccgaaggcaaugccacccccggcggguacugccucacccgcuggaugcugaucgaggcugaacuuaaguguuucggaaacacagccguggcuaaaugcaaugagaagcaugaugaggaauuuugcgacaugcugagacucuucgauuuuaacaaacaggccauuagccggcugaagucugaggcgcagauguccauccagcuuauuaauaaagccguuaacgcucugaucaaugaccaacucauuaugaagaaccaucugcgcgacaucauguguaucccuuauugcaauuacagcaaguauugguaccugaaccacacgauuaccggcaaaacaucucuccccaaguguuggcuggugagcaauggguccuaccuuaacgaaacccacuucucugaugacaucgagcagcaggccgauaauaugauuacagaaaugcugcaaaaagaguauauggagagacagggaaagaccccucucggccuggucgaccuguucguguuuagcacguccuucuaccuuaucagcauuuuucuccggcuggugaaaaucccgacacaccgccauauugucgggaagcccugcccuaaaccccacagacugaaccauaugggaaucuguucuugcggccucuauaagcagccuggcguucccgugcgguggaagcgcugaggacuaguaauaaggaaacuguaugaaugucugugggcaggaagugaagagauccuucuguaaagguuuuuggaauuaugucugcugaauaauaaacuuuuuugaaauaauaaaucugguagaaaaaugagaucucaaaggcucuuuucagagccaccaaaaaaaaaaaaaaaaaaaaaaaaaaaaaaaaaaaaaaaaaaaaaaaaaaaaaaaaaaaaaaaaagaauu

SEQ ID NO: 35850 - RNA, 1778 nt, Artificial Sequence
  mRNA product Design b-4 (hSL-A64-N5) comprising derived and/or modified sequence from LASV(Togo/2016/7082;Clade VI)__AMR44577__GPCmut9 (opt5)
aggagagucccgcagucggcguccagcggcucugcuuguucgugugugugucguugcaggccuuauucaagcuuaccaugggccagaucauuaccuucuuucaagaggugccccacgucaucgaagagguuaugaacauugugcugaucgcccucagccugcuugcuauucugaaggggguguacaaugucgccacaugcggaaucaucggccucgugacguuccuguuucuuugugggagauccugcucucugauuuauaaaggaagcuacgaacuccagacccuggagcugaacauggaaacacucaauaugaccaugccucuguccuguacaaagaacucuagccaucacuauauccggguuggcaaugagaccgggcuugagcugacacucaccaacacguccauuaucaaucauaaauucugcaaccugucugacgcgcacaagcgcaaucuuuacgaucaugcucugaugagcauucucuccaccuuucaccugagcaucccgaacuucaaucaguaugaagccaugucuugugacuuuaacggaggcaaaauuuccgugcaguacaaucugagccacgccuaugcugucgaugccgcugagcauugcggcacaguggccaacgggguucuccaaaccuucaugagaauggcguggggaggcucuuacaucgcccuggacuccggguguggaaauugggauugcaucaugacaagcuaccaguaucuuauuauccagaacaccacgugggaagaccacugucaguuuucucggcccuccccuauuggcuaccuggggcuccugagccaacgcacaagagauaucuauauuucccggcgccuucugggaaccuucacauggacccucucugacagcgagggcaacgagacccccggcggguacugccugacaagauggaugcugaucgaagcugagcucaaguguuuuggaaauacggccguggcuaagugcaacgaaaaacaugaugaggaguucugcgacaugcugcggcuuuuugauuucaauaagcaggccauccagcgccugaaauccgaagcgcagaugagcauucaacucaucaacaaggccgucaaugcucugauuaacgaccagcuuaucaugaaaaaucaccugagagauaugauguguauuccuuauugcaacuacucuaaguauugguaccucaaucacaccuccagcggccggacaucucugcccaaguguuggcuggugagcaacggguccuaccucaaugagacccauuucucugacgacaucgaacagcaagccgauaacaugaucacagagaugcugcagaaagaauauauugaccgccagggaaagaccccucuuggccugguggaucucuuugucuucagcacguccuuuuaccugaucagcauuuuccugcaccuuaucaaaauuccgacacauagacacaucguugggaagcccugcccuaaaccccaucggcucaaucacaugggaauuuguucuugcggccuguauaagcagccuggcgugcccacccgcuggaaaagaugaggacuaguaauaaggaaacuguaugaaugucugugggcaggaagugaagagauccuucuguaaagguuuuuggaauuaugucugcugaauaauaaacuuuuuugaaauaauaaaucugguagaaaaaugagaucucaaaggcucuuuucagagccaccaaaaaaaaaaaaaaaaaaaaaaaaaaaaaaaaaaaaaaaaaaaaaaaaaaaaaaaaaaaaaaaaagaauu

SEQ ID NO: 35851 - RNA, 1778 nt, Artificial Sequence
  mRNA product Design b-4 (hSL-A64-N5) comprising derived and/or modified sequence from LASV(KAK-428;Clade n.d. (VII))__ANH09740__GPCmut9 (opt5)
aggagagucccgcagucggcguccagcggcucugcuuguucgugugugugucguugcaggccuuauucaagcuuaccaugggccagaucgugaccuucuuucaagaggucccccacguuauugaagaggugaugaacaucgugcugauugcccucagccugcuugcuauccugaaggggcucuacaauuucgccacaugcggagucauuggccugaucacguuucuucugcucugugggagauccugcucugcgaccuauaaaggacaguacgaacugcagacacuggagcucaacauggaaagccugaauaugaccaugccucuuuccuguacaaagaacaauucucaucacuauauccgggcuggcaacaauaccgggcuggagcucacacugaccaacacgagcauuaucucccauaaauucugcaaucuuucugacgcccacaagaaaaaccuguacgaucauacccucaugagcauuaucacaaccuuucaccuguccauuccgaauuucaaccaguaugaggccaugagcugugacuuuaauggaggcaagaucucuauucaauacaaccugucccacagcuaugcuggcgaugccgcucagcauugcgggacaguggccaauggaguucuccagaccuucaugcgcauggcguggggcgggucuuaccuggcccuugacuccggauguagaggcugggauugcaucaucagcucuuaccaguaucugauuauccaaaacacgacaugggacgaucacugucaguuuucccggcccagcccuauuggguaccucggauucgugucccagaagacccgcgacaucuauauuucuagacggcugcuuggcacauuuaccuggacccugagcgauuccgaaggccaugacaugcccgggggauacugccucacacgcuggaugcugaucgaggcugaucugaaauguuucggcaacacggccgucgcuaagugcaaugaaaaacacgacgaggaguuuugcgauauguggagacucuucgacuucaacaagcaggccauccaacggcugaaagcggaagcccagaugaauauucagcuuaucaacaaggcugugaaugcccugauuaacgaccaacucaugaugaagaaucaucugcgcgauaucauguguauuccuuauugcaacuacagcaaauuuugguaucuuaauaacaccacaaccgggagaacaucucugccccgguguuggcucaucuccaauggaagcuaccugaacgagacccacuucucugacgauaucgaacagcaggcugacaauaugauuacggagaugcugcagaaggaauacauggaucgccaaggcaaaacaccucucgggcugguugaccuuuuuguguucagcaccuccuuuuaucugaucaccauuuuccuccaccuggucaagaucccgacacauagacacauugugggaaaacccugcccuaagccccaucggcugaaccacaugggcaucuguucuugcggccuuuacaaacagccuggggugcccguccgcuggaagagaugaggacuaguaauaaggaaacuguaugaaugucugugggcaggaagugaagagauccuucuguaaagguuuuuggaauuaugucugcugaauaauaaacuuuuuugaaauaauaaaucugguagaaaaaugagaucucaaaggcucuuuucagagccaccaaaaaaaaaaaaaaaaaaaaaaaaaaaaaaaaaaaaaaaaaaaaaaaaaaaaaaaaaaaaaaaaagaauu

SEQ ID NO: 35852 - RNA, 1778 nt, Artificial Sequence; identical to SEQ ID NO: 35846
  mRNA product Design b-4 (hSL-A64-N5) comprising derived and/or modified sequence from LASV(Pinneo-NIG-1969;Clade I)__AIT17836__GPCmut9 (opt5)

SEQ ID NO: 35853 - RNA, 1778 nt, Artificial Sequence
  mRNA product Design b-4 (hSL-A64-N5) comprising derived and/or modified sequence from LASV(ISTH0009-NIG-2011;Clade II)__AIT17404__GPCmut9 (opt5)
aggagagucccgcagucggcguccagcggcucugcuuguucgugugugugucguugcaggccuuauucaagcuuaccaugggccagaucauuaccuucuuucaagaggugccccacgucaucgaagagguuaugaacauugugcugaucgcccucagccugcuugcuauucugaaggggaucuacaauguggccacaugcggacucuucggccuggucuccuuucuucugcucugugggagaucuugcagcacgaccuauaaaggaguguacgaacugcagacacuggagcucgacauggcgucccugaacaugaccaugccucuuucuuguacaaagaauaacagccaucacuauaucaugguuggcaaugaaaccgggcuggagcucacacugaccaacacguccauuaucaaucauaaauucugcaaccuuucugaugcucacaagaaaaaucuguacgaccaugcccucaugagcauuaucuccaccuuucaccugagcauuccgaacuucaaucaguaugaggccaugucuugugauuuuaacggaggcaagaucuccgugcaguacaaucugagccacgcuuaugccgucgacgcugccaaccauugcggcacaauugcgaauggggugcuccaaaccuucaugcggauggccuggggaggcucuuacaucgcucuggauuccggguguggaagcugggacugcaucaugacaucuuaccaguaucuuauuauccagaacaccacgugggaagaucacugucaguuuucccgccccagcccuauuggcuaccuggggcuccugucccaaagaacacgggacaucuauauuucucgcagacuucugggaaccuucacauggacccucagcgauuccgagggcaacgaaacccccggcggguacugccugacacgguggaugcugaucgaggccgagcucaaguguuuuggaaauacggcuguugccaaaugcaacgaaaagcaugacgaggaguucugcgauaugcugcgccuuuuugacuucaauaaacaggcgaucagacggcugaagaccgaagcccagaugagcauucagcucaucaacaaagcugugaaugcccugauuaacgaucaacuuaucaugaagaaucaucugcgcgacauuauguguaucccuuauugcaacuacucuaaguauugguaccucaaucacacagucaccggcaaaacaucccugcccagauguuggcuggugagcaacgggucuuaccucaaugaaacccacuucagcgacgauaucgagcagcaggcugacaacaugauuacggagcugcuucaaaaggaauauauggaucggcagggaaaaacaccucugggccucguggaccuguuugucuucuccaccucuuuuuaccugaucagcauuuuccuucaccucaucaagauuccgacccaucgccacaucacagggaaacccugcccuaagccccauagacugaaucacaugggaauuuguuccugcggccuguauaaacacccuggcguucccgugaaguggaagcggugaggacuaguaauaaggaaacuguaugaaugucugugggcaggaagugaagagauccuucuguaaagguuuuuggaauuaugucugcugaauaauaaacuuuuuugaaauaauaaaucugguagaaaaaugagaucucaaaggcucuuuucagagccaccaaaaaaaaaaaaaaaaaaaaaaaaaaaaaaaaaaaaaaaaaaaaaaaaaaaaaaaaaaaaaaaaagaauu

SEQ ID NO: 35854 - RNA, 1778 nt, Artificial Sequence
  mRNA product Design b-4 (hSL-A64-N5) comprising derived and/or modified sequence from LASV(ISTH2010-NIG-2012;Clade II)__AIT17482__GPCmut9 (opt5)
aggagagucccgcagucggcguccagcggcucugcuuguucgugugugugucguugcaggccuuauucaagcuuaccaugggccagaucauuaccuucuuucaagaggugccccacgucaucgaagagguuaugaacauugugcugaucgcccucagccugcuugcuauucugaaggggaucuacaauguggccacaugcggacucuucggccuggucuccuuucuucugcucugugggagaucuugcagcacgaccuauaaaggaguguacgaacugcagacacuggagcucgacauggcgucccugaacaugaccaugccucuuucuuguacaaagaauaacagccaucacuauaucaugguuggcaaugaaaccgggcuggagcucacacugaccaacacguccauuaucaaucauaaauucugcaaccuuucugaugcucacaagaaaaaucuguacgaccaugcccucaugagcauuaucuccaccuuucaccugagcauuccgaacuucaaucaguaugaggccaugucuugugauuuuaacggaggcaagaucuccgugcaguacaaucugagccacgcuuaugccgucgacgcugccaaccauugcggcacaauugcgaauggggugcuccaaaccuucaugcggauggccuggggaggcucuuacaucgcucuggauuccggguguggaagcugggacugcaucaugacaucuuaccaguaucuuauuauccagaacauuaccugggaagaucacugucaguuuucccgccccagcccuaucggcuaccuggggcuccugucccaaagaacgcgggacauuuauaucucucgcagacuucugggaacauucaccuggacacucagcgauuccgagggcaacgaaacccccggcggguacugccugacccgguggaugcugaucgaggccgagcucaaguguuuuggaaauacagcuguugccaaaugcaacgaaaagcaugacgaggaguucugcgauaugcugcgccuuuuugacuucaauaaacaggcgauuagacggcugaagacggaagcccagaugagcauccagcucauuaacaaagcugugaaugcccugaucaacgaucaacuuauuaugaagaaucaucugcgcgacaucauguguaucccuuauugcaacuacucuaaguauugguaccucaaucacaccgucacaggcaaaaccucccugcccagauguuggcuggugagcaacgggucuuaccucaaugaaacacacuucagcgacgauauugagcagcaggcugacaacaugaucaccgagcugcuucaaaaggaauauauugaucggcagggaaaaacgccucugggccucguggaccuguuugucuucuccacaucuuuuuaccugaucagcauuuuccuucaccucguuaagaucccgacccaucgccacgugguggggaaacccugcccuaagccccauagacugaaucacaugggaauuuguuccugcggccuguauaaacacccuggcguccccgugaaguggaagcggugaggacuaguaauaaggaaacuguaugaaugucugugggcaggaagugaagagauccuucuguaaagguuuuuggaauuaugucugcugaauaauaaacuuuuuugaaauaauaaaucugguagaaaaaugagaucucaaaggcucuuuucagagccaccaaaaaaaaaaaaaaaaaaaaaaaaaaaaaaaaaaaaaaaaaaaaaaaaaaaaaaaaaaaaaaaaagaauu

SEQ ID NO: 35855 - RNA, 1778 nt, Artificial Sequence
  mRNA product Design b-4 (hSL-A64-N5) comprising derived and/or modified sequence from LASV(Lassa virus/H.sapiens-wt/NGA/2015/ISTH_0543;Clade II)__AVO03639__GPCmut9 (opt5)
aggagagucccgcagucggcguccagcggcucugcuuguucgugugugugucguugcaggccuuauucaagcuuaccaugggccagaucauuaccuucuuucaagaggugccccacgucaucgaagagguuaugaacauugugcugaucgcccucagccugcuugcuauucugaaggggaucuacaauguggccacaugcggacucuucggccuggucuccuuucuucugcucugugggagaucuugcagcacgaccuauaaaggaguguacgaacugcagacacuggagcucgacauggcgaaccugaauaugaccaugccucuuuccuguacaaagaacaauucucaucacuauaucaugguuggcaacgaaaccgggcuggagcucacacugaccaauacgagcauuaucaaccauaaauucugcaaucuuuccgaugcucacaagaaaaaccuguacgaccaugcccucaugucuauuaucagcaccuuucaccuguccauuccgaauuucaaccaguaugaggccaugagcugugauuuuaauggaggcaagaucucugugcaguacaaccugucccacacauaugcugucgacgccgcuaaucauugcggcaccauugccaacggggugcuccaaacauucaugcggauggcguggggaggcagcuacaucgcccuggauucuggguguggauccugggacugcaucaugaccagcuaccaguaucuuguuauucagaacacgacaugggaagaucacugucaguuuucucgccccuccccuaucggcuaccuggggcuccugagccaaagaacccgggacauuuauaucucccgcagacuucugggaacauucaccuggacccucucugauagcgagggcaaugaaacacccggcggguacugccugacgcgguggaugcugauugaggcugagcucaaguguuuuggaaacaccgccguggcuaaaugcaaugaaaagcaugacgaggaguucugcgauaugcugcgccuuuuugacuucaacaaacaggccaucagacggcugaagacagaagcgcagauguccauccagcucauuaauaaagccgucaacgcucugaucaaugaucaacuuauuaugaagaaccaucugcgcgacaucauguguauuccuuauugcaauuacagcaaguauugguaccucaaccacaccgugacaggcaaaaccucucugcccagauguuggcugguguccaaugggagcuaccucaacgaaacgcacuucucugacgauaucgagcagcaggccgacaauaugaucacagagcugcuucaaaaggaauauauugaucggcagggaaaaaccccucugggccucgucgaccuguuuguuuucagcaccuccuuuuaccugaucucuauuuuccuucaccucgugaagaucccgacacaucgccacauuaccgggaaacccugcccuaagccccauagacugaaccacaugggaaucuguagcugcggccuguauaaacacccuggcgugcccgucaaguggaagcggugaggacuaguaauaaggaaacuguaugaaugucugugggcaggaagugaagagauccuucuguaaagguuuuuggaauuaugucugcugaauaauaaacuuuuuugaaauaauaaaucugguagaaaaaugagaucucaaaggcucuuuucagagccaccaaaaaaaaaaaaaaaaaaaaaaaaaaaaaaaaaaaaaaaaaaaaaaaaaaaaaaaaaaaaaaaaagaauu

SEQ ID NO: 35856 - RNA, 1778 nt, Artificial Sequence
  mRNA product Design b-4 (hSL-A64-N5) comprising derived and/or modified sequence from LASV(Lassa virus/H.sapiens-wt/NGA/2016/ISTH_0009;Clade II)__AVO03571__GPCmut9 (opt5)
aggagagucccgcagucggcguccagcggcucugcuuguucgugugugugucguugcaggccuuauucaagcuuaccaugggccagaucauuaccuucuuucaagaggugccccacgucaucgaagagguuaugaacauugugcugaucgcccucagccugcuugcuauucugaaggggaucuacaauguggccacaugcggacuccugggccuugucuccuuccugcuccugugugggagaucuugcagcacgaccuauaaaggaguguacgaacugcagacacucgagcuggacauggcgucccuuaacaugaccaugccucugucuuguacaaagaauaacagccaucacuauaucaugguuggcaaugaaaccgggcucgagcugacacuuaccaacacguccauuaucaaucauaaauuuugcaaccugucugaugcucacaagaaaaaucucuacgaccaugcccugaugagcauuaucuccaccuuccaccugagcauuccgaacuuuaaucaguaugaggccaugucuugugauuucaacggaggccggaucuccgugcaguacaaucucagccacucuuaugcugucgacgccgcuaaccauugcggcacaauugccaauggggugcugcaaaccuuuaugcgcauggcguggggaggcuccuacaucgcccuugauagcggguguggaucuugggacugcaucaugacauccuaccaguaucugauuauccagaacaccacgugggaagaucacugucaguucagcagacccuccccuauuggcuaccucgggcugcuuucucaacggacacgcgacaucuauauuagcagacggcugcucggaaccuuuacauggacccuguccgauagcgagggcaacgaaacccccggcggguacugccugacacgcuggaugcucaucgaggcugagcugaaguguuucggaaauacggccguugcuaagugcaacgaaaaacaugacgaggaauuuugcgauaugcuuagacuguucgacuuuaauaagcaggccauccggcgccucaaaaccgaggcgcagaugucuauucagcugaucaacaaggccgugaaugcucuuauuaacgaucaacugaucaugaaaaaucaccucagagacauuauguguaucccuuauugcaacuacuccaaguauugguaccugaaucacacagucaccggcaagacaagccugccccgguguuggcucgugucuaacgggagcuaccugaaugaaacccauuucuccgacgauaucgagcagcaggccgacaacaugauuacggagcuucugcaaaaagaauauaucgaucgccagggaaagacaccucucggccugguggaccuguucgucuuuucuaccagcuucuaccuuauuuccaucuuucuccaccugguuaaaauuccgacccauagacacaucacagggaagcccugcccuaaaccccaucggcugaaucacaugggaauuuguagcugcggccucuauaaccacccuggcgugcccgugaaguggaaacgcugaggacuaguaauaaggaaacuguaugaaugucugugggcaggaagugaagagauccuucuguaaagguuuuuggaauuaugucugcugaauaauaaacuuuuuugaaauaauaaaucugguagaaaaaugagaucucaaaggcucuuuucagagccaccaaaaaaaaaaaaaaaaaaaaaaaaaaaaaaaaaaaaaaaaaaaaaaaaaaaaaaaaaaaaaaaaagaauu

SEQ ID NO: 35857 - RNA, 1778 nt, Artificial Sequence
  mRNA product Design b-4 (hSL-A64-N5) comprising derived and/or modified sequence from LASV(Lassa virus/H.sapiens-wt/NGA/2016/ISTH_0017;Clade II)__AVO03567__GPCmut9 (opt5)
aggagagucccgcagucggcguccagcggcucugcuuguucgugugugugucguugcaggccuuauucaagcuuaccaugggccagaucauuaccuucuuucaagaggugccccacgucaucgaagagguuaugaacauugugcugaucgcccucagccugcuugcuauucugaaggggaucuacaauguggccacaugcggacucuucggccuggucuccuuucuucugcucugugggagaucuugcagcacgaccuauaaaggaguguacgaacugcagacacuggagcucgacauggcgucccugaacaugaccaugccucuuucuuguacaaagaauaacagccaucacuauaucaugguuggcaaugaaaccgggcuggagcucacacugaccaacacguccauuaucaaucauaaauucugcaaccuuucugaugcucacaagaaaaaucuguacgaccaugcccucaugagcauuaucuccaccuuucaccugagcauuccgaacuucaaucaguaugaggccaugucuugugauuuuaacggaggcaagaucuccgugcaguacaaucugagccacacauaugcuauugacgccgcuaaccauugcggcaccaucgccaaugggguccuccaaacauucaugcggauggcguggggaggcucuuacaucgcccuggauuccggguguggaagcugggacugcauuaugaccucuuaccaguaucuuaucauucagaacacgacaugggaagaucacugucaguuuucccgccccagcccuaucggcuaccuggggcuccugucccaaagaacccgggacauuuauaucucucgcagacuucugggaacauucaccuggacccucagcgauuccgagggcaacgaaacacccggcggguacugccugacgcgguggaugcugaucgaggcugagcucaaguguuuuggaaauaccgccguggcuaaaugcaacgaaaagcaugacgaggaguucugcgauaugcugcgccuuuuugacuucaauaaacaggccauuagacggcugaagacagaagcgcagaugagcauccagcucauuaacaaagccguuaaugcucugaucaacgaucaacuuauuaugaagaaucaucugcgcgacaucauguguaucccuuauugcaacuacucuaaguauugguaccucaaucacaccgugacaggcaaaaccucccugcccagauguuggcuggucagcaacgggucuuaccucaaugaaacgcacuucagcgacgauauugagcagcaggccgacaacaugaucacagagcugcuucaaaaggaauauauggaucggcagggaaaaaccccucugggccucguggaccuguuuguguucuccaccucuuuuuaccugauuagcaucuuccuucaccucguccgcauuccgacacauagacacguuaucgggaagcccugcccuaaaccccaucggcugaaucacaugggaauuuguuccugcggccuguauaagcacccuggcgugcccgugaaauggaagcgcugaggacuaguaauaaggaaacuguaugaaugucugugggcaggaagugaagagauccuucuguaaagguuuuuggaauuaugucugcugaauaauaaacuuuuuugaaauaauaaaucugguagaaaaaugagaucucaaaggcucuuuucagagccaccaaaaaaaaaaaaaaaaaaaaaaaaaaaaaaaaaaaaaaaaaaaaaaaaaaaaaaaaaaaaaaaaagaauu

SEQ ID NO: 35858 - RNA, 1778 nt, Artificial Sequence
  mRNA product Design b-4 (hSL-A64-N5) comprising derived and/or modified sequence from LASV(Lassa virus/H.sapiens-wt/NGA/2018/ISTH_0959;Clade II)__AVV65099__GPCmut9 (opt5)
aggagagucccgcagucggcguccagcggcucugcuuguucgugugugugucguugcaggccuuauucaagcuuaccaugggccagaucauuaccuucuuucaagaggugccccacgucaucgaagagguuaugaacauugugcugaucgcccucagccugcuugcuauucugaaggggaucuacaauguggucacaugcggacucuucggccugguguccuuucuucugcucugugggagaucuugcagcacgaccuauaaaggaguuuacgaacugcagacacuggagcucgacauggccucccugaacaugaccaugccucuuucuuguacaaagaauaacagccaucacuauaucauggugggcaaugaaaccgggcuggagcucacacugaccaacacguccauuaucaaucauaaauucugcaaccuuucugaugcgcacaagaaaaaucuguacgaccaugcucucaugagcauuaucuccaccuuucaccugagcauuccgaacuucaaucaguaugaggccaugucuugugauuuuaacggaggcaagaucuccguccaguacaaucugagccacgccuaugcuauugacgccgcuaaccauugcggcacaaucgccaauggggugcuccaaaccuucaugcggauggcguggggaggcucuuacaucgcccuggauuccggguguggaagcugggacugcauuaugacaucuuaccaguaucuuaucauucagaacaccacgugggaagaucacugucaguuuucccgccccagcccuaucggcuaccuggggcuccugucccaaagaacacgggacauuuauaucucucgcagacuucugggaaccuucacauggacccucagcgauuccgagggcaacgaaacccccggcggguacugccugacacgguggaugcugaucgaggcugagcucaaguguuuuggaaauacggccguugcuaaaugcaacgaaaagcaugacgaggaguucugcgauaugcugcgccuuuuugacuucaauaaacaggccauuagacggcugaagaccgaagcgcagaugagcauccagcucauuaacaaagccgugaaugcucugaucaacgaucaacuuauuaugaagaaucaucugcgcgacaucauguguaucccuuauugcaacuacucuaaguauugguaccucaaucacacagucaccggcaaaacaucccugcccagauguuggcuggugagcaacgggucuuaccucaaugaaacccacuucagcgacgauauugagcagcaggccgacaacaugaucacggagcugcuucaaaaggaauauauugaucggcagggaaaaacaccucugggccucguggaccuguuugucuucuccaccucuuuuuaccugaucagcauuuuccuucaccucguuaagaucccgacccaucgccacgugauugggaaacccugcccuaagccccauagacugaaucacaugggaaucuguuccugcggccuguauaaacacccuggcgugcccgucaaguggaagcggugaggacuaguaauaaggaaacuguaugaaugucugugggcaggaagugaagagauccuucuguaaagguuuuuggaauuaugucugcugaauaauaaacuuuuuugaaauaauaaaucugguagaaaaaugagaucucaaaggcucuuuucagagccaccaaaaaaaaaaaaaaaaaaaaaaaaaaaaaaaaaaaaaaaaaaaaaaaaaaaaaaaaaaaaaaaaagaauu

SEQ ID NO: 35859 - RNA, 1778 nt, Artificial Sequence
  mRNA product Design b-4 (hSL-A64-N5) comprising derived and/or modified sequence from LASV(LASV003-NIG-2008;Clade II)__AIT17580__GPCmut9 (opt5)
aggagagucccgcagucggcguccagcggcucugcuuguucgugugugugucguugcaggccuuauucaagcuuaccaugggccagaucauuaccuucuuucaagaggugccccacgucaucgaagagguuaugaacauugugcugaucgcccucagccugcuugcuauucugaaggggaucuacaauguggccacaugcggacucuucggccuggucuccuuucuucugcucugugggagaucuugcagcacgaccuauaaaggaguguacgaacugcagacacuggagcucgacauggcgucccugaacaugaccaugccucuuucuuguacaaagaauaacagccaucacuauaucaugguuggcaaugaaaccgggcuggagcucacacugaccaacacguccauuaucaaucauaaauucugcaaccuuucugaugcucacaagaaaaaucuguacgaccaugcccucaugagcauuaucuccaccuuucaccugagcauuccgaacuucaaucaguaugaggccaugucuugugauuuuaacggaggcaagaucuccgugcaguacaaucugagccacacauaugcugucgacgccgcuaaccauugcggcaccauugccaauggggugcuccaaacauucaugcggauggcguggggaggcucuuacaucgcccuggauuccggguguggaagcugggacugcaucaugaccucuuaccaguaucuuauuauccagaacacgacaugggaagaucacugucaguuuucccgccccagcccuauuggcuaccuggggcuccugucccaaagaacccgggacaucuauauuucucgcagacuucugggaacauucaccuggacccucagcgauuccgagagcaacgaaacacccggcggcuacugccugacgcgguggaugcugaucgaggcugagcucaaguguuuugggaauaccgccguugcuaaaugcaacgaaaagcaugacgaggaguucugcgauaugcugcgccuuuuugacuucaauaaacaggccaucagacggcugaaggcggaagcccagaugucuauucagcucaucaacaaagcugugaaugcccugauuaacgaucaacuuaucaugaagaaucaucugcgcgacauuauguguaucccuuauugcaacuacuccaaguauugguaccucaaucacacagucaccggaagaacaagccugccccgguguuggcuggugucuaacggcagcuaccucaaugaaacccacuucuccgacgauaucgagcagcaggcugacaacaugauuacggagcugcuucaaaaagaauauauggaucgccaggggaagacaccucugggacucguggaccuguuugucuucucuaccagcuuuuaccugaucuccauuuuccuucaccucguuaaaaucccgacccauagacacgugauuggcaagcccugcccuaaaccccaucggcugaaucacauggggaucuguagcugcggacuguauaagcacccuggcgugcccgucaaauggaagcgcugaggacuaguaauaaggaaacuguaugaaugucugugggcaggaagugaagagauccuucuguaaagguuuuuggaauuaugucugcugaauaauaaacuuuuuugaaauaauaaaucugguagaaaaaugagaucucaaaggcucuuuucagagccaccaaaaaaaaaaaaaaaaaaaaaaaaaaaaaaaaaaaaaaaaaaaaaaaaaaaaaaaaaaaaaaaaagaauu

SEQ ID NO: 35860 - RNA, 1778 nt, Artificial Sequence
  mRNA product Design b-4 (hSL-A64-N5) comprising derived and/or modified sequence from LASV(LASV035-NIG-2009;Clade II)__AIT17588__GPCmut9 (opt5)
aggagagucccgcagucggcguccagcggcucugcuuguucgugugugugucguugcaggccuuauucaagcuuaccaugggccagaucauuaccuucuuucaagaggugccccacgucaucgaagagguuaugaacauugugcugaucgcccucagccugcuugcuauucugaaggggaucuacaauguggccacaugcggacucuucggccuggucuccuuucuucugcucugugggagaucuugcagcacgaccuauaaaggaguguacgaacugcagacacuggagcucgacauggcgucccugaacaugaccaugccucuuucuuguacaaagaauaacagccaucacuauaucaugguuggcaaugaaaccgggcuggagcucacacugaccaacacguccauuaucaaucauaaauucugcaaccuuucugaugcucacaagaaaaaucuguacgaccaugcccucaugagcauuaucuccaccuuucaccugagcauuccgaacuucaaucaguaugaggccaugucuugugauuuuaacggaggcaagaucuccgugcaguacaaucugagccacgcuuaugccgucgacgcugccaaccauugcggcacaauugcgaauggggugcuccaaaccuucaugcggauggccuggggaggcucuuacaucgcucuggauuccggguguggaagcugggacugcaucaugacaucuuaccaguaucuuauuauccagaacaccacgugggaagaucacugucaguuuucccgccccagcccuauuggcuaccuggggcuccugucccaaagaacacgggacaucuauauuucucgcagacuucugggaaccuucacauggacccucagcgauuccgagggcaacgaaacccccggcggguacugccugacacgguggaugcugaucgaggccgagcucaaguguuuuggaaauacggcuguugccaaaugcaacgaaaagcaugacgaggaguucugcgauaugcugcgccuuuuugacuucaauaaacaggcgaucagacggcugaaggccgaagcucagaugagcauucagcucaucaacaaagccgugaaugcucugauuaacgaucaacuuaucaugaagaaucaucugcgcgacauuauguguaucccuuauugcaacuacucuaaguauugguaccucaaucacaccgucacaggcaaaaccucccugcccagauguuggcuggugagcaacgggucuuaccucaaugaaacacacuucagcgacgauaucgagcagcaggccgacaacaugauuaccgagcugcuucaaaaggaauauaucgaucggcagggaaaaacgccucugggccucguggaccuguuugucuucuccacaucuuuuuaccugauuagcaucuuccuucaccucguuaagauuccgacccaucgccacgugaucgggaaacccugcccuaagccccauagacugaaucacaugggaauuuguuccugcggccuguauaaacacccuggcgugcccgucaaguggaagcggugaggacuaguaauaaggaaacuguaugaaugucugugggcaggaagugaagagauccuucuguaaagguuuuuggaauuaugucugcugaauaauaaacuuuuuugaaauaauaaaucugguagaaaaaugagaucucaaaggcucuuuucagagccaccaaaaaaaaaaaaaaaaaaaaaaaaaaaaaaaaaaaaaaaaaaaaaaaaaaaaaaaaaaaaaaaaagaauu

SEQ ID NO: 35861 - RNA, 1778 nt, Artificial Sequence
  mRNA product Design b-4 (hSL-A64-N5) comprising derived and/or modified sequence from LASV(LASV1000-NIG-2009;Clade II)__AIT17782__GPCmut9 (opt5)
aggagagucccgcagucggcguccagcggcucugcuuguucgugugugugucguugcaggccuuauucaagcuuaccaugggccagaucauuaccuucuuucaagaggugccccacgucaucgaagagguuaugaacauugugcugaucgcccucagccugcuugcuauucugaaggggaucuacaauguggccacaugcggacucuucggccuggucuccuuucuucugcucugugggagaucuugcagcacgaccuauaaaggaguguacgaacugcagacacuggagcucgacauggcgucccugaacaugaccaugccucuuucuuguacaaagaauaacagccaucacuauaucaugguuggcaaugaaaccgggcuggagcucacacugaccaacacguccauuaucaaucauaaauucugcaaccuuucugaugcucacaagaaaaaucuguacgaccaugcccucaugagcauuaucuccaccuuucaccugagcauuccgaacuucaaucaguaugaggccaugucuugugauuuuaacggaggcaagaucuccgugcaguacaaucugagccacacauaugcugucgacgccgcuaaccauugcggcaccauugccaauggggugcuccaaacauucaugcggauggcguggggaggcucuuacaucgcccuggauuccggguguggaagcugggacugcaucaugaccucuuaccaguaucuuauuauccagaacacgacaugggaagaucacugucaguuuucccgccccagcccuauuggcuaccuggggcuccugucccaaagaacccgggacaucuauauuucucgcagacuucugggaacauucaccuggacccucagcgauuccgagggcaacgaaacacccggcggguacugccugacgcgguggaugcugaucgaggcugagcucaaguguuuuggaaauaccgccguugcuaaaugcaacgaaaagcaugacgaggaguucugcgauaugcugcgccuuuuugacuucaauaaacaggccaucaagagacugaaaacagaagcgcagaugagcauucagcucaucaacaaggccgugaaugcucugauuaacgaucaacuuaucaugaagaaucaucugcgggacauuauguguaucccuuauugcaacuacucuaaauauugguaccucaaucacaccgucacaggcaagaccucccugccccgcuguuggcuggugagcaacgggucuuaccucaaugaaacgcacuucagcgacgauaucgagcagcaggccgacaacaugauuacagagcugcuucaaaaagaauauaucgauagacagggaaagaccccucugggccucguggaccuguuugucuucuccaccucuuuuuaccugauuagcaucuuccuucaccucguuaaaauuccgacacaucggcacgugguggggaagcccugcccuaaaccccaucgccugaaucacaugggaaucuguuccugcggccuguauaagcacccuggcguccccgugaaguggaaaagaugaggacuaguaauaaggaaacuguaugaaugucugugggcaggaagugaagagauccuucuguaaagguuuuuggaauuaugucugcugaauaauaaacuuuuuugaaauaauaaaucugguagaaaaaugagaucucaaaggcucuuuucagagccaccaaaaaaaaaaaaaaaaaaaaaaaaaaaaaaaaaaaaaaaaaaaaaaaaaaaaaaaaaaaaaaaaagaauu

SEQ ID NO: 35862 - RNA, 1778 nt, Artificial Sequence
  mRNA product Design b-4 (hSL-A64-N5) comprising derived and/or modified sequence from LASV(LASV221-NIG-2010;Clade II)__AIT17624__GPCmut9 (opt5)
aggagagucccgcagucggcguccagcggcucugcuuguucgugugugugucguugcaggccuuauucaagcuuaccaugggccagaucauuaccuucuuucaagaggugccccacgucaucgaagagguuaugaacauugugcugaucgcccucagccugcuugcuauucugaaggggaucuacaauguggccacaugcggacucuucggccuggucuccuuucuucugcucugugggagaucuugcagcacgaccuauaaaggaguguacgaacugcagacacuggagcucgacauggcgucccugaacaugaccaugccucuuucuuguacaaagaauaacagccaucacuauaucaugguuggcaaugaaaccgggcuggagcucacacugaccaacacguccauuaucaaucauaaauucugcaaccuuucugaugcucacaagaaaaaucuguacgaccaugcccucaugagcauuaucuccaccuuucaccugagcauuccgaacuucaaucaguaugaggccaugucuugugauuuuaacggaggcaagaucuccgugcaguacaaucugagccacacauaugcuauugacgccgcuaaccauugcggcaccaucgccaaugggguccuccaaacauucaugcggauggcguggggaggcucuuacaucgcccuggauuccggguguggaagcugggacugcauuaugaccucuuaccaguaucuuaucauucagaacacgacaugggaagaucacugucaguuuucccgccccagcccuaucggcuaccuggggcuccugucccaaagaacccgggacauuuauaucucucgcagacuucugggaacauucaccuggacccucagcgauuccgagggcaacgaaacacccggcggguacugccugacgcgguggaugcugaucgaggcugagcucaaguguuuuggaaauaccgccguggcuaaaugcaacgaaaagcaugacgaggaguucugcgauaugcugcgccuuuuugacuucaauaaacaggccauuagacggcugaagacagaagcgcagaugagcauccagcucauuaacaaagccguuaaugcucugaucaacgaucaacuuauuaugaagaaucaucugcgcgacaucauguguaucccuuauugcaacuacucuaaguauugguaccucaaucacaccgugacaggcaaaaccucccugcccagauguuggcuggucagcaacgggucuuaccucaaugaaacgcacuucagcgacgauauugagcagcaggccgacaacaugaucacagagaugcugcaaaaggaauauauggaucggcagggaaaaaccccucuuggccugguggaccucuuuguguucuccaccucuuuuuaccugauuagcaucuuccugcaccuugucaagauuccgacacaucgccacguuaucgggaaacccugcccuaagccccauagacucaaucacaugggaauuuguuccugcggccuguauaaacacccuggcgugcccgugaaguggaagcggugaggacuaguaauaaggaaacuguaugaaugucugugggcaggaagugaagagauccuucuguaaagguuuuuggaauuaugucugcugaauaauaaacuuuuuugaaauaauaaaucugguagaaaaaugagaucucaaaggcucuuuucagagccaccaaaaaaaaaaaaaaaaaaaaaaaaaaaaaaaaaaaaaaaaaaaaaaaaaaaaaaaaaaaaaaaaagaauu

SEQ ID NO: 35863 - RNA, 1778 nt, Artificial Sequence
  mRNA product Design b-4 (hSL-A64-N5) comprising derived and/or modified sequence from LASV(LASV237-NIG-2010;Clade II)__AIT17638__GPCmut9 (opt5)
aggagagucccgcagucggcguccagcggcucugcuuguucgugugugugucguugcaggccuuauucaagcuuaccaugggccagaucauuaccuucuuucaagaggugccccacgucaucgaagagguuaugaacauugugcugaucgcccucagccugcuugcuauucugaaggggaucuacaauguggccacaugcggacucuucggccuggucuccuuucuucugcucugugggagaucuugcagcacgaccuauaaaggaguguacgaacugcagacacuggagcucgacauggcgucccugaacaugaccaugccucuuucuuguacaaagaauaacagccaucacuauaucaugguuggcaaugaaaccgggcuggagcucacacugaccaacacguccauuaucaaucauaaauucugcaaccuuucugaugcucacaagaaagaccuguacgaucaugcccucaugagcauuaucuccaccuuucaccugagcauuccgaauuucaaccaguaugaggccaugucuugugacuuuaauggaggcaagaucuccgugcaguacaaccugagccacacauaugcugucgaugccgcuaaucauugcggcaccauugccaacggggugcuccaaacauucaugcggauggcguggggaggcucuuacaucgcccuggacuccggguguggaagcugggauugcaucaugaccucuuaccaguaucuuauuauccagaauacgacaugggaagaccacugucaguuuucccgccccagcccuauuggcuaccuggggcuccugucccaaagaacccgggauaucuauauuucucgcagacuucugggaacauucaccuggacccucagcgacuccgagggcaacgaaacacccggcggguacugccugacgcgguggaugcugaucgaggcugagcucaaguguuuuggaaacaccgccguugcuaaaugcaaugaaaagcaugaugaggaguucugcgacaugcugcgccuuuuugauuucaacaaacaggccaucagacggcugaagacagaagcgcagaugagcauucagcucaucaauaaagccgugaacgcucugauuaaugaccaacuuaucaugaagaaccaucugcgcgacauuauguguaucccuuauugcaauuacucuaaguauugguaccucaaccacaccgucacaggcaaaaccucccugcccagauguuggcuggugagcaaugggucuuaccucaacgaaacgcacuucagcgaugacaucgagcagcaggccgauaauaugauuacagagcugcuucaaaaggaauauauggaccggcagggaaaaaccccucugggccucguggaucuguuugucuucuccaccucuuuuuaccugaucagcauuuuccuucaccucaucaagauuccgacacaucgccacaucaccgggaaacccugcccuaagccccauagacugaaccacaugggaauuuguuccugcggccuguauaaacacccuggcguucccgugaaguggaagcggugaggacuaguaauaaggaaacuguaugaaugucugugggcaggaagugaagagauccuucuguaaagguuuuuggaauuaugucugcugaauaauaaacuuuuuugaaauaauaaaucugguagaaaaaugagaucucaaaggcucuuuucagagccaccaaaaaaaaaaaaaaaaaaaaaaaaaaaaaaaaaaaaaaaaaaaaaaaaaaaaaaaaaaaaaaaaagaauu

SEQ ID NO: 35864 - RNA, 1778 nt, Artificial Sequence
  mRNA product Design b-4 (hSL-A64-N5) comprising derived and/or modified sequence from LASV(LASV253-NIG-2011;Clade II)__AIT17670__GPCmut9 (opt5)
aggagagucccgcagucggcguccagcggcucugcuuguucgugugugugucguugcaggccuuauucaagcuuaccaugggccagaucauuaccuucuuucaagaggugccccacgucaucgaagagguuaugaacauugugcugaucgcccucagccugcuugcuauucugaaggggaucuacaauguggccacaugcggacucuucggccuggucuccuuucuucugcucugugggagaucuugcagcacgaccuauaaaggaguguacgaacugcagacacuggagcucgacauggcgucccugaacaugaccaugccucuuucuuguacaaagaauaacagccaucacuauaucaugguuggcaaugaaaccgggcuggagcucacacugaccaacacguccauuaucaaucauaaauucugcaaccuuucugaugcucacaagaaaaaucuguacgaccaugcccucaugagcauuaucuccaccuuucaccugagcauuccgaacuucaaucaguaugaggccaugucuugugauuuuaacggaggcaagaucuccgugcaguacaaucugagccacacauaugcugucgacgccgcuaaccauugcggcaccauugccaauggggugcuccaaacauucaugcggauggcguggggaggcucuuacaucgcccuggauuccggguguggaagcugggacugcaucaugaccucuuaccaguaucuuauuauccagaacacgacaugggaagaucacugucaguuuucccgccccagcccuauuggcuaccuggggcuccugucccaaagaacccgggacaucuauauuucucgcagacuucugggaacauucaccuggacccucagcgauuccgagggcaacgaaacacccggcggguacugccugacgcgguggaugcugaucgaggcugagcucaaguguuuuggaaauaccgccguugcuaaaugcaacgaaaagcaugacgaggaguucugcgauaugcugcgccuuuuugacuucaauaaacaggccaucagacggcugaaggcggaagcccagaugagcauucagcucaucaacaaagcugugaaugcccugauuaacgaucaacuuaucaugaagaaucaucugcgcgacauuauguguaucccuuauugcaacuacucuaaguauugguaccucaaucacacagucaccggcagaacaucccugccccgguguuggcuggugagcaacgggucuuaccucaaugaaacccacuucagcgacgauaucgagcagcaggcugacaacaugauuacggagcugcuucaaaaagaauauaucgaucgccagggaaagacaccucugggccucguggaccuguuugucuucuccaccucuuuuuaccugauuagcaucuuccuucaccucguuaaaauuccgacccauagacacaucauugggaagcccugcccuaaaccccaucggcugaaucacaugggaaucuguuccugcggccuguauaagcacccuggcgugcccgugaaauggaagcgcugaggacuaguaauaaggaaacuguaugaaugucugugggcaggaagugaagagauccuucuguaaagguuuuuggaauuaugucugcugaauaauaaacuuuuuugaaauaauaaaucugguagaaaaaugagaucucaaaggcucuuuucagagccaccaaaaaaaaaaaaaaaaaaaaaaaaaaaaaaaaaaaaaaaaaaaaaaaaaaaaaaaaaaaaaaaaagaauu

SEQ ID NO: 35865 - RNA, 1778 nt, Artificial Sequence
  mRNA product Design b-4 (hSL-A64-N5) comprising derived and/or modified sequence from LASV(LASV254-NIG-2011;Clade II)__AIT17674__GPCmut9 (opt5)
aggagagucccgcagucggcguccagcggcucugcuuguucgugugugugucguugcaggccuuauucaagcuuaccaugggccagaucauuaccuucuuucaagaggugccccacgucaucgaagagguuaugaacauugugcugaucgcccucagccugcuugcuauucugaaggggaucuacaauguggccacaugcggacucuucggccuggucuccuuucuucugcucugugggagaucuugcagcacgaccuauaaaggaguguacgaacugcagacacuggagcucgacaugaccaaccugaauaugacaaugccucuuuccuguaccaagaacaauucucaucacuauaucaugguuggcaacgaaacagggcuggagcucacccugacgaauaccagcauuaucaaccauaaauucugcaaucuuuccgaugcgcacaagaaaaaccuguacaaucaugcucucaugucuauuaucagcacauuucaccuguccauuccgaacuucaaucaguaugaggccaugagcugugacuuuaacggaggcaagaucucugugcaguacaaucugucccacagcuaugccgucgaugcugccaaccauugcggcaccauugcuaacggggugcuccaaacauucaugcggauggccuggggaggcucuuacaucgcgcuggacuccggguguggaaauugggauugcaucaugaccagcuaccaguaucuuauuauccagaacacgacaugggaagaccacugucaguuuucucgccccuccccuauuggcuaccuggggcuccugagccaaagaacccgggauaucuauauuucccgcagacuucugggaacauucaccuggacccucucugacagcgagggcaaugaaacacccggcggguacugccugacgcgguggaugcugaucgaggccgagcucaaguguuuuggaaacaccgcuguugccaaaugcaaugaaaagcaugaugaggaguucugcgacaugcugcgccuuuuugauuucaacaaacaggcuaucagacggcugaagacagaagcccaggcgaauauucagcucaucaacaaagccgugaaugcucugauuaacgaccaacuuaucaugaagaaucaucugcgcgauauuauguguaucccuuauugcaacuacuccaaguauugguaccucaaucacaccgucacaggcaaaaccagccugcccagauguuggcuggugucuaacggguccuaccucaaugaaacgcacuucagcgacgacaucgagcagcaggccgauaacaugauuacagagcugcuucaaaaggaauauauggaccggcagggaaaaaccccucugggccucguggaucuguuugucuucucuaccagcuuuuaccugaucuccauuuuccuucaccucguuaagaucccgacacaucgccacgugauugggaaacccugcccuaagccccauagacugaaccacaugggaaucuguucuugcggccuguauaaacacccuggcgugcccgucaaguggaagcggugaggacuaguaauaaggaaacuguaugaaugucugugggcaggaagugaagagauccuucuguaaagguuuuuggaauuaugucugcugaauaauaaacuuuuuugaaauaauaaaucugguagaaaaaugagaucucaaaggcucuuuucagagccaccaaaaaaaaaaaaaaaaaaaaaaaaaaaaaaaaaaaaaaaaaaaaaaaaaaaaaaaaaaaaaaaaagaauu

SEQ ID NO: 35866 - RNA, 1778 nt, Artificial Sequence
  mRNA product Design b-4 (hSL-A64-N5) comprising derived and/or modified sequence from LASV(Nig08-A19;Clade III)__ADU56618__GPCmut9 (opt5)
aggagagucccgcagucggcguccagcggcucugcuuguucgugugugugucguugcaggccuuauucaagcuuaccaugggccagaucgugaccuucuuucaagaggucccccacguuauugaagaggugaugaacaucgugcugauugcccucagcauccuggcuauucuuaaggggcuguacaauaucgccacaugcggacucaucggccuggucacguuccuucugcucuccgggagaucuuguagcaugaccuauaaaggaguguacgaacugcagacacuggagcucaacaugaauacccugaacaugacaaugccucuuuccugcaccaagaauaacucucaucacuauauuaugguuggcaaugaaacagggcuggagcucacccugacgaacaccagccuucugcaucacaaauuuuguaaucucuccgacgcgcauaagaaaaaccuguacgaucacacacugaugucuaucauuagcaccuuccaccucuccaucccgaauuuuaaccaguaugaggcuaugagcugcgacuucaauggaggcaagauuacagugcaguacaaccugucucauuccuaugccaucgaugccgcuaaucacuguggcaccgucgccaacggggugcuucaaacguuuaugcggauggcuuggggaggcagcuacauugcccuggacucugggugcggaaagugggauuguaucaugacauccuaccaguaucucaucauucagaacaccacaugggaagaccauugccaguucagccgccccucuccuaucggcuaccuggggcuucugucccaaagaacccgggauauuuauaucagccgcagacuccugggaaccuuuacauggacgcuguccgacucugagggcaaugaaacccccggcggguacugucucacacgguggaugcugauugaggcggagcuuaaaugcuucggaaacaccgccguugcuaaguguaaugaaaaacacgaugaggaauuuugcgacaugcugcgccucuucgauuuuaacaagcaggccaucagacggcugaaagcugaggcccagaugagcauccagcuuauuaauaaggcggugaacgcccugaucaaugaccaacucauuaugaagaaccaucugcgcgauaucaugugcauuccuuauuguaauuacuccaaauauugguaccugaaccacacaagcaccggcagaacgucucucccccggugcuggcuggucuccaaugggagcuaccuuaacgaaacacacuucucugacgacaucgagcagcaggcugauaauaugaucaccgagaugcugcaaaaggaauaucucgaccgccagggaaaaaccccucugggccugguggaucuuuucguguuuagcacauccuucuaccucauuucuaucuuucugcaucuggucaagauuccgacccacagacauaucguugggaaacccuguccuaagccccaccggcucaaccacaugggaauuugcagcuguggccuguauaaacagccuggcgugcccgugcgcuggaagagaugaggacuaguaauaaggaaacuguaugaaugucugugggcaggaagugaagagauccuucuguaaagguuuuuggaauuaugucugcugaauaauaaacuuuuuugaaauaauaaaucugguagaaaaaugagaucucaaaggcucuuuucagagccaccaaaaaaaaaaaaaaaaaaaaaaaaaaaaaaaaaaaaaaaaaaaaaaaaaaaaaaaaaaaaaaaaagaauu

SEQ ID NO: 35867 - RNA, 1781 nt, Artificial Sequence
  mRNA product Design b-4 (hSL-A64-N5) comprising derived and/or modified sequence from LASV(G1180-SLE-2010;Clade IV)__AIT17168__GPCmut9 (opt5)
aggagagucccgcagucggcguccagcggcucugcuuguucgugugugugucguugcaggccuuauucaagcuuaccaugggccagaucgugaccuucuuucaagaggucccccacguuauugaagaggugaugaacaucgugcugauugcccucagcauccuggcuguccuuaaggggcuguacaauuucgccacaugcggacucgugggccugcuuacguuucugcuccugugugggagauccugcaccgcgucucgguauaaaggaguuuacgaacugcagacacucgagcugaacauggaaacccuuaauaugacaaugccucugagcuguaccaagaacaauucccaucacuauauuauggugggcaacgagacagggcucgagcugacccuuacgaauaccucuaucaucaaccauaaauucugcaaucugagcgacgcucacaagaaaaaccucuacgaucaugcccugauguccauuaucucuacauuucaccugagcauuccgaauuucaaccaguaugaagccauguccugugacuuuaauggaggcaagaucagcguccaguacaaccucucucacuccuaugcuggcgaugccgcuaaucauugcgggaccguggccaacggaguucugcaaacauucaugcgcauggcguggggcgggagcuacauugcccuugacucuggauguggcuccugggauugcaucaugaccagcuaccaguaucugauuauccagaacacgacaugggaggaccacugucaguuuucuagacccuccccuaucggguaccucggacugcuuagccaacggacccgcgauauuuauaucuccagacggcugcucggcacauucaccuggacccugucugacagcgaaggcaaggauacacccgggggauacugccugacgcgcuggaugcucauugaggcugagcugaaauguuuuggcaauaccgccguggcuaagugcaacgaaaaacaugacgaggaguucugcgauaugcuuagacuguuugacuucaauaagcaggccauccagcggcucaaagcggaagcccagauguccauucaacugaucaacaaggcugucaaugcccuuaucaacgaucagcugauuaugaagaaucaccuccgcgacaucauguguauuccuuauugcaacuacagcaaauauugguaccugaaucacacaaccacagggaagaccucucugcccaaauguuggcucguguccaacggaagcuaccugaaugaaacgcauuucucugacgauaucgagcagcaagcugacaacaugauuacagagaugcuucagaaggaauauauggagagacagggcaaaaccccucuggggcucguggaucuguuugucuucagcaccuccuuuuaccugaucucuaucuuccuucaccucguuaagauuccgacacaucggcacaucgugggaaaaagcugccccaagccucaucgccugaaucacaugggcauuuguuccugcggccuguauaagcagcccggggugccugucaaauggaagagaugaggacuaguaauaaggaaacuguaugaaugucugugggcaggaagugaagagauccuucuguaaagguuuuuggaauuaugucugcugaauaauaaacuuuuuugaaauaauaaaucugguagaaaaaugagaucucaaaggcucuuuucagagccaccaaaaaaaaaaaaaaaaaaaaaaaaaaaaaaaaaaaaaaaaaaaaaaaaaaaaaaaaaaaaaaaaagaauu

SEQ ID NO: 35868 - RNA, 1781 nt, Artificial Sequence
  mRNA product Design b-4 (hSL-A64-N5) comprising derived and/or modified sequence from LASV(G1442-SLE-2011;Clade IV)__AIT17180__GPCmut9 (opt5)
aggagagucccgcagucggcguccagcggcucugcuuguucgugugugugucguugcaggccuuauucaagcuuaccaugggccagaucgugaccuucuuucaagaggucccccacguuauugaagaggugaugaacaucgugcugauugcccucagcauccuggcuguccuuaaggggcuguacaauguggccacaugcggacucauuggccugguuacguuccuucugcucugugggagauccugcaccacaacccuguauaaaggaguguacgaacugcagacacucgagcugaacauggaaacccuuaauaugacaaugccucugucuuguaccaagaacaauagccaucacuauauccgggucggcaacgagacggggcucgagcugacccuuacaaauaccuccaucauuaaccauaaauuuugcaaucugucugacgcgcacaagaaaaaccucuacgaucaugcucugaugagcaucauuuccacauuccaccugucuaucccgaauuuuaaccaguaugaagccaugagcugugacuucaauggaggcaagauuuccgugcaguacaaccucagccacucuuaugccggcgaugcugccaaucauugcgggaccguugcuaacggagugcugcaaacguuuaugcgcauggccuggggcggguccuacaucgcgcuugacagcggauguggcaacugggauugcauuaugacaucuuaccaguaucugaucauccagaauaccacaugggacgaucacugucaguucuccagacccagcccuauuggguaccucggacugcuuucucaacggacccgcgacgucuauaucuccagacggcugcucggcaccuuuacauggacgcugagcgauuccgagggcaaggacacccccgggggauacugccugacacgcuggaugcucauugaagccgagcugaaauguuucggcaacaccgcuguggccaagugcaaugagaaacaugaugaagaguuuugcgacaugcuuagacuguucgauuuuaacaagcaggcuauccagcggcucaaagccgaagcgcagaugucuauucaacugaucaauaaggccgugaacgcucuuaucaaugaccagcugauuaugaagaaccaccuccgcgacaucauguguauuccuuauugcaauuacagcaaauauugguaccugaacaauacagccaccgggaagacgucccugcccaaauguuggcucaucagcaacggaucuuaccugaaugagacacacuucuccgaugacauugaacaggaggcugauaacaugaucaccgagaugcuucaaaaggaauauauggagagacagggcaaaaccccucuggggcucgucgaccuguucguuuuuagcacaucuuucuaccugaucagcauuuuucuucaucucgugaagaucccgacccaccggcauauugugggaaaauccugccccaagccucaccgccugaaucauaugggcaucuguucuugcggccuguauaagcagcccggggucccugugagauggaaacggugaggacuaguaauaaggaaacuguaugaaugucugugggcaggaagugaagagauccuucuguaaagguuuuuggaauuaugucugcugaauaauaaacuuuuuugaaauaauaaaucugguagaaaaaugagaucucaaaggcucuuuucagagccaccaaaaaaaaaaaaaaaaaaaaaaaaaaaaaaaaaaaaaaaaaaaaaaaaaaaaaaaaaaaaaaaaagaauu

SEQ ID NO: 35869 - RNA, 1781 nt, Artificial Sequence
  mRNA product Design b-4 (hSL-A64-N5) comprising derived and/or modified sequence from LASV(G3010-SLE-2013;Clade IV)__AIT17344__GPCmut9 (opt5)
aggagagucccgcagucggcguccagcggcucugcuuguucgugugugugucguugcaggccuuauucaagcuuaccaugggccagaucgugaccuucuuucaagaggucccccacguuauugaagaggugaugaacaucgugcugauugcccucagcauccuggcuguccuuaaggggcuguacaauuucgccacaugcggacucgugggccugguuacguuucuucugcucugugggagauccugcaccacaucucuguauaaaggaguguacgaacugcagacccucgagcugaacauggaaacacuuaauaugaccaugccucugagcuguacaaagaacaauucccaucacuauauuauggucggcaacgagaccgggcucgagcugacgcuuaccaauacaucuaucaucaaccauaaauucugcaaucugagcgacgcgcacaagaaaaaccucuacaaucaugcucugauguccauuaucucuaccuuucaccugagcauuccgaacuucaaucaguaugaagccauguccugugauuuuaacggaggcaagaucagcgugcaguacaaucucucucacuccuaugccggcgacgcugccagccauugcgggacaguugcuaacggagugcugcaaaccuucaugcggauggccuggggcgggucuuacauugcgcuugauuccggauguggcaagugggacugcaucaugacgagcuaccaguaucugauuauccagaacacaaccugggaggaucacugucaguuuucucgccccuccccuaucggguaccucggacugcuuagccaaagaacacgggacauuuauaucucccgcagacugcucggcaccuucaccuggacacugucugauagcgaaggcaaagacacgcccgggggauacugccugacccgguggaugcucauugaggccgagcugaaguguuuuggcaauacagcugucgccaaaugcaacgaaaagcaugaugaggaguucugcgacaugcuucgccuguuugauuucaauaaacaggcuauccagagacucaagaccgaagcccagauguccauucaacugaucaacaaggcggugaaugcccuuaucaacgaccagcugauuaugaaaaaucaccuccgggauaucauguguauuccuuauugcaacuacagcaaguauugguaccugaaucacacaaccacggggaaaacaucucugcccaaguguuggcucguguccaacggaagcuaccugaaugaaacccauuucucugacgacaucgagcagcaagcugauaacaugauuaccgagaugcuucagaaagaauauauggagcgccagggcaagacaccucuggggcucgucgaccuguuuguuuucagcaccuccuuuuaccugaucucuaucuuccuucaccucgugaaaauuccgacacauagacacaucgugggaaagagcugccccaagccucaucggcugaaucacaugggcauuuguuccugcggccuguauaaacagcccggggucccugugcgcuggaagagaugaggacuaguaauaaggaaacuguaugaaugucugugggcaggaagugaagagauccuucuguaaagguuuuuggaauuaugucugcugaauaauaaacuuuuuugaaauaauaaaucugguagaaaaaugagaucucaaaggcucuuuucagagccaccaaaaaaaaaaaaaaaaaaaaaaaaaaaaaaaaaaaaaaaaaaaaaaaaaaaaaaaaaaaaaaaaagaauu

SEQ ID NO: 35870 - RNA, 1781 nt, Artificial Sequence
  mRNA product Design b-4 (hSL-A64-N5) comprising derived and/or modified sequence from LASV(G502-SLE-2009;Clade IV)__AIT17126__GPCmut9 (opt5)
aggagagucccgcagucggcguccagcggcucugcuuguucgugugugugucguugcaggccuuauucaagcuuaccaugggccagaucgugaccuucuuucaagaggucccccacguuauugaagaggugaugaacaucgugcugauugcccucagcauccuggcuguccuuaaggggcuguacaauuucgccacaugcggacucgugggccugcuuacguuucugcuccugugugggagauccugcaccacaggacuguauaaaggcguuuacgaacuccagacccuggagcuuaacauggaaacacugaauaugaccaugccucucucuuguacaaagaacaauagccaucacuauauuaugguggggaacgagaccggacuggagcuuacgcugaccaauacauccaucaucaaccauaaauucugcaaucucucugacgcgcacaagaaaaaccuguacgaucaugcucugaugagcauuaucuccaccuuucaccucucuauuccgaauuucaaccaguaugaagccaugagcugugacuuuaauggcggcaagaucuccguccaguacaaccugagccacucuuaugccggggaugcugccgaccauugcggaacaguggcuaauggcguucuucaaaccuucaugcggauggccuggggaggguccuacauugcgcuggauagcggcugugggcgcugggacugcaucaugacgucuuaccaguaucucauuauccagaacacaaccugggaggaucacugucaguuuuccagacccagcccuaucggauaccugggccuucugucucaacggacacgcgacauuuauaucuccagacggcuccugggcaccuucaccuggacacugagcgauuccgaagggaaggacacgcccggaggcuacugccucacccgcuggaugcugauugaggccgagcuuaaauguuuugggaacacagcuguggccaagugcaaugaaaaacaugaugaggaguucugcgacaugcugagacucuuugauuucaacaagcaggcuauccagcggcugaaagccgaagcgcagaugucuauucaacuuaucaauaaggccgucaacgcucugaucaaugaccagcucgugaugaagaaccaucugcgcgacauuauguguaucccuuauugcaauuacagcagauauugguaccugaaccacaccacaaccggacggacgucccuccccaaauguuggcuggugagcaauggcucuuaccuuaacgaaacacacuucuccgaugacauugagcagcaagccgauaauaugaucaccgagaugcugcagaaggaauauauggagcgccaggggaaaaccccucucggacuggucgaccuguuuguuuucagcacaucuuuuuaccuuauuagcaucuuccuccaccuggugaagaucccgacccauagacacauugugggcaaauccugccccaagccucaucggcugaaccacaugggcaucuguucuugcgggcucuauaaacagcccggagucccugugaaguggaagcgcugaggacuaguaauaaggaaacuguaugaaugucugugggcaggaagugaagagauccuucuguaaagguuuuuggaauuaugucugcugaauaauaaacuuuuuugaaauaauaaaucugguagaaaaaugagaucucaaaggcucuuuucagagccaccaaaaaaaaaaaaaaaaaaaaaaaaaaaaaaaaaaaaaaaaaaaaaaaaaaaaaaaaaaaaaaaaagaauu

SEQ ID NO: 35871 - RNA, 1781 nt, Artificial Sequence
  mRNA product Design b-4 (hSL-A64-N5) comprising derived and/or modified sequence from LASV(G733-SLE-2010;Clade IV)__AIT17154__GPCmut9 (opt5)
aggagagucccgcagucggcguccagcggcucugcuuguucgugugugugucguugcaggccuuauucaagcuuaccaugggccagaucgugaccuucuuucaagaggucccccacguuauugaagaggugaugaacaucgugcugauugcccucagcauccuggcuguccuuaaggggcuguacaauuucgccacaugcggaauugugggccucguuuccuuucugcuucugugugggagaucuugcacgaccagccucuauaaaggaguguacgaacugcagacacuggagcucaacauggaaacccugaauaugacaaugccucuuuccuguaccaagaacaauucucaucacuauaucauggucggcaacgagacagggcuggagcucacccugacgaauaccagcaucauuaaccauaaauucugcaaucuuuccgacgcgcacaagaaaaaccuguacgaucaugcucucaugucuaucauuagcacauuucaccuguccaucccgaauuucaaccaguaugaagccaugagcugugacuuuaauggaggcaagauuucugugcaguacaaccugucccacagcuaugccggcgaugcugccaaucauugcgggaccaucgcuaacggaguucuccaaacauucaugcggauggccuggggcgggucuuacauugcgcuggacuccggaugugaucgcugggacugcaucaugaccagcuaccaguaucuuaucauucagaacacgacaugggaggaucacugucaguuuucuagacccuccccuaucggcuaccuggggcuccugagccaacggacccgcgacauuuauaucuccagacggcuucugggaacauucaccuggacccucucugauagcgaaggcaaggacacacccggcggguacugccugacgcgcuggaugcugauugaggccgagcucaaauguuuuggaaauaccgcuguggccaagugcaacgaaaaacaugaugaggaguucugcgacaugcugagacuuuuugauuucaauaagcaggcuauccagcggcugaaagccgaagcgcagauguccauccaacucauuaacaaggccgucaaugcucugaucaacgaccagcuuauuaugaagaaucaucugcgcgacaucauguguauuccuuauugcaacuacagcaaauauugguaccucaaucacacaaccacaggcaagaccucucugcccaaauguuggcugguguccaacgggagcuaccucaaugaaacgcacuucucugaugacaucgagcagcaagccgauaacaugaucacagagaugcugcagaaggaauauauggagagacagggaaaaaccccucuuggccugguggaccucuuugucuucagcaccuccuuuuaccugauuucuaucuuccugcaccuuguuaagauuccgacacaucggcacgugguggggaaaagcugccccaagccucaucgccucaaucacaugggaaucuguuccugcggccuguauggccagcccggggucccugugaaguggaaaagaugaggacuaguaauaaggaaacuguaugaaugucugugggcaggaagugaagagauccuucuguaaagguuuuuggaauuaugucugcugaauaauaaacuuuuuugaaauaauaaaucugguagaaaaaugagaucucaaaggcucuuuucagagccaccaaaaaaaaaaaaaaaaaaaaaaaaaaaaaaaaaaaaaaaaaaaaaaaaaaaaaaaaaaaaaaaaagaauu

SEQ ID NO: 35872 - RNA, 1781 nt, Artificial Sequence
  mRNA product Design b-4 (hSL-A64-N5) comprising derived and/or modified sequence from MOPV/LASV reassortant(IGS-1;Clade IV)__AFY05576__GPCmut9 (opt5)
aggagagucccgcagucggcguccagcggcucugcuuguucgugugugugucguugcaggccuuauucaagcuuaccaugggccagaucgugaccuucuuucaagaggucccccacguuauugaagaggugaugaacaucgugcugauugcccucagcguccuggcugugcuuaaggggcuguacaauuucgccacaugcggacucguuggccuggugacguuucuucugcucugugggagauccugcaccacaucucuguauaaaggagucuacgaacugcagacccucgagcugaacauggaaacacuuaauaugaccaugccucugagcuguacaaagaacaauucccaucacuauaucauggugggcaacgagaccgggcucgagcugacgcuuaccaauacaucuauuaucaaccauaaauucugcaaucugagcgacgcgcacaagaaaaaccucuacgaucaugcucugauguccaucauuucuaccuuucaccugagcaucccgaauuucaaccaguaugaagccauguccugugacuuuaauggaggcaagauuagcguucaguacaaccucucucacuccuaugccggcgaugcugccaaucauugcgggacaguggcuaacggaguccugcaaaccuucaugcggauggccuggggcgggagcuacaucgcgcuugacucuggauguggcaacugggauugcauuaugacguccuaccaguaucugaucauucagaauacaaccugggaggaccacugucaguuuagccgccccucuccuaucggguaccucggacugcuuucccaaagaacacgggauaucuauauuagccgcagacugcucggcaccuucaccuggacacuguccgacucugaaggcgaggauacgcccgggggauacugccugacccgguggaugcucaucgaggccgaacugaaguguuuuggcaacacagcuguggccaaaugcaaugagaagcaugacgaagaguucugcgauaugcuucgccuguuugacuucaacaaacaggcuauucagagacucaaggccgaagcgcagaugagcauccaacugauuaauaaagccgugaacgcucuuaucaaugaucagcugaucaugaagaaccaccuccgggacauuauguguaucccuuauugcaauuacuccaaguauugguaccugaaccacaccacaaccgggcgcacgagccugcccaaauguuggcucgucucuaauggauccuaccugaacgagacacauuucagcgacgauauugagcagcaagccgacaauaugaucaccgaaaugcuucagaaggaguauauggaaagacagggcaaaaccccucuggggcucguugaucuguuuguguucucuaccagcuuuuaccugauuuccaucuuccuucaccucgugaagaucccgacacaucggcacauugucggaaaaucuugccccaagccucaucgccugaaccacaugggcaucuguagcugcggccuguauaaacagcccggggugccuguuaaguggaagagaugaggacuaguaauaaggaaacuguaugaaugucugugggcaggaagugaagagauccuucuguaaagguuuuuggaauuaugucugcugaauaauaaacuuuuuugaaauaauaaaucugguagaaaaaugagaucucaaaggcucuuuucagagccaccaaaaaaaaaaaaaaaaaaaaaaaaaaaaaaaaaaaaaaaaaaaaaaaaaaaaaaaaaaaaaaaaagaauu

SEQ ID NO: 35873 - RNA, 1781 nt, Artificial Sequence
  mRNA product Design b-4 (hSL-A64-N5) comprising derived and/or modified sequence from LASV(LM765-SLE-2012;Clade IV)__AIT17814__GPCmut9 (opt5)
aggagagucccgcagucggcguccagcggcucugcuuguucgugugugugucguugcaggccuuauucaagcuuaccaugggccagaucgugaccuucuuucaagaggucccccacguuauugaagaggugaugaacaucgugcugauugcccucagcauccuggcuguccuuaaggggcuguacaauuucgccacaugcggacucgugggccugguuacguuucuucugcucugugggagauccugcaccacaucucuguauaaaggaguguacgaacugcagacccucgagcugaacauggaaacacuuaauaugaccaugccucugagcuguacaaagaacaauucccaucacuauauuauggucggcaacgagaccgggcucgagcugacgcuuaccaauacaucuaucaucgaccauaaauucugcaaccugagcgaugcgcaccggaagaaucucuacgaccaugcucugauguccauuaucucuaccuuucaccugagcauuccgaacuucaaucaguaugaagccauguccugugauuuuaacggaggcaaaaucagcgugcaguacaaucucucucacuccuaugccaaggacgcugccgaucauugcggcacaguugcuaacggggugcugcaaaccuucaugcgcauggccuggggaggcagcuacauugcgcuugacucuggguguggaagaugggauugcaucaugacguccuaccaguaucugauuauccagaauacaaccugggaggaccacugucaguuuagccggcccucuccuaucggcuaccucgggcugcuuucccaacgcacaagagauauuuauaucagccggcgccugcucggaaccuucaccuggacacuguccgacucugaaggcaaggauacgcccggcggguacugccugaccagauggaugcucauugaggccgagcugaaauguuuuggaaacacagcugucgccaagugcaacgaaaaacaugacgaggaguucugcgauaugcuucggcuguuugacuucaauaagcaggcuauccagcgccucaaagccgaagcgcagaugagcauucaacugaucaacaaggccgugaaugcucuuaucaacgaccagcugauuaugaagaaucaccucagagauaucauguguauuccuuauugcaacuacuccaaauauugguaccugaaucacaccacaaccggcaagacgagccugcccaaauguuggcucgugucuaacggguccuaccugaaugaaacacauuucagcgacgauaucgagcagcaagccgacaacaugauuaccgagaugcuucagaaggaauauauggagcggcagggaaaaaccccucugggccucgucgaucuguuuguuuucucuaccagcuuuuaccugaucuccaucuuccuucaccucgugaagauuccgacacaucgccacaucguggggaaacccugcccuaagccccauagacugaaucacaugggaauuuguucuugcggccuguauaagcagccuggcguccccgugaaauggaagcggugaggacuaguaauaaggaaacuguaugaaugucugugggcaggaagugaagagauccuucuguaaagguuuuuggaauuaugucugcugaauaauaaacuuuuuugaaauaauaaaucugguagaaaaaugagaucucaaaggcucuuuucagagccaccaaaaaaaaaaaaaaaaaaaaaaaaaaaaaaaaaaaaaaaaaaaaaaaaaaaaaaaaaaaaaaaaagaauu

SEQ ID NO: 35874 - RNA, 1781 nt, Artificial Sequence
  mRNA product Design b-4 (hSL-A64-N5) comprising derived and/or modified sequence from LASV(LM776-SLE-2012;Clade IV)__AIT17824__GPCmut9 (opt5)
aggagagucccgcagucggcguccagcggcucugcuuguucgugugugugucguugcaggccuuauucaagcuuaccaugggccagaucgugaccuucuuucaagaggucccccacguuauugaagaggugaugaacaucgugcugauugcccucagcauccuggcuguccuuaaggggcuguacaauuucgccacaugcggacucgugggccugguuacguuucuucugcucugugggagauccugcaccacaucuguguauaaaggagucuacgaacugcagacccuggagcucaacauggaaacacugaauaugaccaugccucuuagcuguacaaagaacaauucccaucacuauauuauggugggcaacgagaccgggcuggagcucacgcugaccaauacaucuaucaucaaccauaaauucugcaaucuuagcgacgcgcacaagaaaaaccuguacgaucaugcucucauguccauuaucucuaccuuucaccugagcauuccgaauuucaaccaguaugaagccauguccugugacuuuaauggaggcaagaucagcguucaguacaaccugucucacuccuaugccggcgaugcugccaaucauugcgggacaguggcuaacggaguccuccaaaccuucaugcggauggccuggggcgggagcuacauugcgcuggacucuggauguggcaagugggauugcaucaugacguccuaccaguaucuuauuauccagaacacaaccugggaggaccacugucaguuuagccgccccucuccuaucggguaccugggacuccugucccaaagaacacgggauauuuauaucagccgcagacuucugggcaccuucaccuggacacucuccgacucugaaggcaaagauacgcccgggggauacugccugacccgguggaugcugauugaggccgagcucaaguguuuuggcaauacagcuguggccaaaugcaacgaaaagcaugacgaggaguucugcgauaugcugcgccuuuuugacuucaauaaacaggcuauccagagacugaaggccgaagcgcagaugagcauucaacucaucaacaaggccgugaaugcucugaucaacgaucagcuuauuaugaaaaaucaucugcgggacaucauguguauuccuuauugcaacuacuccaaguauugguaccucaaucacaccacaaccgggaaaacgagccugcccaaguguuggcuggucucuaacggauccuaccucaaugaaacacacuucagcgacgauaucgagcagcaagccgacaacaugauuaccgagaugcugcagaaagaauauauggagcgccagggcaagaccccucuugggcugguugaucucuuuguguucucuaccagcuuuuaccugaucuccaucuuccugcaccuugugaaaauuccgacacauagacacaucgucggaaagucuugccccaagccucaucggcucaaucacaugggcauuuguagcugcggccuguauaaacagcccggggugccuguucgcuggaagagaugaggacuaguaauaaggaaacuguaugaaugucugugggcaggaagugaagagauccuucuguaaagguuuuuggaauuaugucugcugaauaauaaacuuuuuugaaauaauaaaucugguagaaaaaugagaucucaaaggcucuuuucagagccaccaaaaaaaaaaaaaaaaaaaaaaaaaaaaaaaaaaaaaaaaaaaaaaaaaaaaaaaaaaaaaaaaagaauu

SEQ ID NO: 35875 - RNA, 1781 nt, Artificial Sequence
  mRNA product Design b-4 (hSL-A64-N5) comprising derived and/or modified sequence from LASV(Mad39;Clade IV)__ANH09722__GPCmut9 (opt5)
aggagagucccgcagucggcguccagcggcucugcuuguucgugugugugucguugcaggccuuauucaagcuuaccaugggccagaucgugaccuucuuucaagaggucccccacguuauugaagaggugaugaacaucgugcugauugcccucagcauccuggcuguccuuaaggggcuguacaauguggccacaugcggacucauuggccugguuacguuccuucugcucugugggagauccugcaccacaacccuguauaaaggaguguacgaacugcaggcgcucgagcugaacauggaaacacuuaauaugaccaugccucugucuuguacaaagaacaauagccaucacuauauccgggucggcaacgagaccgggcucgagcugacgcuuaccaauacaucccugaucaaccauaaauuuugcaaucucucugacgcucacaagaaaaaccuguacgaucaugcccugaugagcauuaucuccaccuuccaccucucuauuccgaauuuuaaccaguaugaagccaugagcugugacuucaaugauggaaagaucuccgugcaguacaaccugagccacacauaugcuggcgacaccgccaaucauugcggcacgguugcuaacggggugcuucaaacauuuaugcgcauggccuggggaggcucuuacauugcgcuggauuccggguguggaggcugggacugcaucaugaccagcuaccaguaucucauuauccagaacacaaccugggaggaucacugucaguucucuagacccuccccuaucggguaccugggacuucugagccaacggacccgcgacauuuauaucucuagacggcuccugggcacauuuacguggacccuguccgauagcgaaggcaaggacacacccgggggauacugccucacccgcuggaugcugauugaggccgagcuuaaauguuucggcaauacagcugucgccaagugcaacgaaaaacaugaugaggaauuuugcgacaugcugagacucuucgauuuuaauaagcaggcuauccagcggcugaaagccgaggcgcagauguccauucaacuuaucaacaaggccgugaaugcucugaucaacgaccagcucauuaugaagaaucaucugcgcgacaucauguguauuccuuauugcaacuacucuaaauauugguaccugaaucacaccgugacggggaagacaagccuccccaaauguuggcuggucuccaacggaagcuaccuuaaugaaacccacuucucugaugacaucgagcagcaagccgauaacaugauuaccgagaugcugcagaaggaauauauggagagacagggcaaaacaccucucgggcugguugaccuguucguguuuuccaccagcuucuaccuuaucucuaucuuucuccaccuggugaagauuccgacacaucggcacgucgugggaaaacccugcccuaagccccaucgccugaaucacaugggcaucuguagcugcggcuucuauaagcagccugggguucccgugagauggaaacggugaggacuaguaauaaggaaacuguaugaaugucugugggcaggaagugaagagauccuucuguaaagguuuuuggaauuaugucugcugaauaauaaacuuuuuugaaauaauaaaucugguagaaaaaugagaucucaaaggcucuuuucagagccaccaaaaaaaaaaaaaaaaaaaaaaaaaaaaaaaaaaaaaaaaaaaaaaaaaaaaaaaaaaaaaaaaagaauu

SEQ ID NO: 35876 - RNA, 1781 nt, Artificial Sequence
  mRNA product Design b-4 (hSL-A64-N5) comprising derived and/or modified sequence from LASV(Z0947-SLE-2011;Clade IV)__AIT17840__GPCmut9 (opt5)
aggagagucccgcagucggcguccagcggcucugcuuguucgugugugugucguugcaggccuuauucaagcuuaccaugggccagaucgugaccuucuuucaagaggucccccacguuauugaagaggugaugaacaucgugcugauugcccucagcauccuggcuguccuuaaggggcuguacaauuucgccacaugcggacucgugggccugguuacguuucuucugcucugugggagauccugcaccauuucucuguauaaaggaguguacgaacugcagacacucgagcugaacauggaaacccuuaauaugacaaugccucugagcuguaccaagaacaauucccaucacuauaucauggucggcaacgagacagggcucgagcugacccuuacgaauaccucuaucauuaaccauaaauucugcaaucugagcgacgcgcacaagaaaaaccucuacgaucaugcucugauguccaucauuucuacauuucaccugagcaucccgaauuucaaccaguaugaagccauguccugugacuuuaauggaggcaagauuagcgugcaguacaaccucucucacuccuaugccggcgaugcugccaaucauugcgggaccguugcuaacggagugcugcaaacauucaugcggauggccuggggcgggagcuacaucgcgcuugacucuggaugugaucgcugggacugcauuaugaccuccuaccaguaucugaucauccagaacacgacaugggaggaucacugucaguuuagcagacccucuccuauuggcuaccucgggcugcuuucccaacggacccgcgacaucuauauuagcagacggcugcucggaacauucaccuggacccuguccgauucugaaggcaaggacacacccggcggguacugccugacgcgcuggaugcucaucgaggccgagcugaaauguuuuggaaauaccgcugucgccaagugcaacgaaaaacaugaugaggaguucugcgacaugcuuagacuguuugauuucaauaagcaggcuauucagcggcucaaagccgaagcgcagaugagcauccaacugaucaacaaggccgugaaugcucuuauuaacgaccagcugaucaugaagaaucaccuccgcgacauuauguguaucccuuauugcaacuacuccaaauauugguaccugaaucacacaaccacaggcaagaccagccugcccaaauguuggcucgugucuaacggguccuaccugaaugaaacgcauuucagcgaugacauugagcagcaagccgauaacaugaucacagagaugcuucagaaggaauauauggagagacagggaaaaaccccucugggccucgucgaccuguuuguuuucucuaccagcuuuuaccugaucuccauuuuccuucaccucgugaagaucccgacacaucggcacauuguggggaaacccugcccuaagccccaucgccugaaucacaugggaaucuguucuugcggccuguauaagcagccuggcguccccgugaaauggaagagaugaggacuaguaauaaggaaacuguaugaaugucugugggcaggaagugaagagauccuucuguaaagguuuuuggaauuaugucugcugaauaauaaacuuuuuugaaauaauaaaucugguagaaaaaugagaucucaaaggcucuuuucagagccaccaaaaaaaaaaaaaaaaaaaaaaaaaaaaaaaaaaaaaaaaaaaaaaaaaaaaaaaaaaaaaaaaagaauu

SEQ ID NO: 35877 - RNA, 1812 nt, Artificial Sequence
  mRNA product Design b-4 (hSL-A100) comprising derived and/or modified sequence from LASV(Josiah;Clade IV)__NP_694870__GPCmut9 (opt1)
aggagagucccgcagucggcguccagcggcucugcuuguucgugugugugucguugcaggccuuauucaagcuuaccaugggccagaucgugaccuucuuccaggaggucccccacgugaucgaggaggugaugaacaucguccugaucgcccucagcgugcuggccgugcugaaggggcucuacaacuucgcgaccugcggccuggucgggcuggugacguuccuccugcugugcggccgcuccugcaccaccagccucuacaaggggguguacgagcugcagacccuggagcucaacauggagacgcugaacaugaccaugccgcuguccugcaccaagaacaacagccaccacuacaucauggucggcaacgagaccggccucgagcugacgcugaccaacaccuccaucaucaaccacaaguucugcaaccucagcgacgcccacaagaagaaccuguacgaccacgcccugauguccaucaucagcaccuuccaccucuccauccccaacuucaaccaguacgaggccaugagcugcgacuucaacgggggcaagaucuccgugcaguacaaccugagccacuccuacgccggggacgcggccaaccacugcggcacgguggccaacgggguccugcagaccuucaugcggauggccuggggcggcagcuacaucgcgcucgacuccgggugcggcaacugggacugcaucaugaccagcuaccaguaccugaucauccagaacaccacgugggaggaccacugccaguucucccggcccagccccaucggguaccugggccuccugucccagcgcacccgggacaucuacaucagccgccggcugcucggcaccuucaccuggacgcugagcgacuccgaggggaaggacaccccgggcggguacugccugacccgcuggaugcucaucgaggccgagcugaagugcuucggcaacaccgccguggccaagugcaacgagaagcacgacgaggaguucugcgacaugcugcggcuguucgacuucaacaagcaggccauccagcgccugaaggcggaggcccagaugagcauccagcugaucaacaaggccgugaacgcccucaucaacgaccagcugaucaugaagaaccaccuccgggacaucaugugcauccccuacugcaacuacuccaaguacugguaccucaaccacacgaccaccggccgcaccagccugcccaagugcuggcuggucuccaacggcagcuaccucaacgagacgcacuucuccgacgacaucgagcagcaggccgacaacaugaucaccgagaugcugcagaaggaguacauggagcggcaggggaagacgccccugggccucguggaccuguucguguucagcaccuccuucuaccugaucagcaucuuccugcaccucgucaagaucccgacccaccgccacaucguggggaaguccugccccaagccccaccggcugaaccacaugggcaucugcagcugcgggcuguacaagcagcccggcgugccggucaaguggaagcgcugaggacuaguaauaaggaaacuguaugaaugucugugggcaggaagugaagagauccuucuguaaagguuuuuggaauuaugucugcugaauaauaaacuuuuuugaaauaauaaaucugguagaaaaaugagaucucaaaggcucuuuucagagccaccaaaaaaaaaaaaaaaaaaaaaaaaaaaaaaaaaaaaaaaaaaaaaaaaaaaaaaaaaaaaaaaaaaaaaaaaaaaaaaaaaaaaaaaaaaaaaaaaaaaaa

SEQ ID NO: 35878 - RNA, 1809 nt, Artificial Sequence
  mRNA product Design b-4 (hSL-A100) comprising derived and/or modified sequence from LASV(LP;Clade I)__AAF86701__GPCmut9 (opt1)
aggagagucccgcagucggcguccagcggcucugcuuguucgugugugugucguugcaggccuuauucaagcuuaccaugggccagaucaucaccuucuuccaggaggugccccacgucaucgaggaggugaugaacaucgugcugaucgcccucagccugcuggccauccucaaggggcuguacaacaucgcgaccugcggcaucaucgggcuggucgccuuccucuuccugugcggcaaguccugcagccugacgcucaagggcggguacgagcugcagacccuggagcucaacauggagacccugaacaugaccaugccgcuguccugcacgaagaacagcucccaccacuacauccgcgugggcaacgagaccgggcucgagcugacccugaccaacacgagcaucaucaaccacaaguucugcaaccucuccgacgcccacaagaagaaccuguacgaccacgcccugaugagcaucaucuccaccuuccaccucagcauccccaacuucaaccaguacgaggccauguccugcgacuucaacggcgggaagaucagcgugcaguacaaccugucccacagcuacgcgggcgacgccgccgagcacugcgggaccgucgccaacggcgugcugcagaccuucaugcggauggcguggggcgggcgcuacaucgcccucgacuccggcugcgggaacugggacugcaucaugacgagcuaccaguaccugaucauccagaacaccaccugggaggaccacugccaguucucccggcccagccccaucggcuaccugggccuccugucccagcgcacccgggacaucuacaucagccgccggcugcucgggacguucaccuggacccugagcgacuccgagggcaacgagacccccgggggcuacugccugacgcgcuggaugcucaucgaggccgagcugaagugcuucgggaacaccgccguggccaagugcaacgagaagcacgacgaggaguucugcgacaugcugcggcuguucgacuucaacaagcaggcgauccgccggcugaaggccgaggcccagaugagcauccagcugaucaacaaggccgucaacgcccucaucaacgaccagcugaucaugaagaaccaccuccgcgacaucaugugcauccccuacugcaacuacuccaaguacugguaccucaaccacaccagcuccggccggaccagccugcccaagugcuggcugaucuccaacgggagcuaccucaacgagacgcaguucuccgacgacaucgagcagcaggcggacaacaugaucaccgagaugcugcagaaggaguacaucgagcgccagggcaagaccccgcuggggcucguggacaucuucaucuucagcaccuccuucuaccugaucagcaucuuccugcaccugaucaagaucccgacgcaccggcacaucgugggcaagcccugccccaagccccaccgccucaaccacaugggggucugcuccugcggccuguacaagcacccgggcgugcccaccaaguggaagcggugaggacuaguaauaaggaaacuguaugaaugucugugggcaggaagugaagagauccuucuguaaagguuuuuggaauuaugucugcugaauaauaaacuuuuuugaaauaauaaaucugguagaaaaaugagaucucaaaggcucuuuucagagccaccaaaaaaaaaaaaaaaaaaaaaaaaaaaaaaaaaaaaaaaaaaaaaaaaaaaaaaaaaaaaaaaaaaaaaaaaaaaaaaaaaaaaaaaaaaaaaaaaaaaaa

SEQ ID NO: 35879 - RNA, 1809 nt, Artificial Sequence
  mRNA product Design b-4 (hSL-A100) comprising derived and/or modified sequence from LASV(803213;Clade II)__AAF86703__GPCmut9 (opt1)
aggagagucccgcagucggcguccagcggcucugcuuguucgugugugugucguugcaggccuuauucaagcuuaccaugggccagaucaucaccuucuuccaggaggugccccacgucaucgaggaggugaugaacaucgugcugaucgcccucagccugcuggccauccucaaggggaucuacaacgucgcgaccugcggccuguucgggcugaucuccuuccuccugcugugcggccgcagcugcuccgugacguacaaggggguguacgagcuccagacccuggagcugaacauggccaaccucaacaugaccaugccgcugagcugcaccaagaacaacucccaccacuacaucauggucggcaacgagacgggccuggagcucacccugaccaacaccagcaucaucaaccacaaguucugcaaccuguccgacgcccacaagaagaaccucuacgaccacgcccugaugagcaucaucuccacguuccaccugagcauccccaacuucaaccaguacgaggccauguccugcgacuucaacgggggcaagaucagcgugcaguacaaccucucccacagcuucgcgguggacgccgccaaccacugcgggaccaucgccaacggcguccugcagaccuucaugcggauggcguggggcggguccuacaucgcccuggacagcggcugcgggaacugggacugcaucaugaccuccuaccaguaccucaucauccagaacacgaccugggaggaccacugccaguucagccgccccucccccaucggcuaccuggggcugcucagccagcggacccgcgacaucuacaucagccggcgccugcugggcaccuucacguggacccucuccgacagcgagggcaacgaggcccccgggggcuacugccugacccgguggaugcugaucgaggccgagcucaagugcuucgggaacaccgccguggcgaagugcaacgagaagcacgacgaggaguucugcgacaugcugcgccuguucgacuucaacaagcaggccaucaagcggcucaagacggaggcccagauguccauccagcugaucaacaaggccgugaacgcccugaucaacgaccagcucaucaugaagaaccaccuccgcgacaucaugugcauccccuacugcaacuacagccgguacugguaccugaaccacaccgucaccgggaagaccucccugccccgcugcuggcuggugagcaacggcuccuaccugaacgagacgcacuucagcgacgacaucgagcagcaggcggacaacaugaucaccgagaugcuccagaaggaguacauggaccggcagggcaagaccccgcuggggcugguggaccucuucgucuucuccaccagcuucuaccugaucuccaucuuccugcaccuggugaagaucccgacgcaccgccacaucgugggcaagcccugccccaagccccaccggcucaaccacauggggaucugcagcugcggccuguacaagcacccggggguccccgugaaguggaagcgcugaggacuaguaauaaggaaacuguaugaaugucugugggcaggaagugaagagauccuucuguaaagguuuuuggaauuaugucugcugaauaauaaacuuuuuugaaauaauaaaucugguagaaaaaugagaucucaaaggcucuuuucagagccaccaaaaaaaaaaaaaaaaaaaaaaaaaaaaaaaaaaaaaaaaaaaaaaaaaaaaaaaaaaaaaaaaaaaaaaaaaaaaaaaaaaaaaaaaaaaaaaaaaaaaa

SEQ ID NO: 35880 - RNA, 1809 nt, Artificial Sequence
  mRNA product Design b-4 (hSL-A100) comprising derived and/or modified sequence from LASV(GA391;Clade III)__CAA36645__GPCmut9 (opt1)
aggagagucccgcagucggcguccagcggcucugcuuguucgugugugugucguugcaggccuuauucaagcuuaccaugggccagaucgugaccuucuuccaggaggucccccacgugaucgaggaggugaugaacaucguccugaucgcccucagcauccuggccauccugaaggggcucuacaacguggcgaccugcggccugaucgggcuggugacguuccuccugcuguccggccgcagcugcucccucaucuacaaggggaccuacgagcugcagacccuggagcucaacauggagacccugaacaugacgaugccgcugagcugcaccaagaacaacucccaccacuacauccgggucggcaacgagaccggccucgagcugacccugacgaacaccagcauccucaaccacaaguucugcaaccuguccgacgcccacaagcgcaaccuguacgaccacagccucauguccaucaucagcaccuuccaccuguccauccccaacuucaaccaguacgaggccaugagcugcgacuucaacgggggcaagaucaccgugcaguacaaccugucccacagcuucgccguggacgccgcggggcacugcggcacgcucgccaacgggguccugcagaccuucaugcggauggccuggggcggcuccuacaucgcccuggacagcgggugcggcaacugggacugcaucaugaccuccuaccaguaccucaucauccagaacaccacgugggacgaccacugccaguucagccggcccucccccaucggguaccugggccugcucagccagcgcacccgggacaucuacaucagccgccggcugcugggcaccuucaccuggacgcucuccgacagcgaggggaacgagaccccgggcggguacugccugacccgcuggaugcugaucgaggcggagcucaagugcuucggcaacaccgccguggccaagugcaacgagaagcacgacgaggaguucugcgacaugcugcggcuguucgacuucaacaagcaggccauccgccggcucaagacggaggcccagauguccauccagcugaucaacaaggcggugaacgcccugaucaacgaccagcucaucaugaagaaccaccuccgcgacaucaugugcauccccuacugcaacuacagccgguacugguaccugaaccacaccuccaccggcaagaccagccugccccgcugcuggcugaucuccaacggcagcuaccugaacgagacgaaguucuccgacgacaucgagcagcaggccgacaacaugaucaccgagaugcuccagaaggaguacaucgaccggcaggggaagacgccccugggccuggucgaccuguucguguucagcaccuccuucuaccucaucagcaucuuccugcaccuggugaagaucccgacccaccgccacaucgucgggaagcccugccccaagccccaccggcucaaccacaugggcaucugcuccugcgggcuguacaagcagccgggcgugcccgugcgcuggaagcggugaggacuaguaauaaggaaacuguaugaaugucugugggcaggaagugaagagauccuucuguaaagguuuuuggaauuaugucugcugaauaauaaacuuuuuugaaauaauaaaucugguagaaaaaugagaucucaaaggcucuuuucagagccaccaaaaaaaaaaaaaaaaaaaaaaaaaaaaaaaaaaaaaaaaaaaaaaaaaaaaaaaaaaaaaaaaaaaaaaaaaaaaaaaaaaaaaaaaaaaaaaaaaaaaa

SEQ ID NO: 35881 - RNA, 1812 nt, Artificial Sequence
  mRNA product Design b-4 (hSL-A100) comprising derived and/or modified sequence from LASV(AV;Clade V)__CCA30314__GPCmut9 (opt1)
aggagagucccgcagucggcguccagcggcucugcuuguucgugugugugucguugcaggccuuauucaagcuuaccaugggccagaucgugaccuucuuccaggaggucccccacgugaucgaggaggugaugaacaucguccugaucgcccucagcauccuggccgugcugaaggggcucuacaacaucgcgaccugcggccugaucgggcugaucacguuccuccugcugugcggccgcuccugcagcuccaaccucuacaaggggguguacgagcugcagagccuggaccucaacauggagacccugaacaugaccaugccgcuguccugcaccaagaacaacagccaccacuacauccgggucggcaacgacacgggccucgagcugacccugaccaacaccuccauccucaaccacaaguucugcaaccugagcgacgcccacaagaaggaccuguacgaccacgcccucauguccaucaucagcacguuccaccuguccauccccaacuucaaccaguacgaggccaugagcugcgacuucaacgggggcaagaucuccgugcaguacaaccugagccacuccuacgccaucgacgcggccaaccacugcgggaccguggccaacggcauccuccagaccuucaugcgcauggccuggggcgggagcuacaucgcgcuggacuccggcugcgggaacugggacugcaucaugaccagcuaccaguaccugaucauccagaacacgaccugggagaaccacugccaguucucccgccccagccccaucggcuaccucgggcugcugagccagcggacccgcgacaucuacaucucccggcgccuccugggcaccuucacguggacccugagcgacuccgagggcaacgccacccccgggggcuacugccucacccgguggaugcugaucgaggccgagcugaagugcuucgggaacacggccgucgccaagugcaacgagaagcacgacgaggaguucugcgacaugcuccgccuguucgacuucaacaagcaggcgaucagccggcugaaguccgaggcccagaugagcauccagcucaucaacaaggccgugaacgcccugaucaacgaccagcugaucaugaagaaccaccuccgcgacaucaugugcauccccuacugcaacuacuccaaguacugguaccugaaccacaccaucaccgggaagaccagccugcccaagugcuggcucguguccaacggcagcuaccugaacgagacgcacuucuccgacgacaucgagcagcaggccgacaacaugaucaccgagaugcugcagaaggaguacauggagcggcagggcaagaccccgcucgggcuggucgaccuguucguguucagcaccuccuucuaccugaucagcaucuuccuccgccuggugaagaucccgacgcaccggcacaucgucggcaagcccugccccaagccccaccgccugaaccacauggggaucugcuccugcggccucuacaagcagccgggggugcccgugcgguggaagcgcugaggacuaguaauaaggaaacuguaugaaugucugugggcaggaagugaagagauccuucuguaaagguuuuuggaauuaugucugcugaauaauaaacuuuuuugaaauaauaaaucugguagaaaaaugagaucucaaaggcucuuuucagagccaccaaaaaaaaaaaaaaaaaaaaaaaaaaaaaaaaaaaaaaaaaaaaaaaaaaaaaaaaaaaaaaaaaaaaaaaaaaaaaaaaaaaaaaaaaaaaaaaaaaaaa

SEQ ID NO: 35882 - RNA, 1809 nt, Artificial Sequence
  mRNA product Design b-4 (hSL-A100) comprising derived and/or modified sequence from LASV(Togo/2016/7082;Clade VI)__AMR44577__GPCmut9 (opt1)
aggagagucccgcagucggcguccagcggcucugcuuguucgugugugugucguugcaggccuuauucaagcuuaccaugggccagaucaucaccuucuuccaggaggugccccacgucaucgaggaggugaugaacaucgugcugaucgcccucagccugcuggccauccucaagggggucuacaacguggcgaccugcggcaucaucgggcuggugacguuccuguuccucugcggccgcuccugcagccugaucuacaagggguccuacgagcugcagacccucgagcugaacauggagacccugaacaugaccaugccgcucagcugcacgaagaacuccagccaccacuacauccgggucggcaacgagaccggccuggagcugacccucaccaacacguccaucaucaaccacaaguucugcaaccugagcgacgcccacaagcgcaaccuguacgaccacgcccucauguccauccugagcaccuuccaccuguccauccccaacuucaaccaguacgaggccaugagcugcgacuucaacgggggcaagaucuccgugcaguacaaccucagccacgccuacgcgguggacgccgccgagcacugcgggaccgucgccaacggcgugcugcagaccuucaugcggauggcguggggcggguccuacaucgcccuggacagcggcugcgggaacugggacugcaucaugacguccuaccaguaccucaucauccagaacaccaccugggaggaccacugccaguucagccggcccucccccaucggcuaccuggggcugcucagccagcgcacccgggacaucuacaucagccgccggcugcugggcacguucaccuggacccucuccgacagcgagggcaacgagacccccgggggcuacugccugacgcgcuggaugcugaucgaggccgagcucaagugcuucgggaacaccgccguggccaagugcaacgagaagcacgacgaggaguucugcgacaugcugcggcuguucgacuucaacaagcaggcgauccagcgccucaaguccgaggcccagaugagcauccagcugaucaacaaggccgucaacgcccugaucaacgaccagcucaucaugaagaaccaccuccgggacaugaugugcauccccuacugcaacuacuccaaguacugguaccugaaccacaccagcuccgggcgcaccagccugcccaagugcuggcugguguccaacggcagcuaccugaacgagacgcacuucuccgacgacaucgagcagcaggccgacaacaugaucaccgagaugcuccagaaggaguacaucgaccggcagggcaagaccccgcuggggcugguggaccucuucgucuucagcaccuccuucuaccugaucagcaucuuccugcaccugaucaagaucccgacgcaccgccacaucgugggcaagcccugccccaagccccaccggcucaaccacauggggaucugcuccugcggccuguacaagcagccgggggugcccacccgcuggaagcggugaggacuaguaauaaggaaacuguaugaaugucugugggcaggaagugaagagauccuucuguaaagguuuuuggaauuaugucugcugaauaauaaacuuuuuugaaauaauaaaucugguagaaaaaugagaucucaaaggcucuuuucagagccaccaaaaaaaaaaaaaaaaaaaaaaaaaaaaaaaaaaaaaaaaaaaaaaaaaaaaaaaaaaaaaaaaaaaaaaaaaaaaaaaaaaaaaaaaaaaaaaaaaaaaa

SEQ ID NO: 35883 - RNA, 1809 nt, Artificial Sequence
  mRNA product Design b-4 (hSL-A100) comprising derived and/or modified sequence from LASV(KAK-428;Clade n.d. (VII))__ANH09740__GPCmut9 (opt1)
aggagagucccgcagucggcguccagcggcucugcuuguucgugugugugucguugcaggccuuauucaagcuuaccaugggccagaucgugaccuucuuccaggaggucccccacgugaucgaggaggugaugaacaucguccugaucgcccucagccugcuggccauccucaaggggcuguacaacuucgcgaccugcggcgugaucgggcugaucacguuccuccugcugugcggccgcuccugcagcgccaccuacaaggggcaguacgagcuccagacccuggagcugaacauggagucccucaacaugaccaugccgcugagcugcacgaagaacaacucccaccacuacauccgggccggcaacaacaccggccuggagcucacccugaccaacacgagcaucaucucccacaaguucugcaaccugagcgacgcccacaagaagaaccucuacgaccacacccugauguccaucaucaccaccuuccaccugagcauccccaacuucaaccaguacgaggccauguccugcgacuucaacgggggcaagaucagcauccaguacaaccucucccacagcuacgcgggggacgccgcccagcacugcggcacgguggccaacgggguccugcagaccuucaugcgcauggcguggggcggcuccuaccuggcccucgacagcgggugccgcggcugggacugcaucaucuccagcuaccaguaccugaucauccagaacaccaccugggacgaccacugccaguucucccggcccagccccaucggguaccugggcuucgugagccagaagacgcgcgacaucuacaucucccggcgccuccugggcaccuucaccuggacccugagcgacuccgaggggcacgacaugccgggcggguacugccucacgcgguggaugcugaucgaggccgaccugaagugcuucggcaacaccgccguggccaagugcaacgagaagcacgacgaggaguucugcgacauguggcgccucuucgacuucaacaagcaggcgauccagcggcugaaggccgaggcccagaugaacauccagcugaucaacaaggccgucaacgcccucaucaacgaccagcugaugaugaagaaccaccuccgcgacaucaugugcauccccuacugcaacuacagcaaguucugguaccugaacaacaccaccacgggccggaccucccugccccgcugcuggcugaucagcaacggcuccuaccucaacgagacccacuucagcgacgacaucgagcagcaggcggacaacaugaucaccgagaugcugcagaaggaguacauggaccggcaggggaagacgccccugggccucguggaccuguucguguucuccaccagcuucuaccugaucaccaucuuccuccaccuggucaagaucccgacccaccgccacaucguggggaagcccugccccaagccccaccggcugaaccacaugggcaucugcuccugcgggcuguacaagcagccgggcgugcccguccgcuggaagcggugaggacuaguaauaaggaaacuguaugaaugucugugggcaggaagugaagagauccuucuguaaagguuuuuggaauuaugucugcugaauaauaaacuuuuuugaaauaauaaaucugguagaaaaaugagaucucaaaggcucuuuucagagccaccaaaaaaaaaaaaaaaaaaaaaaaaaaaaaaaaaaaaaaaaaaaaaaaaaaaaaaaaaaaaaaaaaaaaaaaaaaaaaaaaaaaaaaaaaaaaaaaaaaaaa

SEQ ID NO: 35884 - RNA, 1809 nt, Artificial Sequence; identical to SEQ ID NO: 35878
  mRNA product Design b-4 (hSL-A100) comprising derived and/or modified sequence from LASV(Pinneo-NIG-1969;Clade I)__AIT17836__GPCmut9 (opt1)

SEQ ID NO: 35885 - RNA, 1809 nt, Artificial Sequence
  mRNA product Design b-4 (hSL-A100) comprising derived and/or modified sequence from LASV(ISTH0009-NIG-2011;Clade II)__AIT17404__GPCmut9 (opt1)
aggagagucccgcagucggcguccagcggcucugcuuguucgugugugugucguugcaggccuuauucaagcuuaccaugggccagaucaucaccuucuuccaggaggugccccacgucaucgaggaggugaugaacaucgugcugaucgcccucagccugcuggccauccucaaggggaucuacaacgucgcgaccugcggccuguucgggcugguguccuuccuccugcugugcggccgcagcugcuccacgaccuacaaggggguguacgagcuccagacccuggagcuggacauggccagccucaacaugaccaugccgcuguccugcacgaagaacaacagccaccacuacaucauggucggcaacgagaccggccuggagcucacccugaccaacacguccaucaucaaccacaaguucugcaaccugagcgacgcccacaagaagaaccucuacgaccacgcccugauguccaucaucagcaccuuccaccuguccauccccaacuucaaccaguacgaggccaugagcugcgacuucaacgggggcaagaucuccgugcaguacaaccucagccacgcguacgccguggacgccgccaaccacugcgggaccaucgcgaacggcguccugcagaccuucaugcggauggccuggggcggguccuacaucgcccuggacagcggcugcggguccugggacugcaucaugacgagcuaccaguaccucaucauccagaacaccaccugggaggaccacugccaguucucccgccccagccccaucggcuaccuggggcugcucagccagcggacccgcgacaucuacaucucccggcgccugcugggcacguucaccuggacccucagcgacuccgagggcaacgagacccccgggggcuacugccugacgcgguggaugcugaucgaggccgagcucaagugcuucgggaacaccgccguggcgaagugcaacgagaagcacgacgaggaguucugcgacaugcugcgccuguucgacuucaacaagcaggccauccggcgccucaagaccgaggcccagaugagcauccagcugaucaacaaggccgugaacgcccugaucaacgaccagcucaucaugaagaaccaccuccgggacaucaugugcaucccguacugcaacuacuccaaguacugguaccugaaccacaccgucacggggaagaccagccugccccgcugcuggcugguguccaacggcagcuaccugaacgagacccacuucuccgacgacaucgagcagcaggcggacaacaugaucaccgagcuccugcagaaggaguacauggaccggcagggcaagacgccccuggggcucguggaccuguucgucuucagcaccuccuucuaccugaucagcaucuuccugcaccucaucaagaucccgacccaccgccacaucaccggcaagcccugccccaagccccaccggcugaaccacauggggaucugcuccugcggccuguacaagcacccgggggugcccgugaaguggaagcgcugaggacuaguaauaaggaaacuguaugaaugucugugggcaggaagugaagagauccuucuguaaagguuuuuggaauuaugucugcugaauaauaaacuuuuuugaaauaauaaaucugguagaaaaaugagaucucaaaggcucuuuucagagccaccaaaaaaaaaaaaaaaaaaaaaaaaaaaaaaaaaaaaaaaaaaaaaaaaaaaaaaaaaaaaaaaaaaaaaaaaaaaaaaaaaaaaaaaaaaaaaaaaaaaaa

SEQ ID NO: 35886 - RNA, 1809 nt, Artificial Sequence
  mRNA product Design b-4 (hSL-A100) comprising derived and/or modified sequence from LASV(ISTH2010-NIG-2012;Clade II)__AIT17482__GPCmut9 (opt1)
aggagagucccgcagucggcguccagcggcucugcuuguucgugugugugucguugcaggccuuauucaagcuuaccaugggccagaucaucaccuucuuccaggaggugccccacgucaucgaggaggugaugaacaucgugcugaucgcccucagccugcuggccauccucaaggggaucuacaacgucgcgaccugcggccuguucgggcugguguccuuccuccugcugugcggccgcagcugcuccacgaccuacaaggggguguacgagcuccagacccuggagcuggacauggccagccucaacaugaccaugccgcuguccugcacgaagaacaacagccaccacuacaucauggucggcaacgagaccggccuggagcucacccugaccaacacguccaucaucaaccacaaguucugcaaccugagcgacgcccacaagaagaaccucuacgaccacgcccugauguccaucaucagcaccuuccaccuguccauccccaacuucaaccaguacgaggccaugagcugcgacuucaacgggggcaagaucuccgugcaguacaaccucagccacgcguacgccguggacgccgccaaccacugcgggaccaucgcgaacggcguccugcagaccuucaugcggauggccuggggcggguccuacaucgcccuggacagcggcugcggguccugggacugcaucaugacgagcuaccaguaccucaucauccagaacaucaccugggaggaccacugccaguucucccgccccagccccaucggcuaccuggggcugcucagccagcggacccgcgacaucuacaucucccggcgccugcugggcaccuucacguggacccucagcgacuccgagggcaacgagacccccgggggcuacugccugacccgguggaugcugaucgaggccgagcucaagugcuucgggaacacggccguggcgaagugcaacgagaagcacgacgaggaguucugcgacaugcugcgccuguucgacuucaacaagcaggccauccggcgccucaagaccgaggcccagaugagcauccagcugaucaacaaggccgugaacgcccugaucaacgaccagcucaucaugaagaaccaccuccgggacaucaugugcauccccuacugcaacuacuccaaguacugguaccugaaccacaccgucaccgggaagacgagccugccccgcugcuggcugguguccaacggcagcuaccugaacgagacccacuucuccgacgacaucgagcagcaggcggacaacaugaucaccgagcuccugcagaaggaguacaucgaccggcagggcaagaccccgcuggggcucguggaccuguucgucuucagcacguccuucuaccugaucagcaucuuccugcaccucgugaagaucccgacccaccgccacguggucggcaagcccugccccaagccccaccggcugaaccacauggggaucugcuccugcggccuguacaagcacccgggggugcccgugaaguggaagcgcugaggacuaguaauaaggaaacuguaugaaugucugugggcaggaagugaagagauccuucuguaaagguuuuuggaauuaugucugcugaauaauaaacuuuuuugaaauaauaaaucugguagaaaaaugagaucucaaaggcucuuuucagagccaccaaaaaaaaaaaaaaaaaaaaaaaaaaaaaaaaaaaaaaaaaaaaaaaaaaaaaaaaaaaaaaaaaaaaaaaaaaaaaaaaaaaaaaaaaaaaaaaaaaaaa

SEQ ID NO: 35887 - RNA, 1809 nt, Artificial Sequence
  mRNA product Design b-4 (hSL-A100) comprising derived and/or modified sequence from LASV(Lassa virus/H.sapiens-wt/NGA/2015/ISTH_0543;Clade II)__AVO03639__GPCmut9 (opt1)
aggagagucccgcagucggcguccagcggcucugcuuguucgugugugugucguugcaggccuuauucaagcuuaccaugggccagaucaucaccuucuuccaggaggugccccacgucaucgaggaggugaugaacaucgugcugaucgcccucagccugcuggccauccucaaggggaucuacaacgucgcgaccugcggccuguucgggcugguguccuuccuccugcugugcggccgcagcugcuccacgaccuacaaggggguguacgagcuccagacccuggagcuggacauggccaaccucaacaugaccaugccgcugagcugcacgaagaacaacucccaccacuacaucauggucggcaacgagaccggccuggagcucacccugaccaacacgagcaucaucaaccacaaguucugcaaccuguccgacgcccacaagaagaaccucuacgaccacgcccugaugagcaucaucuccaccuuccaccugagcauccccaacuucaaccaguacgaggccauguccugcgacuucaacgggggcaagaucagcgugcaguacaaccucucccacaccuacgcgguggacgccgccaaccacugcgggaccaucgccaacggcguccugcagacguucaugcggauggcguggggcgggagcuacaucgcccuggacuccggcugcgggagcugggacugcaucaugaccuccuaccaguaccucgugauccagaacaccaccugggaggaccacugccaguucagccgccccucccccaucggcuaccuggggcugcucagccagcggacgcgcgacaucuacaucagccggcgccugcugggcaccuucaccuggacccucuccgacagcgagggcaacgagacgcccgggggcuacugccugacccgguggaugcugaucgaggccgagcucaagugcuucgggaacaccgccguggccaagugcaacgagaagcacgacgaggaguucugcgacaugcugcgccuguucgacuucaacaagcaggcgauccggcgccucaagaccgaggcccagauguccauccagcugaucaacaaggccgucaacgcccugaucaacgaccagcucaucaugaagaaccaccuccgggacaucaugugcauccccuacugcaacuacagcaaguacugguaccugaaccacacggugaccgggaagaccucccugccccgcugcuggcuggugagcaacggcuccuaccugaacgagacccacuucagcgacgacaucgagcagcaggccgacaacaugaucacggagcuccugcagaaggaguacaucgaccggcagggcaagaccccgcuggggcucgucgaccuguucguguucuccaccagcuucuaccugaucuccaucuuccugcaccucgugaagaucccgacccaccgccacaucacgggcaagcccugccccaagccccaccggcugaaccacauggggaucugcagcugcggccuguacaagcacccggggguccccgugaaguggaagcgcugaggacuaguaauaaggaaacuguaugaaugucugugggcaggaagugaagagauccuucuguaaagguuuuuggaauuaugucugcugaauaauaaacuuuuuugaaauaauaaaucugguagaaaaaugagaucucaaaggcucuuuucagagccaccaaaaaaaaaaaaaaaaaaaaaaaaaaaaaaaaaaaaaaaaaaaaaaaaaaaaaaaaaaaaaaaaaaaaaaaaaaaaaaaaaaaaaaaaaaaaaaaaaaaaa

SEQ ID NO: 35888 - RNA, 1809 nt, Artificial Sequence
  mRNA product Design b-4 (hSL-A100) comprising derived and/or modified sequence from LASV(Lassa virus/H.sapiens-wt/NGA/2016/ISTH_0009;Clade II)__AVO03571__GPCmut9 (opt1)
aggagagucccgcagucggcguccagcggcucugcuuguucgugugugugucguugcaggccuuauucaagcuuaccaugggccagaucaucaccuucuuccaggaggugccccacgucaucgaggaggugaugaacaucgugcugaucgcccucagccugcuggccauccucaaggggaucuacaacgucgcgaccugcggccugcuggggcucguguccuuccugcugcucugcggccgcagcugcuccacgaccuacaaggggguguacgagcugcagacccuggagcucgacauggccagccugaacaugaccaugccgcuguccugcacgaagaacaacagccaccacuacaucauggucggcaacgagaccggccucgagcugacccugaccaacacguccaucaucaaccacaaguucugcaaccucagcgacgcccacaagaagaaccuguacgaccacgcccugauguccaucaucagcaccuuccaccucuccauccccaacuucaaccaguacgaggccaugagcugcgacuucaacgggggccggaucuccgugcaguacaaccugagccacuccuacgcgguggacgccgccaaccacugcgggaccaucgccaacggcguccugcagaccuucaugcgcauggcguggggcgggagcuacaucgcccucgacuccggcugcgggagcugggacugcaucaugacguccuaccaguaccugaucauccagaacaccaccugggaggaccacugccaguucagccggcccagccccaucggcuaccuggggcuccugucccagcgcacccgggacaucuacaucagccgccggcugcucggcacguucaccuggacccuguccgacagcgagggcaacgagacccccgggggcuacugccugacgcgcuggaugcucaucgaggccgagcugaagugcuucgggaacaccgccguggccaagugcaacgagaagcacgacgaggaguucugcgacaugcugcggcuguucgacuucaacaagcaggcgauccgccggcugaagaccgaggcccagauguccauccagcugaucaacaaggccgugaacgcccucaucaacgaccagcugaucaugaagaaccaccuccgcgacaucaugugcaucccguacugcaacuacagcaaguacugguaccucaaccacaccgucacggggaagaccucccugccccggugcuggcuggugagcaacggcuccuaccucaacgagacccacuucagcgacgacaucgagcagcaggccgacaacaugaucaccgagcugcugcagaaggaguacaucgaccgccagggcaagacgccccucgggcugguggaccuguucgucuucuccaccagcuucuaccugaucuccaucuuccuccaccuggugaagaucccgacccaccggcacaucaccggcaagcccugccccaagccccaccgccugaaccacauggggaucugcagcugcggccucuacaaccacccgggggugcccgucaaguggaagcggugaggacuaguaauaaggaaacuguaugaaugucugugggcaggaagugaagagauccuucuguaaagguuuuuggaauuaugucugcugaauaauaaacuuuuuugaaauaauaaaucugguagaaaaaugagaucucaaaggcucuuuucagagccaccaaaaaaaaaaaaaaaaaaaaaaaaaaaaaaaaaaaaaaaaaaaaaaaaaaaaaaaaaaaaaaaaaaaaaaaaaaaaaaaaaaaaaaaaaaaaaaaaaaaaa

SEQ ID NO: 35889 - RNA, 1809 nt, Artificial Sequence
  mRNA product Design b-4 (hSL-A100) comprising derived and/or modified sequence from LASV(Lassa virus/H.sapiens-wt/NGA/2016/ISTH_0017;Clade II)__AVO03567__GPCmut9 (opt1)
aggagagucccgcagucggcguccagcggcucugcuuguucgugugugugucguugcaggccuuauucaagcuuaccaugggccagaucaucaccuucuuccaggaggugccccacgucaucgaggaggugaugaacaucgugcugaucgcccucagccugcuggccauccucaaggggaucuacaacgucgcgaccugcggccuguucgggcugguguccuuccuccugcugugcggccgcagcugcuccacgaccuacaaggggguguacgagcuccagacccuggagcuggacauggccagccucaacaugaccaugccgcuguccugcacgaagaacaacagccaccacuacaucauggucggcaacgagaccggccuggagcucacccugaccaacacguccaucaucaaccacaaguucugcaaccugagcgacgcccacaagaagaaccucuacgaccacgcccugauguccaucaucagcaccuuccaccuguccauccccaacuucaaccaguacgaggccaugagcugcgacuucaacgggggcaagaucuccgugcaguacaaccucagccacaccuacgcgaucgacgccgccaaccacugcgggaccaucgccaacggcgugcugcagacguucaugcggauggcguggggcggguccuacaucgcccuggacagcggcugcggguccugggacugcaucaugaccagcuaccaguaccucaucauccagaacaccaccugggaggaccacugccaguucucccgccccagccccaucggcuaccuggggcugcucagccagcggacgcgcgacaucuacaucucccggcgccugcugggcaccuucaccuggacccucagcgacuccgagggcaacgagacgcccgggggcuacugccugacccgguggaugcugaucgaggccgagcucaagugcuucgggaacaccgccgucgccaagugcaacgagaagcacgacgaggaguucugcgacaugcugcgccuguucgacuucaacaagcaggcgauccggcgccucaagaccgaggcccagaugagcauccagcugaucaacaaggccgugaacgcccugaucaacgaccagcucaucaugaagaaccaccuccgggacaucaugugcauccccuacugcaacuacuccaaguacugguaccugaaccacacggugaccgggaagaccagccugccccgcugcuggcuggucuccaacggcagcuaccugaacgagacccacuucuccgacgacaucgagcagcaggccgacaacaugaucacggagcuccugcagaaggaguacauggaccggcagggcaagaccccgcuggggcucguggaccuguucguguucagcaccuccuucuaccugaucagcaucuuccugcaccucguccgcaucccgacccaccggcacgugaucggcaagcccugccccaagccccaccgccugaaccacauggggaucugcuccugcggccuguacaagcacccgggggugcccgucaaguggaagcggugaggacuaguaauaaggaaacuguaugaaugucugugggcaggaagugaagagauccuucuguaaagguuuuuggaauuaugucugcugaauaauaaacuuuuuugaaauaauaaaucugguagaaaaaugagaucucaaaggcucuuuucagagccaccaaaaaaaaaaaaaaaaaaaaaaaaaaaaaaaaaaaaaaaaaaaaaaaaaaaaaaaaaaaaaaaaaaaaaaaaaaaaaaaaaaaaaaaaaaaaaaaaaaaaa

SEQ ID NO: 35890 - RNA, 1809 nt, Artificial Sequence
  mRNA product Design b-4 (hSL-A100) comprising derived and/or modified sequence from LASV(Lassa virus/H.sapiens-wt/NGA/2018/ISTH_0959;Clade II)__AVV65099__GPCmut9 (opt1)
aggagagucccgcagucggcguccagcggcucugcuuguucgugugugugucguugcaggccuuauucaagcuuaccaugggccagaucaucaccuucuuccaggaggugccccacgucaucgaggaggugaugaacaucgugcugaucgcccucagccugcuggccauccucaaggggaucuacaacgucgugaccugcggccuguucgggcugguguccuuccuccugcugugcggccgcagcugcuccacgaccuacaagggggucuacgagcuccagacccuggagcuggacauggcgagccucaacaugaccaugccgcuguccugcacgaagaacaacagccaccacuacaucauggugggcaacgagaccggccuggagcucacccugaccaacacguccaucaucaaccacaaguucugcaaccugagcgacgcccacaagaagaaccucuacgaccacgcccugauguccaucaucagcaccuuccaccuguccauccccaacuucaaccaguacgaggccaugagcugcgacuucaacgggggcaagaucuccgugcaguacaaccucagccacgccuacgcgaucgacgccgccaaccacugcgggaccaucgccaacggcguccugcagaccuucaugcggauggcguggggcggguccuacaucgcccuggacagcggcugcggguccugggacugcaucaugacgagcuaccaguaccucaucauccagaacaccaccugggaggaccacugccaguucucccgccccagccccaucggcuaccuggggcugcucagccagcggacccgcgacaucuacaucucccggcgccugcugggcacguucaccuggacccucagcgacuccgagggcaacgagacccccgggggcuacugccugacgcgguggaugcugaucgaggccgagcucaagugcuucgggaacaccgccguggccaagugcaacgagaagcacgacgaggaguucugcgacaugcugcgccuguucgacuucaacaagcaggcgauccggcgccucaagaccgaggcccagaugagcauccagcugaucaacaaggccgugaacgcccugaucaacgaccagcucaucaugaagaaccaccuccgggacaucaugugcaucccguacugcaacuacuccaaguacugguaccugaaccacaccgucacggggaagaccagccugccccgcugcuggcugguguccaacggcagcuaccugaacgagacccacuucuccgacgacaucgagcagcaggccgacaacaugaucaccgagcuccugcagaaggaguacaucgaccggcagggcaagacgccccuggggcucguggaccuguucgucuucagcaccuccuucuaccugaucagcaucuuccugcaccucgugaagaucccgacccaccgccacgugaucggcaagcccugccccaagccccaccggcugaaccacauggggaucugcuccugcggccuguacaagcacccggggguccccgugaaguggaagcgcugaggacuaguaauaaggaaacuguaugaaugucugugggcaggaagugaagagauccuucuguaaagguuuuuggaauuaugucugcugaauaauaaacuuuuuugaaauaauaaaucugguagaaaaaugagaucucaaaggcucuuuucagagccaccaaaaaaaaaaaaaaaaaaaaaaaaaaaaaaaaaaaaaaaaaaaaaaaaaaaaaaaaaaaaaaaaaaaaaaaaaaaaaaaaaaaaaaaaaaaaaaaaaaaaa

SEQ ID NO: 35891 - RNA, 1809 nt, Artificial Sequence
  mRNA product Design b-4 (hSL-A100) comprising derived and/or modified sequence from LASV(LASV003-NIG-2008;Clade II)__AIT17580__GPCmut9 (opt1)
aggagagucccgcagucggcguccagcggcucugcuuguucgugugugugucguugcaggccuuauucaagcuuaccaugggccagaucaucaccuucuuccaggaggugccccacgucaucgaggaggugaugaacaucgugcugaucgcccucagccugcuggccauccucaaggggaucuacaacgucgcgaccugcggccuguucgggcugguguccuuccuccugcugugcggccgcagcugcuccacgaccuacaaggggguguacgagcuccagacccuggagcuggacauggccagccucaacaugaccaugccgcuguccugcacgaagaacaacagccaccacuacaucauggucggcaacgagaccggccuggagcucacccugaccaacacguccaucaucaaccacaaguucugcaaccugagcgacgcccacaagaagaaccucuacgaccacgcccugauguccaucaucagcaccuuccaccuguccauccccaacuucaaccaguacgaggccaugagcugcgacuucaacgggggcaagaucuccgugcaguacaaccucagccacaccuacgcgguggacgccgccaaccacugcgggaccaucgccaacggcguccugcagacguucaugcggauggcguggggcggguccuacaucgcccuggacagcggcugcggguccugggacugcaucaugaccagcuaccaguaccucaucauccagaacaccaccugggaggaccacugccaguucucccgccccagccccaucggcuaccuggggcugcucagccagcggacgcgcgacaucuacaucucccggcgccugcugggcaccuucaccuggacccucagcgacuccgagagcaacgagacgccgggcggguacugccugacccgguggaugcugaucgaggccgagcucaagugcuucggcaacaccgccguggccaagugcaacgagaagcacgacgaggaguucugcgacaugcugcgccuguucgacuucaacaagcaggcgauccggcgccucaaggccgaggcccagauguccauccagcugaucaacaaggccgugaacgcccugaucaacgaccagcucaucaugaagaaccaccuccgggacaucaugugcauccccuacugcaacuacagcaaguacugguaccugaaccacaccgucacgggccgcaccucccugccccggugcuggcuggugagcaacggguccuaccugaacgagacccacuucagcgacgacaucgagcagcaggcggacaacaugaucaccgagcuccugcagaaggaguacauggaccgccagggcaagacgccccugggccucguggaccuguucgucuucuccaccagcuucuaccugaucuccaucuuccugcaccucgugaagaucccgacccaccggcacgugaucgggaagcccugccccaagccccaccgccugaaccacaugggcaucugcagcugcgggcuguacaagcacccgggcguccccgugaaguggaagcggugaggacuaguaauaaggaaacuguaugaaugucugugggcaggaagugaagagauccuucuguaaagguuuuuggaauuaugucugcugaauaauaaacuuuuuugaaauaauaaaucugguagaaaaaugagaucucaaaggcucuuuucagagccaccaaaaaaaaaaaaaaaaaaaaaaaaaaaaaaaaaaaaaaaaaaaaaaaaaaaaaaaaaaaaaaaaaaaaaaaaaaaaaaaaaaaaaaaaaaaaaaaaaaaaa

SEQ ID NO: 35892 - RNA, 1809 nt, Artificial Sequence
  mRNA product Design b-4 (hSL-A100) comprising derived and/or modified sequence from LASV(LASV035-NIG-2009;Clade II)__AIT17588__GPCmut9 (opt1)
aggagagucccgcagucggcguccagcggcucugcuuguucgugugugugucguugcaggccuuauucaagcuuaccaugggccagaucaucaccuucuuccaggaggugccccacgucaucgaggaggugaugaacaucgugcugaucgcccucagccugcuggccauccucaaggggaucuacaacgucgcgaccugcggccuguucgggcugguguccuuccuccugcugugcggccgcagcugcuccacgaccuacaaggggguguacgagcuccagacccuggagcuggacauggccagccucaacaugaccaugccgcuguccugcacgaagaacaacagccaccacuacaucauggucggcaacgagaccggccuggagcucacccugaccaacacguccaucaucaaccacaaguucugcaaccugagcgacgcccacaagaagaaccucuacgaccacgcccugauguccaucaucagcaccuuccaccuguccauccccaacuucaaccaguacgaggccaugagcugcgacuucaacgggggcaagaucuccgugcaguacaaccucagccacgcguacgccguggacgccgccaaccacugcgggaccaucgcgaacggcguccugcagaccuucaugcggauggccuggggcggguccuacaucgcccuggacagcggcugcggguccugggacugcaucaugacgagcuaccaguaccucaucauccagaacaccaccugggaggaccacugccaguucucccgccccagccccaucggcuaccuggggcugcucagccagcggacccgcgacaucuacaucucccggcgccugcugggcacguucaccuggacccucagcgacuccgagggcaacgagacccccgggggcuacugccugacgcgguggaugcugaucgaggccgagcucaagugcuucgggaacaccgccguggcgaagugcaacgagaagcacgacgaggaguucugcgacaugcugcgccuguucgacuucaacaagcaggccauccggcgccucaaggccgaggcccagaugagcauccagcugaucaacaaggccgugaacgcgcugaucaacgaccagcucaucaugaagaaccaccuccgggacaucaugugcauccccuacugcaacuacuccaaguacugguaccugaaccacaccgucaccgggaagacgagccugccccgcugcuggcugguguccaacggcagcuaccugaacgagacccacuucuccgacgacaucgagcagcaggccgacaacaugaucaccgagcuccugcagaaggaguacaucgaccggcagggcaagaccccgcuggggcucguggaccuguucgucuucagcacguccuucuaccugaucagcaucuuccugcaccucgugaagaucccgacccaccgccacgugaucggcaagcccugccccaagccccaccggcugaaccacauggggaucugcuccugcggccuguacaagcacccggggguccccgugaaguggaagcgcugaggacuaguaauaaggaaacuguaugaaugucugugggcaggaagugaagagauccuucuguaaagguuuuuggaauuaugucugcugaauaauaaacuuuuuugaaauaauaaaucugguagaaaaaugagaucucaaaggcucuuuucagagccaccaaaaaaaaaaaaaaaaaaaaaaaaaaaaaaaaaaaaaaaaaaaaaaaaaaaaaaaaaaaaaaaaaaaaaaaaaaaaaaaaaaaaaaaaaaaaaaaaaaaaa

SEQ ID NO: 35893 - RNA, 1809 nt, Artificial Sequence
  mRNA product Design b-4 (hSL-A100) comprising derived and/or modified sequence from LASV(LASV1000-NIG-2009;Clade II)__AIT17782__GPCmut9 (opt1)
aggagagucccgcagucggcguccagcggcucugcuuguucgugugugugucguugcaggccuuauucaagcuuaccaugggccagaucaucaccuucuuccaggaggugccccacgucaucgaggaggugaugaacaucgugcugaucgcccucagccugcuggccauccucaaggggaucuacaacgucgcgaccugcggccuguucgggcugguguccuuccuccugcugugcggccgcagcugcuccacgaccuacaaggggguguacgagcuccagacccuggagcuggacauggccagccucaacaugaccaugccgcuguccugcacgaagaacaacagccaccacuacaucauggucggcaacgagaccggccuggagcucacccugaccaacacguccaucaucaaccacaaguucugcaaccugagcgacgcccacaagaagaaccucuacgaccacgcccugauguccaucaucagcaccuuccaccuguccauccccaacuucaaccaguacgaggccaugagcugcgacuucaacgggggcaagaucuccgugcaguacaaccucagccacaccuacgcgguggacgccgccaaccacugcgggaccaucgccaacggcguccugcagacguucaugcggauggcguggggcggguccuacaucgcccuggacagcggcugcggguccugggacugcaucaugaccagcuaccaguaccucaucauccagaacaccaccugggaggaccacugccaguucucccgccccagccccaucggcuaccuggggcugcucagccagcggacgcgcgacaucuacaucucccggcgccugcugggcaccuucaccuggacccucagcgacuccgagggcaacgagacgcccgggggcuacugccugacccgguggaugcugaucgaggccgagcucaagugcuucgggaacaccgccguggccaagugcaacgagaagcacgacgaggaguucugcgacaugcugcgccuguucgacuucaacaagcaggcgaucaagcggcucaagaccgaggcccagaugagcauccagcugaucaacaaggccgugaacgcccugaucaacgaccagcucaucaugaagaaccaccuccgcgacaucaugugcauccccuacugcaacuacuccaaguacugguaccugaaccacacggucaccgggaagaccagccugccccggugcuggcugguguccaacggcagcuaccugaacgagacccacuucuccgacgacaucgagcagcaggccgacaacaugaucacggagcuccugcagaaggaguacaucgaccgccagggcaagaccccgcuggggcucguggaccuguucgucuucagcaccuccuucuaccugaucagcaucuuccugcaccucgugaagaucccgacccaccggcacguggucggcaagcccugccccaagccccaccgccugaaccacauggggaucugcuccugcggccuguacaagcacccgggggugcccgugaaguggaagcggugaggacuaguaauaaggaaacuguaugaaugucugugggcaggaagugaagagauccuucuguaaagguuuuuggaauuaugucugcugaauaauaaacuuuuuugaaauaauaaaucugguagaaaaaugagaucucaaaggcucuuuucagagccaccaaaaaaaaaaaaaaaaaaaaaaaaaaaaaaaaaaaaaaaaaaaaaaaaaaaaaaaaaaaaaaaaaaaaaaaaaaaaaaaaaaaaaaaaaaaaaaaaaaaaa

SEQ ID NO: 35894 - RNA, 1809 nt, Artificial Sequence
  mRNA product Design b-4 (hSL-A100) comprising derived and/or modified sequence from LASV(LASV221-NIG-2010;Clade II)__AIT17624__GPCmut9 (opt1)
aggagagucccgcagucggcguccagcggcucugcuuguucgugugugugucguugcaggccuuauucaagcuuaccaugggccagaucaucaccuucuuccaggaggugccccacgucaucgaggaggugaugaacaucgugcugaucgcccucagccugcuggccauccucaaggggaucuacaacgucgcgaccugcggccuguucgggcugguguccuuccuccugcugugcggccgcagcugcuccacgaccuacaaggggguguacgagcuccagacccuggagcuggacauggccagccucaacaugaccaugccgcuguccugcacgaagaacaacagccaccacuacaucauggucggcaacgagaccggccuggagcucacccugaccaacacguccaucaucaaccacaaguucugcaaccugagcgacgcccacaagaagaaccucuacgaccacgcccugauguccaucaucagcaccuuccaccuguccauccccaacuucaaccaguacgaggccaugagcugcgacuucaacgggggcaagaucuccgugcaguacaaccucagccacaccuacgcgaucgacgccgccaaccacugcgggaccaucgccaacggcgugcugcagacguucaugcggauggcguggggcggguccuacaucgcccuggacagcggcugcggguccugggacugcaucaugaccagcuaccaguaccucaucauccagaacaccaccugggaggaccacugccaguucucccgccccagccccaucggcuaccuggggcugcucagccagcggacgcgcgacaucuacaucucccggcgccugcugggcaccuucaccuggacccucagcgacuccgagggcaacgagacgcccgggggcuacugccugacccgguggaugcugaucgaggccgagcucaagugcuucgggaacaccgccgucgccaagugcaacgagaagcacgacgaggaguucugcgacaugcugcgccuguucgacuucaacaagcaggcgauccggcgccucaagaccgaggcccagaugagcauccagcugaucaacaaggccgugaacgcccugaucaacgaccagcucaucaugaagaaccaccuccgggacaucaugugcauccccuacugcaacuacuccaaguacugguaccugaaccacacggugaccgggaagaccagccugccccgcugcuggcuggucuccaacggcagcuaccugaacgagacccacuucuccgacgacaucgagcagcaggccgacaacaugaucacggagaugcuccagaaggaguacauggaccggcagggcaagaccccgcuggggcugguggaccucuucguguucagcaccuccuucuaccugaucagcaucuuccugcaccuggucaagaucccgacccaccgccacgugaucggcaagcccugccccaagccccaccggcucaaccacauggggaucugcuccugcggccuguacaagcacccgggggugcccgucaaguggaagcgcugaggacuaguaauaaggaaacuguaugaaugucugugggcaggaagugaagagauccuucuguaaagguuuuuggaauuaugucugcugaauaauaaacuuuuuugaaauaauaaaucugguagaaaaaugagaucucaaaggcucuuuucagagccaccaaaaaaaaaaaaaaaaaaaaaaaaaaaaaaaaaaaaaaaaaaaaaaaaaaaaaaaaaaaaaaaaaaaaaaaaaaaaaaaaaaaaaaaaaaaaaaaaaaaaa

SEQ ID NO: 35895 - RNA, 1809 nt, Artificial Sequence
  mRNA product Design b-4 (hSL-A100) comprising derived and/or modified sequence from LASV(LASV237-NIG-2010;Clade II)__AIT17638__GPCmut9 (opt1)
aggagagucccgcagucggcguccagcggcucugcuuguucgugugugugucguugcaggccuuauucaagcuuaccaugggccagaucaucaccuucuuccaggaggugccccacgucaucgaggaggugaugaacaucgugcugaucgcccucagccugcuggccauccucaaggggaucuacaacgucgcgaccugcggccuguucgggcugguguccuuccuccugcugugcggccgcagcugcuccacgaccuacaaggggguguacgagcuccagacccuggagcuggacauggccagccucaacaugaccaugccgcuguccugcacgaagaacaacagccaccacuacaucauggucggcaacgagaccggccuggagcucacccugaccaacacguccaucaucaaccacaaguucugcaaccugagcgacgcccacaagaaggaccucuacgaccacgcccugauguccaucaucagcaccuuccaccuguccauccccaacuucaaccaguacgaggccaugagcugcgacuucaacgggggcaagaucuccgugcaguacaaccucagccacaccuacgcgguggacgccgccaaccacugcgggaccaucgccaacggcguccugcagacguucaugcggauggcguggggcggguccuacaucgcccuggacagcggcugcggguccugggacugcaucaugaccagcuaccaguaccucaucauccagaacaccaccugggaggaccacugccaguucucccgccccagccccaucggcuaccuggggcugcucagccagcggacgcgcgacaucuacaucucccggcgccugcugggcaccuucaccuggacccucagcgacuccgagggcaacgagacgcccgggggcuacugccugacccgguggaugcugaucgaggccgagcucaagugcuucgggaacaccgccguggccaagugcaacgagaagcacgacgaggaguucugcgacaugcugcgccuguucgacuucaacaagcaggcgauccggcgccucaagaccgaggcccagaugagcauccagcugaucaacaaggccgugaacgcccugaucaacgaccagcucaucaugaagaaccaccuccgggacaucaugugcauccccuacugcaacuacuccaaguacugguaccugaaccacacggucaccgggaagaccagccugccccgcugcuggcugguguccaacggcagcuaccugaacgagacccacuucuccgacgacaucgagcagcaggccgacaacaugaucacggagcuccugcagaaggaguacauggaccggcagggcaagaccccgcuggggcucguggaccuguucgucuucagcaccuccuucuaccugaucagcaucuuccugcaccucaucaagaucccgacccaccgccacaucacgggcaagcccugccccaagccccaccggcugaaccacauggggaucugcuccugcggccuguacaagcacccgggggugcccgugaaguggaagcgcugaggacuaguaauaaggaaacuguaugaaugucugugggcaggaagugaagagauccuucuguaaagguuuuuggaauuaugucugcugaauaauaaacuuuuuugaaauaauaaaucugguagaaaaaugagaucucaaaggcucuuuucagagccaccaaaaaaaaaaaaaaaaaaaaaaaaaaaaaaaaaaaaaaaaaaaaaaaaaaaaaaaaaaaaaaaaaaaaaaaaaaaaaaaaaaaaaaaaaaaaaaaaaaaaa

SEQ ID NO: 35896 - RNA, 1809 nt, Artificial Sequence
  mRNA product Design b-4 (hSL-A100) comprising derived and/or modified sequence from LASV(LASV253-NIG-2011;Clade II)__AIT17670__GPCmut9 (opt1)
aggagagucccgcagucggcguccagcggcucugcuuguucgugugugugucguugcaggccuuauucaagcuuaccaugggccagaucaucaccuucuuccaggaggugccccacgucaucgaggaggugaugaacaucgugcugaucgcccucagccugcuggccauccucaaggggaucuacaacgucgcgaccugcggccuguucgggcugguguccuuccuccugcugugcggccgcagcugcuccacgaccuacaaggggguguacgagcuccagacccuggagcuggacauggccagccucaacaugaccaugccgcuguccugcacgaagaacaacagccaccacuacaucauggucggcaacgagaccggccuggagcucacccugaccaacacguccaucaucaaccacaaguucugcaaccugagcgacgcccacaagaagaaccucuacgaccacgcccugauguccaucaucagcaccuuccaccuguccauccccaacuucaaccaguacgaggccaugagcugcgacuucaacgggggcaagaucuccgugcaguacaaccucagccacaccuacgcgguggacgccgccaaccacugcgggaccaucgccaacggcguccugcagacguucaugcggauggcguggggcggguccuacaucgcccuggacagcggcugcggguccugggacugcaucaugaccagcuaccaguaccucaucauccagaacaccaccugggaggaccacugccaguucucccgccccagccccaucggcuaccuggggcugcucagccagcggacgcgcgacaucuacaucucccggcgccugcugggcaccuucaccuggacccucagcgacuccgagggcaacgagacgcccgggggcuacugccugacccgguggaugcugaucgaggccgagcucaagugcuucgggaacaccgccguggccaagugcaacgagaagcacgacgaggaguucugcgacaugcugcgccuguucgacuucaacaagcaggcgauccggcgccucaaggccgaggcccagaugagcauccagcugaucaacaaggccgugaacgcccugaucaacgaccagcucaucaugaagaaccaccuccgggacaucaugugcaucccguacugcaacuacuccaaguacugguaccugaaccacaccgucacggggcgcaccagccugccccggugcuggcugguguccaacggcagcuaccugaacgagacccacuucuccgacgacaucgagcagcaggcggacaacaugaucaccgagcuccugcagaaggaguacaucgaccgccagggcaagacgccccuggggcucguggaccuguucgucuucagcaccuccuucuaccugaucagcaucuuccugcaccucgugaagaucccgacccaccggcacaucaucggcaagcccugccccaagccccaccgccugaaccacauggggaucugcuccugcggccuguacaagcacccgggggugcccgucaaguggaagcggugaggacuaguaauaaggaaacuguaugaaugucugugggcaggaagugaagagauccuucuguaaagguuuuuggaauuaugucugcugaauaauaaacuuuuuugaaauaauaaaucugguagaaaaaugagaucucaaaggcucuuuucagagccaccaaaaaaaaaaaaaaaaaaaaaaaaaaaaaaaaaaaaaaaaaaaaaaaaaaaaaaaaaaaaaaaaaaaaaaaaaaaaaaaaaaaaaaaaaaaaaaaaaaaaa

SEQ ID NO: 35897 - RNA, 1809 nt, Artificial Sequence
  mRNA product Design b-4 (hSL-A100) comprising derived and/or modified sequence from LASV(LASV254-NIG-2011;Clade II)__AIT17674__GPCmut9 (opt1)
aggagagucccgcagucggcguccagcggcucugcuuguucgugugugugucguugcaggccuuauucaagcuuaccaugggccagaucaucaccuucuuccaggaggugccccacgucaucgaggaggugaugaacaucgugcugaucgcccucagccugcuggccauccucaaggggaucuacaacgucgcgaccugcggccuguucgggcugguguccuuccuccugcugugcggccgcagcugcuccacgaccuacaaggggguguacgagcuccagacccuggagcuggacaugaccaaccucaacaugacgaugccgcugagcugcaccaagaacaacucccaccacuacaucauggucggcaacgagaccggccuggagcucacccugacgaacaccagcaucaucaaccacaaguucugcaaccuguccgacgcccacaagaagaaccucuacaaccacgcccugaugagcaucaucuccaccuuccaccugagcauccccaacuucaaccaguacgaggccauguccugcgacuucaacgggggcaagaucagcgugcaguacaaccucucccacagcuacgccguggacgcggccaaccacugcgggaccaucgccaacggcguccugcagacguucaugcggauggccuggggcggguccuacaucgcgcuggacagcggcugcgggaacugggacugcaucaugaccuccuaccaguaccucaucauccagaacaccaccugggaggaccacugccaguucagccgccccucccccaucggcuaccuggggcugcucagccagcggacgcgcgacaucuacaucagccggcgccugcugggcaccuucaccuggacccucuccgacagcgagggcaacgagacgcccgggggcuacugccugacccgguggaugcugaucgaggccgagcucaagugcuucgggaacaccgccguggccaagugcaacgagaagcacgacgaggaguucugcgacaugcugcgccuguucgacuucaacaagcaggccauccggcgccucaagaccgaggcgcaggccaacauccagcugaucaacaaggccgugaacgcccugaucaacgaccagcucaucaugaagaaccaccuccgggacaucaugugcauccccuacugcaacuacuccaaguacugguaccugaaccacacggucaccgggaagaccagccugccccgcugcuggcugguguccaacggcagcuaccugaacgagacccacuucuccgacgacaucgagcagcaggccgacaacaugaucacggagcuccugcagaaggaguacauggaccggcagggcaagaccccgcuggggcucguggaccuguucgucuucagcaccuccuucuaccugaucagcaucuuccugcaccucgugaagaucccgacccaccgccacgugaucggcaagcccugccccaagccccaccggcugaaccacauggggaucugcuccugcggccuguacaagcacccggggguccccgugaaguggaagcgcugaggacuaguaauaaggaaacuguaugaaugucugugggcaggaagugaagagauccuucuguaaagguuuuuggaauuaugucugcugaauaauaaacuuuuuugaaauaauaaaucugguagaaaaaugagaucucaaaggcucuuuucagagccaccaaaaaaaaaaaaaaaaaaaaaaaaaaaaaaaaaaaaaaaaaaaaaaaaaaaaaaaaaaaaaaaaaaaaaaaaaaaaaaaaaaaaaaaaaaaaaaaaaaaaa

SEQ ID NO: 35898 - RNA, 1809 nt, Artificial Sequence
  mRNA product Design b-4 (hSL-A100) comprising derived and/or modified sequence from LASV(Nig08-A19;Clade III)__ADU56618__GPCmut9 (opt1)
aggagagucccgcagucggcguccagcggcucugcuuguucgugugugugucguugcaggccuuauucaagcuuaccaugggccagaucgugaccuucuuccaggaggucccccacgugaucgaggaggugaugaacaucguccugaucgcccucagcauccuggccauccugaaggggcucuacaacaucgcgaccugcggccugaucgggcuggugacguuccuccugcuguccggccgcagcugcuccaugaccuacaaggggguguacgagcuccagacccuggagcugaacaugaacacccucaacaugacgaugccgcugagcugcaccaagaacaacucccaccacuacaucauggucggcaacgagaccggccuggagcucacccugacgaacaccagccugcuccaccacaaguucugcaaccuguccgacgcccacaagaagaaccuguacgaccacacccucaugagcaucaucuccaccuuccaccugagcauccccaacuucaaccaguacgaggccauguccugcgacuucaacgggggcaagaucacggugcaguacaaccugagccacuccuacgccaucgacgccgcgaaccacugcgggaccguggccaacggcguccuccagaccuucaugcggauggccuggggcgggagcuacaucgcccuggacuccggcugcgggaagugggacugcaucaugaccagcuaccaguaccugaucauccagaacacgaccugggaggaccacugccaguucucccggcccagccccaucggcuaccucgggcugcugucccagcgcacccgggacaucuacaucagccgccggcuccugggcaccuucacguggacccugagcgacuccgagggcaacgagacccccgggggcuacugccucacccgcuggaugcugaucgaggcggagcugaagugcuucgggaacacggccguggccaagugcaacgagaagcacgacgaggaguucugcgacaugcuccggcuguucgacuucaacaagcaggccauccgccggcugaaggccgaggcgcagaugagcauccagcucaucaacaaggccgugaacgcccugaucaacgaccagcugaucaugaagaaccaccuccgcgacaucaugugcauccccuacugcaacuacuccaaguacugguaccugaaccacaccagcaccgggcggaccucccugccccgcugcuggcucgucagcaacggcuccuaccugaacgagacgcacuucagcgacgacaucgagcagcaggccgacaacaugaucaccgagaugcugcagaaggaguaccucgaccggcagggcaagaccccgcuggggcugguggaccuguucguguucuccaccagcuucuaccucaucuccaucuuccugcaccuggucaagaucccgacgcaccgccacaucgugggcaagcccugccccaagccccaccggcucaaccacauggggaucugcagcugcggccuguacaagcagccgggggugcccguccgcuggaagcggugaggacuaguaauaaggaaacuguaugaaugucugugggcaggaagugaagagauccuucuguaaagguuuuuggaauuaugucugcugaauaauaaacuuuuuugaaauaauaaaucugguagaaaaaugagaucucaaaggcucuuuucagagccaccaaaaaaaaaaaaaaaaaaaaaaaaaaaaaaaaaaaaaaaaaaaaaaaaaaaaaaaaaaaaaaaaaaaaaaaaaaaaaaaaaaaaaaaaaaaaaaaaaaaaa

SEQ ID NO: 35899 - RNA, 1812 nt, Artificial Sequence
  mRNA product Design b-4 (hSL-A100) comprising derived and/or modified sequence from LASV(G1180-SLE-2010;Clade IV)__AIT17168__GPCmut9 (opt1)
aggagagucccgcagucggcguccagcggcucugcuuguucgugugugugucguugcaggccuuauucaagcuuaccaugggccagaucgugaccuucuuccaggaggucccccacgugaucgaggaggugaugaacaucguccugaucgcccucagcauccuggccgugcugaaggggcucuacaacuucgcgaccugcggccugguggggcugcucaccuuccugcugcucugcggccgcuccugcaccgccagccgguacaagggggucuacgagcugcagacccuggagcucaacauggagacccugaacaugacgaugccgcuguccugcaccaagaacaacagccaccacuacaucauggugggcaacgagaccggccucgagcugacccugacgaacaccuccaucaucaaccacaaguucugcaaccucagcgacgcccacaagaagaaccuguacgaccacgcccugauguccaucaucagcaccuuccaccucuccauccccaacuucaaccaguacgaggccaugagcugcgacuucaacgggggcaagaucuccgugcaguacaaccugagccacuccuacgcgggggacgccgccaaccacugcggcaccgucgccaacggggugcugcagacguucaugcgcauggcguggggcggcagcuacaucgcccucgacuccgggugcggcagcugggacugcaucaugaccuccuaccaguaccugaucauccagaacaccaccugggaggaccacugccaguucagccggcccucccccaucggguaccugggccuccugagccagcgcacgcgggacaucuacaucagccgccggcugcucggcaccuucaccuggacccuguccgacagcgaggggaaggacacgccgggcggguacugccugacccgcuggaugcucaucgaggccgagcugaagugcuucggcaacaccgccguggccaagugcaacgagaagcacgacgaggaguucugcgacaugcugcggcuguucgacuucaacaagcaggcgauccagcgccugaaggccgaggcccagauguccauccagcugaucaacaaggccgucaacgcccucaucaacgaccagcugaucaugaagaaccaccuccgggacaucaugugcauccccuacugcaacuacagcaaguacugguaccucaaccacaccacgaccggcaagaccucccugcccaagugcuggcuggugagcaacggcuccuaccucaacgagacccacuucagcgacgacaucgagcagcaggcggacaacaugaucacggagaugcugcagaaggaguacauggagcgccaggggaagacgccccugggccucguggaccuguucgucuucuccaccagcuucuaccugaucuccaucuuccugcaccucgugaagaucccgacccaccggcacaucgugggcaagagcugccccaagccccaccgccugaaccacauggggaucugcuccugcgggcuguacaagcagcccggcgucccggugaaguggaagcggugaggacuaguaauaaggaaacuguaugaaugucugugggcaggaagugaagagauccuucuguaaagguuuuuggaauuaugucugcugaauaauaaacuuuuuugaaauaauaaaucugguagaaaaaugagaucucaaaggcucuuuucagagccaccaaaaaaaaaaaaaaaaaaaaaaaaaaaaaaaaaaaaaaaaaaaaaaaaaaaaaaaaaaaaaaaaaaaaaaaaaaaaaaaaaaaaaaaaaaaaaaaaaaaaa

SEQ ID NO: 35900 - RNA, 1812 nt, Artificial Sequence
  mRNA product Design b-4 (hSL-A100) comprising derived and/or modified sequence from LASV(G1442-SLE-2011;Clade IV)__AIT17180__GPCmut9 (opt1)
aggagagucccgcagucggcguccagcggcucugcuuguucgugugugugucguugcaggccuuauucaagcuuaccaugggccagaucgugaccuucuuccaggaggucccccacgugaucgaggaggugaugaacaucguccugaucgcccucagcauccuggccgugcugaaggggcucuacaacguggcgaccugcggccugaucgggcuggucacguuccuccugcugugcggccgcuccugcaccaccacccucuacaaggggguguacgagcugcagacgcuggagcucaacauggagacccugaacaugaccaugccgcugagcugcaccaagaacaacucccaccacuacauccgggugggcaacgagacgggccucgagcugacccugaccaacaccagcaucaucaaccacaaguucugcaaccucuccgacgcccacaagaagaaccuguacgaccacgcccugaugagcaucaucuccacguuccaccucagcauccccaacuucaaccaguacgaggccauguccugcgacuucaacgggggcaagaucagcguccaguacaaccugucccacagcuacgccggggacgcggccaaccacugcggcaccguggccaacggggugcugcagaccuucaugcgcauggccuggggcggcuccuacaucgcgcucgacagcgggugcggcaacugggacugcaucaugaccuccuaccaguaccugaucauccagaacacgaccugggacgaccacugccaguucagccgccccucccccaucggguaccugggccuccugagccagcggacccgcgacgucuacaucucccggcgccugcucggcaccuucacguggacccugagcgacagcgaggggaaggacaccccgggcggguacugccugacccgguggaugcucaucgaggccgagcugaagugcuucggcaacacggccguggccaagugcaacgagaagcacgacgaggaguucugcgacaugcugcgccucuucgacuucaacaagcaggccauccagcggcugaaggcggaggcccagauguccauccagcugaucaacaaggccgugaacgcccucaucaacgaccagcugaucaugaagaaccaccuccgcgacaucaugugcauccccuacugcaacuacagcaaguacugguaccugaacaacaccgccaccggcaagaccucccugcccaagugcuggcugaucagcaacggcuccuaccucaacgagacgcacuucagcgacgacaucgagcaggaggcggacaacaugaucaccgagaugcugcagaaggaguacauggagcggcaggggaagacgccccugggccucgucgaccuguucguguucuccaccagcuucuaccugaucuccaucuuccugcaccucgugaagaucccgacccaccgccacaucgucggcaagagcugccccaagccccaccggcugaaccacauggggaucugcuccugcgggcuguacaagcagcccggcgugccggugcgcuggaagcggugaggacuaguaauaaggaaacuguaugaaugucugugggcaggaagugaagagauccuucuguaaagguuuuuggaauuaugucugcugaauaauaaacuuuuuugaaauaauaaaucugguagaaaaaugagaucucaaaggcucuuuucagagccaccaaaaaaaaaaaaaaaaaaaaaaaaaaaaaaaaaaaaaaaaaaaaaaaaaaaaaaaaaaaaaaaaaaaaaaaaaaaaaaaaaaaaaaaaaaaaaaaaaaaaa

SEQ ID NO: 35901 - RNA, 1812 nt, Artificial Sequence
  mRNA product Design b-4 (hSL-A100) comprising derived and/or modified sequence from LASV(G3010-SLE-2013;Clade IV)__AIT17344__GPCmut9 (opt1)
aggagagucccgcagucggcguccagcggcucugcuuguucgugugugugucguugcaggccuuauucaagcuuaccaugggccagaucgugaccuucuuccaggaggucccccacgugaucgaggaggugaugaacaucguccugaucgcccucagcauccuggccgugcugaaggggcucuacaacuucgcgaccugcggccugguggggcuggucacguuccuccugcugugcggccgcuccugcaccaccagccucuacaaggggguguacgagcugcagacccuggagcucaacauggagacgcugaacaugaccaugccgcuguccugcaccaagaacaacagccaccacuacaucauggugggcaacgagaccggccucgagcugacgcugaccaacaccuccaucaucaaccacaaguucugcaaccucagcgacgcccacaagaagaaccuguacaaccacgcccugauguccaucaucagcaccuuccaccucuccauccccaacuucaaccaguacgaggccaugagcugcgacuucaacgggggcaagaucuccguccaguacaaccugagccacuccuacgccggggacgcggccagccacugcggcacgguggccaacggggugcugcagaccuucaugcggauggccuggggcggcuccuacaucgcgcucgacagcgggugcggcaagugggacugcaucaugaccuccuaccaguaccugaucauccagaacaccacgugggaggaccacugccaguucagccgccccucccccaucggguaccugggccuccugagccagcggacccgcgacaucuacaucagccggcgccugcucggcaccuucaccuggacgcuguccgacagcgaggggaaggacaccccgggcggguacugccugacccgguggaugcucaucgaggccgagcugaagugcuucggcaacaccgccgucgccaagugcaacgagaagcacgacgaggaguucugcgacaugcugcgccucuucgacuucaacaagcaggccauccagcggcugaagacggaggcgcagauguccauccagcugaucaacaaggccgugaacgcccucaucaacgaccagcugaucaugaagaaccaccuccgcgacaucaugugcauccccuacugcaacuacagcaaguacugguaccugaaccacaccaccaccggcaagacgucccugcccaagugcuggcuggugagcaacggcuccuaccucaacgagacccacuucagcgacgacaucgagcagcaggccgacaacaugaucaccgagaugcugcagaaggaguacauggagcggcaggggaagacgccccugggccucgucgaccuguucguguucuccaccagcuucuaccugaucuccaucuuccugcaccucgugaagaucccgacccaccgccacaucgucggcaagagcugccccaagccccaccggcugaaccacauggggaucugcuccugcgggcuguacaagcagcccggcgugccggugcgcuggaagcggugaggacuaguaauaaggaaacuguaugaaugucugugggcaggaagugaagagauccuucuguaaagguuuuuggaauuaugucugcugaauaauaaacuuuuuugaaauaauaaaucugguagaaaaaugagaucucaaaggcucuuuucagagccaccaaaaaaaaaaaaaaaaaaaaaaaaaaaaaaaaaaaaaaaaaaaaaaaaaaaaaaaaaaaaaaaaaaaaaaaaaaaaaaaaaaaaaaaaaaaaaaaaaaaaa

SEQ ID NO: 35902 - RNA, 1812 nt, Artificial Sequence
  mRNA product Design b-4 (hSL-A100) comprising derived and/or modified sequence from LASV(G502-SLE-2009;Clade IV)__AIT17126__GPCmut9 (opt1)
aggagagucccgcagucggcguccagcggcucugcuuguucgugugugugucguugcaggccuuauucaagcuuaccaugggccagaucgugaccuucuuccaggaggucccccacgugaucgaggaggugaugaacaucguccugaucgcccucagcauccuggccgugcugaaggggcucuacaacuucgcgaccugcggccugguggggcugcucacguuccugcugcucugcggccgcuccugcaccaccgggcuguacaagggcgucuacgagcugcagacccucgagcugaacauggagacgcugaacaugaccaugccgcucagcugcaccaagaacaacucccaccacuacaucauggugggcaacgagaccgggcuggagcugacgcucaccaacaccagcaucaucaaccacaaguucugcaaccuguccgacgcccacaagaagaaccuguacgaccacgcccucaugagcaucaucuccaccuuccaccugagcauccccaacuucaaccaguacgaggccauguccugcgacuucaacggcgggaagaucagcgugcaguacaaccugucccacagcuacgccggcgacgcggccgaccacugcgggacggucgccaacggcgugcuccagaccuucaugcggauggccuggggcggguccuacaucgcgcuggacagcggcugcgggcggugggacugcaucaugaccuccuaccaguaccugaucauccagaacaccacgugggaggaccacugccaguucagccgccccucccccaucggcuaccucggccugcugagccagcggacccgcgacaucuacaucucccggcgccuccuggggaccuucaccuggacgcugagcgacagcgagggcaaggacacccccgggggcuacugccucacccgguggaugcugaucgaggccgagcugaagugcuucgggaacaccgccguggccaagugcaacgagaagcacgacgaggaguucugcgacaugcuccgccuguucgacuucaacaagcaggccauccagcggcugaaggcggaggcccagauguccauccagcucaucaacaaggccgucaacgcccugaucaacgaccagcuggugaugaagaaccaccuccgcgacaucaugugcauccccuacugcaacuacagccgguacugguaccugaaccacacgaccaccggccgcaccucccugcccaagugcuggcucgugagcaacggguccuaccugaacgagacgcacuucagcgacgacaucgagcagcaggccgacaacaugaucaccgagaugcugcagaaggaguacauggagcggcagggcaagaccccgcucgggcuggucgaccuguucguguucuccaccagcuucuaccugaucuccaucuuccuccaccuggugaagaucccgacgcaccgccacaucgucggcaagagcugccccaagccccaccggcugaaccacauggggaucugcuccugcggccucuacaagcagcccggcgugccggugaaguggaagcgcugaggacuaguaauaaggaaacuguaugaaugucugugggcaggaagugaagagauccuucuguaaagguuuuuggaauuaugucugcugaauaauaaacuuuuuugaaauaauaaaucugguagaaaaaugagaucucaaaggcucuuuucagagccaccaaaaaaaaaaaaaaaaaaaaaaaaaaaaaaaaaaaaaaaaaaaaaaaaaaaaaaaaaaaaaaaaaaaaaaaaaaaaaaaaaaaaaaaaaaaaaaaaaaaaa

SEQ ID NO: 35903 - RNA, 1812 nt, Artificial Sequence
  mRNA product Design b-4 (hSL-A100) comprising derived and/or modified sequence from LASV(G733-SLE-2010;Clade IV)__AIT17154__GPCmut9 (opt1)
aggagagucccgcagucggcguccagcggcucugcuuguucgugugugugucguugcaggccuuauucaagcuuaccaugggccagaucgugaccuucuuccaggaggucccccacgugaucgaggaggugaugaacaucguccugaucgcccucagcauccuggccgugcugaaggggcucuacaacuucgcgaccugcggcaucguggggcuggucuccuuccugcuccugugcggccgcagcugcacgaccucccuguacaaggggguguacgagcuccagacccuggagcugaacauggagacccucaacaugacgaugccgcugagcugcaccaagaacaacucccaccacuacaucauggugggcaacgagaccggccuggagcucacccugacgaacaccagcaucaucaaccacaaguucugcaaccuguccgacgcccacaagaagaaccucuacgaccacgcccugaugagcaucaucuccaccuuccaccugagcauccccaacuucaaccaguacgaggccauguccugcgacuucaacgggggcaagaucagcguccaguacaaccucucccacagcuacgccggggacgcggccaaccacugcggcaccaucgccaacggggugcugcagacguucaugcggauggccuggggcggcuccuacaucgcgcuggacagcgggugcgaccggugggacugcaucaugaccuccuaccaguaccucaucauccagaacaccaccugggaggaccacugccaguucagccgccccucccccaucggcuaccuggggcugcucagccagcggacgcgcgacaucuacaucagccggcgccugcugggcaccuucaccuggacccucuccgacagcgagggcaaggacacgcccgggggcuacugccugacccgguggaugcugaucgaggccgagcucaagugcuucgggaacaccgccguggccaagugcaacgagaagcacgacgaggaguucugcgacaugcugcgccuguucgacuucaacaagcaggccauccagcggcucaaggcggaggcccagauguccauccagcugaucaacaaggccgucaacgcccugaucaacgaccagcucaucaugaagaaccaccuccgcgacaucaugugcauccccuacugcaacuacagcaaguacugguaccugaaccacaccacgaccgggaagaccucccugcccaagugcuggcuggugagcaacggcuccuaccugaacgagacccacuucagcgacgacaucgagcagcaggccgacaacaugaucacggagaugcuccagaaggaguacauggagcggcagggcaagaccccgcuggggcugguggaccucuucgucuucuccaccagcuucuaccugaucuccaucuuccugcaccuggugaagaucccgacccaccgccacguggucggcaagagcugccccaagccccaccggcucaaccacauggggaucugcuccugcggccuguacgggcagcccggcgugccggugaaguggaagcgcugaggacuaguaauaaggaaacuguaugaaugucugugggcaggaagugaagagauccuucuguaaagguuuuuggaauuaugucugcugaauaauaaacuuuuuugaaauaauaaaucugguagaaaaaugagaucucaaaggcucuuuucagagccaccaaaaaaaaaaaaaaaaaaaaaaaaaaaaaaaaaaaaaaaaaaaaaaaaaaaaaaaaaaaaaaaaaaaaaaaaaaaaaaaaaaaaaaaaaaaaaaaaaaaaa

SEQ ID NO: 35904 - RNA, 1812 nt, Artificial Sequence
  mRNA product Design b-4 (hSL-A100) comprising derived and/or modified sequence from MOPV/LASV reassortant(IGS-1;Clade IV)__AFY05576__GPCmut9 (opt1)
aggagagucccgcagucggcguccagcggcucugcuuguucgugugugugucguugcaggccuuauucaagcuuaccaugggccagaucgugaccuucuuccaggaggucccccacgugaucgaggaggugaugaacaucguccugaucgcccucagcgugcuggccgugcugaaggggcucuacaacuucgcgaccugcggccuggucgggcuggugacguuccuccugcugugcggccgcuccugcaccaccagccucuacaaggggguguacgagcugcagacccuggagcucaacauggagacgcugaacaugaccaugccgcuguccugcaccaagaacaacagccaccacuacaucauggucggcaacgagaccggccucgagcugacgcugaccaacaccuccaucaucaaccacaaguucugcaaccucagcgacgcccacaagaagaaccuguacgaccacgcccugauguccaucaucagcaccuuccaccucuccauccccaacuucaaccaguacgaggccaugagcugcgacuucaacgggggcaagaucuccgugcaguacaaccugagccacuccuacgccggggacgcggccaaccacugcggcacgguggccaacgggguccugcagaccuucaugcggauggccuggggcggcagcuacaucgcgcucgacuccgggugcggcaacugggacugcaucaugaccagcuaccaguaccugaucauccagaacaccacgugggaggaccacugccaguucucccggcccagccccaucggguaccugggccuccugucccagcgcacccgggacaucuacaucagccgccggcugcucggcaccuucaccuggacgcugagcgacuccgagggggaggacaccccgggcggguacugccugacccgcuggaugcucaucgaggccgagcugaagugcuucggcaacaccgccguggccaagugcaacgagaagcacgacgaggaguucugcgacaugcugcggcuguucgacuucaacaagcaggccauccagcgccugaaggcggaggcccagaugagcauccagcugaucaacaaggccgugaacgcccucaucaacgaccagcugaucaugaagaaccaccuccgggacaucaugugcauccccuacugcaacuacuccaaguacugguaccucaaccacacgaccaccggccgcaccagccugcccaagugcuggcuggucuccaacggcagcuaccucaacgagacgcacuucuccgacgacaucgagcagcaggccgacaacaugaucaccgagaugcugcagaaggaguacauggagcggcaggggaagacgccccugggccucguggaccuguucguguucagcaccuccuucuaccugaucagcaucuuccugcaccucgucaagaucccgacccaccgccacaucguggggaaguccugccccaagccccaccggcugaaccacaugggcaucugcagcugcgggcuguacaagcagcccggcgugccggucaaguggaagcgcugaggacuaguaauaaggaaacuguaugaaugucugugggcaggaagugaagagauccuucuguaaagguuuuuggaauuaugucugcugaauaauaaacuuuuuugaaauaauaaaucugguagaaaaaugagaucucaaaggcucuuuucagagccaccaaaaaaaaaaaaaaaaaaaaaaaaaaaaaaaaaaaaaaaaaaaaaaaaaaaaaaaaaaaaaaaaaaaaaaaaaaaaaaaaaaaaaaaaaaaaaaaaaaaaa

SEQ ID NO: 35905 - RNA, 1812 nt, Artificial Sequence
  mRNA product Design b-4 (hSL-A100) comprising derived and/or modified sequence from LASV(LM765-SLE-2012;Clade IV)__AIT17814__GPCmut9 (opt1)
aggagagucccgcagucggcguccagcggcucugcuuguucgugugugugucguugcaggccuuauucaagcuuaccaugggccagaucgugaccuucuuccaggaggucccccacgugaucgaggaggugaugaacaucguccugaucgcccucagcauccuggccgugcugaaggggcucuacaacuucgcgaccugcggccugguggggcuggucacguuccuccugcugugcggccgcuccugcaccaccagccucuacaaggggguguacgagcugcagacccuggagcucaacauggagacgcugaacaugaccaugccgcuguccugcaccaagaacaacagccaccacuacaucauggugggcaacgagaccggccucgagcugacgcugaccaacaccuccaucaucgaccacaaguucugcaaccucagcgacgcccaccggaagaaccuguacgaccacgcccugauguccaucaucagcaccuuccaccucuccauccccaacuucaaccaguacgaggccaugagcugcgacuucaacgggggcaagaucuccguccaguacaaccugagccacuccuacgccaaggacgcggccgaccacugcgggacgguggccaacggcgugcugcagaccuucaugcgcauggccuggggcgggagcuacaucgcgcucgacuccggcugcgggcgcugggacugcaucaugaccagcuaccaguaccugaucauccagaacaccacgugggaggaccacugccaguucucccggcccagccccaucggcuaccuggggcuccugucccagcgcacccgggacaucuacaucagccgccggcugcucggcaccuucaccuggacgcugagcgacuccgagggcaaggacacccccgggggcuacugccugacccgcuggaugcucaucgaggccgagcugaagugcuucgggaacaccgccgucgccaagugcaacgagaagcacgacgaggaguucugcgacaugcugcggcuguucgacuucaacaagcaggccauccagcgccugaaggcggaggcccagaugagcauccagcugaucaacaaggccgugaacgcccucaucaacgaccagcugaucaugaagaaccaccuccgggacaucaugugcauccccuacugcaacuacuccaaguacugguaccucaaccacacgaccaccgggaagaccagccugcccaagugcuggcugguguccaacggcagcuaccucaacgagacgcacuucuccgacgacaucgagcagcaggccgacaacaugaucaccgagaugcugcagaaggaguacauggagcgccagggcaagaccccgcuggggcucgucgaccuguucguguucagcaccuccuucuaccugaucagcaucuuccugcaccucgugaagaucccgacgcaccggcacaucgucggcaagcccugccccaagccccaccgccugaaccacauggggaucugcuccugcggccuguacaagcagccgggggugcccgugaaguggaagcggugaggacuaguaauaaggaaacuguaugaaugucugugggcaggaagugaagagauccuucuguaaagguuuuuggaauuaugucugcugaauaauaaacuuuuuugaaauaauaaaucugguagaaaaaugagaucucaaaggcucuuuucagagccaccaaaaaaaaaaaaaaaaaaaaaaaaaaaaaaaaaaaaaaaaaaaaaaaaaaaaaaaaaaaaaaaaaaaaaaaaaaaaaaaaaaaaaaaaaaaaaaaaaaaaa

SEQ ID NO: 35906 - RNA, 1812 nt, Artificial Sequence
  mRNA product Design b-4 (hSL-A100) comprising derived and/or modified sequence from LASV(LM776-SLE-2012;Clade IV)__AIT17824__GPCmut9 (opt1)
aggagagucccgcagucggcguccagcggcucugcuuguucgugugugugucguugcaggccuuauucaagcuuaccaugggccagaucgugaccuucuuccaggaggucccccacgugaucgaggaggugaugaacaucguccugaucgcccucagcauccuggccgugcugaaggggcucuacaacuucgcgaccugcggccugguggggcuggucacguuccuccugcugugcggccgcuccugcaccaccagcguguacaaggggguguacgagcuccagacccuggagcugaacauggagacgcucaacaugaccaugccgcuguccugcaccaagaacaacagccaccacuacaucauggucggcaacgagaccggccuggagcucacgcugaccaacaccuccaucaucaaccacaaguucugcaaccugagcgacgcccacaagaagaaccucuacgaccacgcccugauguccaucaucagcaccuuccaccuguccauccccaacuucaaccaguacgaggccaugagcugcgacuucaacgggggcaagaucuccgugcaguacaaccucagccacuccuacgccggggacgcggccaaccacugcggcacgguggccaacgggguccugcagaccuucaugcggauggccuggggcggcagcuacaucgcgcuggacuccgggugcggcaagugggacugcaucaugaccagcuaccaguaccucaucauccagaacaccacgugggaggaccacugccaguucucccgccccagccccaucggguaccugggccugcucucccagcggacccgcgacaucuacaucagccggcgccugcugggcaccuucaccuggacgcucagcgacuccgaggggaaggacaccccgggcggguacugccugacccgguggaugcugaucgaggccgagcucaagugcuucggcaacaccgccguggccaagugcaacgagaagcacgacgaggaguucugcgacaugcugcgccuguucgacuucaacaagcaggccauccagcggcucaaggcggaggcccagaugagcauccagcugaucaacaaggccgugaacgcccugaucaacgaccagcucaucaugaagaaccaccuccgcgacaucaugugcauccccuacugcaacuacuccaaguacugguaccugaaccacacgaccaccggcaagaccagccugcccaagugcuggcuggucuccaacggcagcuaccugaacgagacgcacuucuccgacgacaucgagcagcaggccgacaacaugaucaccgagaugcuccagaaggaguacauggagcggcaggggaagacgccccugggccugguggaccucuucguguucagcaccuccuucuaccugaucagcaucuuccugcaccuggucaagaucccgacccaccgccacaucguggggaaguccugccccaagccccaccggcucaaccacaugggcaucugcagcugcgggcuguacaagcagcccggcgugccgguccgcuggaagcggugaggacuaguaauaaggaaacuguaugaaugucugugggcaggaagugaagagauccuucuguaaagguuuuuggaauuaugucugcugaauaauaaacuuuuuugaaauaauaaaucugguagaaaaaugagaucucaaaggcucuuuucagagccaccaaaaaaaaaaaaaaaaaaaaaaaaaaaaaaaaaaaaaaaaaaaaaaaaaaaaaaaaaaaaaaaaaaaaaaaaaaaaaaaaaaaaaaaaaaaaaaaaaaaaa

SEQ ID NO: 35907 - RNA, 1812 nt, Artificial Sequence
  mRNA product Design b-4 (hSL-A100) comprising derived and/or modified sequence from LASV(Mad39;Clade IV)__ANH09722__GPCmut9 (opt1)
aggagagucccgcagucggcguccagcggcucugcuuguucgugugugugucguugcaggccuuauucaagcuuaccaugggccagaucgugaccuucuuccaggaggucccccacgugaucgaggaggugaugaacaucguccugaucgcccucagcauccuggccgugcugaaggggcucuacaacguggcgaccugcggccugaucgggcuggucacguuccuccugcugugcggccgcuccugcaccaccacccucuacaaggggguguacgagcugcaggcccuggagcucaacauggagacgcugaacaugaccaugccgcugagcugcaccaagaacaacucccaccacuacauccgggugggcaacgagaccggccucgagcugacgcugaccaacaccagccucaucaaccacaaguucugcaaccuguccgacgcccacaagaagaaccuguacgaccacgcccucaugagcaucaucuccaccuuccaccugagcauccccaacuucaaccaguacgaggccauguccugcgacuucaacgacgggaagaucagcguccaguacaaccugucccacacguacgcgggcgacaccgccaaccacugcgggaccguggccaacggcgugcuccagaccuucaugcgcauggccuggggcgggagcuacaucgcgcuggacuccggcugcgggggcugggacugcaucaugacgagcuaccaguaccugaucauccagaacaccaccugggaggaccacugccaguucucccggcccagccccaucggguaccucggccugcugucccagcggacccgcgacaucuacaucagccggcgccuccugggcacguucaccuggacccuguccgacagcgaggggaaggacaccccgggcggguacugccucacgcgguggaugcugaucgaggccgagcugaagugcuucggcaacaccgccgucgccaagugcaacgagaagcacgacgaggaguucugcgacaugcuccgccuguucgacuucaacaagcaggccauccagcggcugaaggcggaggcccagaugagcauccagcucaucaacaaggccgugaacgcccugaucaacgaccagcugaucaugaagaaccaccuccgcgacaucaugugcauccccuacugcaacuacuccaaguacugguaccugaaccacaccgugaccggcaagacgagccugcccaagugcuggcucgucuccaacggcagcuaccugaacgagacccacuucuccgacgacaucgagcagcaggccgacaacaugaucaccgagaugcugcagaaggaguacauggagcggcaggggaagacgccccucggccugguggaccuguucguguucagcaccuccuucuaccugaucagcaucuuccuccaccuggucaagaucccgacccaccgccacgugguggggaagcccugccccaagccccaccggcugaaccacaugggcaucugcuccugcggguucuacaagcagccgggcguccccgugcgcuggaagcggugaggacuaguaauaaggaaacuguaugaaugucugugggcaggaagugaagagauccuucuguaaagguuuuuggaauuaugucugcugaauaauaaacuuuuuugaaauaauaaaucugguagaaaaaugagaucucaaaggcucuuuucagagccaccaaaaaaaaaaaaaaaaaaaaaaaaaaaaaaaaaaaaaaaaaaaaaaaaaaaaaaaaaaaaaaaaaaaaaaaaaaaaaaaaaaaaaaaaaaaaaaaaaaaaa

SEQ ID NO: 35908 - RNA, 1812 nt, Artificial Sequence
  mRNA product Design b-4 (hSL-A100) comprising derived and/or modified sequence from LASV(Z0947-SLE-2011;Clade IV)__AIT17840__GPCmut9 (opt1)
aggagagucccgcagucggcguccagcggcucugcuuguucgugugugugucguugcaggccuuauucaagcuuaccaugggccagaucgugaccuucuuccaggaggucccccacgugaucgaggaggugaugaacaucguccugaucgcccucagcauccuggccgugcugaaggggcucuacaacuucgcgaccugcggccugguggggcuggucacguuccuccugcugugcggccgcuccugcaccaucagccucuacaaggggguguacgagcugcagacccuggagcucaacauggagacccugaacaugacgaugccgcuguccugcaccaagaacaacagccaccacuacaucauggugggcaacgagaccggccucgagcugacccugacgaacaccuccaucaucaaccacaaguucugcaaccucagcgacgcccacaagaagaaccuguacgaccacgcccugauguccaucaucagcaccuuccaccucuccauccccaacuucaaccaguacgaggccaugagcugcgacuucaacgggggcaagaucuccguccaguacaaccugagccacuccuacgccggggacgcggccaaccacugcggcaccguggccaacggggugcugcagacguucaugcggauggccuggggcggcagcuacaucgcgcucgacuccgggugcgaccggugggacugcaucaugaccagcuaccaguaccugaucauccagaacaccaccugggaggaccacugccaguucucccgccccagccccaucggcuaccuggggcuccugucccagcggacgcgcgacaucuacaucagccggcgccugcucggcaccuucaccuggacccugagcgacuccgagggcaaggacacgcccgggggcuacugccugacccgguggaugcucaucgaggccgagcugaagugcuucgggaacaccgccgucgccaagugcaacgagaagcacgacgaggaguucugcgacaugcugcgccucuucgacuucaacaagcaggccauccagcggcugaaggcggaggcccagaugagcauccagcugaucaacaaggccgugaacgcccucaucaacgaccagcugaucaugaagaaccaccuccgcgacaucaugugcauccccuacugcaacuacuccaaguacugguaccugaaccacaccacgaccgggaagaccagccugcccaagugcuggcugguguccaacggcagcuaccucaacgagacccacuucuccgacgacaucgagcagcaggccgacaacaugaucacggagaugcugcagaaggaguacauggagcggcagggcaagaccccgcuggggcucgucgaccuguucguguucagcaccuccuucuaccugaucagcaucuuccugcaccucgugaagaucccgacccaccgccacaucgucggcaagcccugccccaagccccaccggcugaaccacauggggaucugcuccugcggccuguacaagcagccgggggugcccgugaaguggaagcgcugaggacuaguaauaaggaaacuguaugaaugucugugggcaggaagugaagagauccuucuguaaagguuuuuggaauuaugucugcugaauaauaaacuuuuuugaaauaauaaaucugguagaaaaaugagaucucaaaggcucuuuucagagccaccaaaaaaaaaaaaaaaaaaaaaaaaaaaaaaaaaaaaaaaaaaaaaaaaaaaaaaaaaaaaaaaaaaaaaaaaaaaaaaaaaaaaaaaaaaaaaaaaaaaaa

SEQ ID NO: 35909 - RNA, 1812 nt, Artificial Sequence
  mRNA product Design b-4 (hSL-A100) comprising derived and/or modified sequence from LASV(Josiah;Clade IV)__NP_694870__GPCmut9 (opt1)
aggagagucccgcagucggcguccagcggcucugcuuguucgugugugugucguugcaggccuuauucaagcuuaccaugggccagaucgugaccuucuuccaggaggucccccacgugaucgaggaggugaugaacaucguccugaucgcccucagcgugcuggccgugcugaaggggcucuacaacuucgcgaccugcggccuggucgggcuggugacguuccuccugcugugcggccgcuccugcaccaccagccucuacaaggggguguacgagcugcagacccuggagcucaacauggagacgcugaacaugaccaugccgcuguccugcaccaagaacaacagccaccacuacaucauggucggcaacgagaccggccucgagcugacgcugaccaacaccuccaucaucaaccacaaguucugcaaccucagcgacgcccacaagaagaaccuguacgaccacgcccugauguccaucaucagcaccuuccaccucuccauccccaacuucaaccaguacgaggccaugagcugcgacuucaacgggggcaagaucuccgugcaguacaaccugagccacuccuacgccggggacgcggccaaccacugcggcacgguggccaacgggguccugcagaccuucaugcggauggccuggggcggcagcuacaucgcgcucgacuccgggugcggcaacugggacugcaucaugaccagcuaccaguaccugaucauccagaacaccacgugggaggaccacugccaguucucccgccccagccccaucggguaccugggccuccugucccagcggacccgcgacaucuacaucagccggcgccugcucggcaccuucaccuggacgcugagcgacuccgaggggaaggacaccccgggcggguacugccugacccgguggaugcucaucgaggccgagcugaagugcuucggcaacaccgccguggccaagugcaacgagaagcacgacgaggaguucugcgacaugcugcgccucuucgacuucaacaagcaggccauccagcggcugaaggcggaggcccagaugagcauccagcugaucaacaaggccgugaacgcccucaucaacgaccagcugaucaugaagaaccaccuccgcgacaucaugugcauccccuacugcaacuacuccaaguacugguaccugaaccacacgaccaccgggcggaccagccugcccaagugcuggcuggucuccaacggcagcuaccucaacgagacgcacuucuccgacgacaucgagcagcaggccgacaacaugaucaccgagaugcugcagaaggaguacauggagcgccagggcaagacgccccuggggcugguggaccucuucguguucagcaccuccuucuaccugaucagcaucuuccugcaccucgucaagaucccgacccaccggcacaucgugggcaaguccugccccaagccccaccgccugaaccacauggggaucugcagcugcggccuguacaagcagcccggggugccggucaaguggaagcggugaggacuaguaauaaggaaacuguaugaaugucugugggcaggaagugaagagauccuucuguaaagguuuuuggaauuaugucugcugaauaauaaacuuuuuugaaauaauaaaucugguagaaaaaugagaucucaaaggcucuuuucagagccaccaaaaaaaaaaaaaaaaaaaaaaaaaaaaaaaaaaaaaaaaaaaaaaaaaaaaaaaaaaaaaaaaaaaaaaaaaaaaaaaaaaaaaaaaaaaaaaaaaaaaa

SEQ ID NO: 35910 - RNA, 1809 nt, Artificial Sequence
  mRNA product Design b-4 (hSL-A100) comprising derived and/or modified sequence from LASV(LP;Clade I)__AAF86701__GPCmut9 (opt1)
aggagagucccgcagucggcguccagcggcucugcuuguucgugugugugucguugcaggccuuauucaagcuuaccaugggccagaucaucaccuucuuccaggaggugccccacgucaucgaggaggugaugaacaucgugcugaucgcccucagccugcuggccauccucaaggggcuguacaacaucgcgaccugcggcaucaucgggcuggucgccuuccucuuccugugcggcaaguccugcagccugacgcucaagggcggguacgagcugcagacccuggagcucaacauggagacccugaacaugaccaugccgcuguccugcacgaagaacagcucccaccacuacauccgcgugggcaacgagaccgggcucgagcugacccugaccaacacgagcaucaucaaccacaaguucugcaaccucuccgacgcccacaagaagaaccuguacgaccacgcccugaugagcaucaucuccaccuuccaccucagcauccccaacuucaaccaguacgaggccauguccugcgacuucaacggcgggaagaucagcgugcaguacaaccugucccacagcuacgcgggcgacgccgccgagcacugcgggaccgucgccaacggcgugcugcagaccuucaugcggauggcguggggcgggcgcuacaucgcccucgacuccggcugcgggaacugggacugcaucaugacgagcuaccaguaccugaucauccagaacaccaccugggaggaccacugccaguucucccggcccagccccaucggcuaccugggccuccugucccagcgcacccgggacaucuacaucagccgccggcugcucgggacguucaccuggacccugagcgacuccgagggcaacgagacccccgggggcuacugccugacgcgcuggaugcucaucgaggccgagcugaagugcuucgggaacaccgccguggccaagugcaacgagaagcacgacgaggaguucugcgacaugcugcggcuguucgacuucaacaagcaggcgauccgccggcugaaggccgaggcccagaugagcauccagcugaucaacaaggccgucaacgcccucaucaacgaccagcugaucaugaagaaccaccuccgcgacaucaugugcauccccuacugcaacuacuccaaguacugguaccucaaccacaccagcuccggccggaccagccugcccaagugcuggcugaucuccaacggcagcuaccucaacgagacgcaguucuccgacgacaucgagcagcaggcggacaacaugaucaccgagaugcugcagaaggaguacaucgagcgccaggggaagaccccgcugggccugguggacaucuucaucuucagcaccuccuucuaccucaucagcaucuuccugcaccugaucaagaucccgacgcaccggcacaucguggggaagcccugccccaagccccaccgccucaaccacaugggcgucugcuccugcgggcuguacaagcacccgggcgugcccaccaaguggaagcggugaggacuaguaauaaggaaacuguaugaaugucugugggcaggaagugaagagauccuucuguaaagguuuuuggaauuaugucugcugaauaauaaacuuuuuugaaauaauaaaucugguagaaaaaugagaucucaaaggcucuuuucagagccaccaaaaaaaaaaaaaaaaaaaaaaaaaaaaaaaaaaaaaaaaaaaaaaaaaaaaaaaaaaaaaaaaaaaaaaaaaaaaaaaaaaaaaaaaaaaaaaaaaaaaa

SEQ ID NO: 35911 - RNA, 1809 nt, Artificial Sequence
  mRNA product Design b-4 (hSL-A100) comprising derived and/or modified sequence from LASV(803213;Clade II)__AAF86703__GPCmut9 (opt1)
aggagagucccgcagucggcguccagcggcucugcuuguucgugugugugucguugcaggccuuauucaagcuuaccaugggccagaucaucaccuucuuccaggaggugccccacgucaucgaggaggugaugaacaucgugcugaucgcccucagccugcuggccauccucaaggggaucuacaacgucgcgaccugcggccuguucgggcugaucuccuuccuccugcugugcggccgcagcugcuccgugacguacaaggggguguacgagcuccagacccuggagcugaacauggccaaccucaacaugaccaugccgcugagcugcaccaagaacaacucccaccacuacaucauggucggcaacgagacgggccuggagcucacccugaccaacaccagcaucaucaaccacaaguucugcaaccuguccgacgcccacaagaagaaccucuacgaccacgcccugaugagcaucaucuccacguuccaccugagcauccccaacuucaaccaguacgaggccauguccugcgacuucaacgggggcaagaucagcgugcaguacaaccucucccacagcuucgcgguggacgccgccaaccacugcgggaccaucgccaacggcguccugcagaccuucaugcggauggcguggggcggguccuacaucgcccuggacagcggcugcgggaacugggacugcaucaugaccuccuaccaguaccucaucauccagaacacgaccugggaggaccacugccaguucagccgccccucccccaucggcuaccuggggcugcucagccagcggacccgcgacaucuacaucagccggcgccugcugggcaccuucacguggacccucuccgacagcgagggcaacgaggcccccgggggcuacugccugacccgguggaugcugaucgaggccgagcucaagugcuucgggaacaccgccguggcgaagugcaacgagaagcacgacgaggaguucugcgacaugcugcgccuguucgacuucaacaagcaggccaucaagcggcucaagacggaggcccagauguccauccagcugaucaacaaggccgugaacgcccugaucaacgaccagcucaucaugaagaaccaccuccgcgacaucaugugcauccccuacugcaacuacagccgguacugguaccugaaccacaccgucaccggcaagaccucccugccccgcugcuggcuggugagcaacggguccuaccugaacgagacgcacuucagcgacgacaucgagcagcaggcggacaacaugaucaccgagaugcuccagaaggaguacauggaccggcagggcaagaccccgcugggccugguggaccuguucgucuucuccaccagcuucuaccucaucuccaucuuccugcaccuggugaagaucccgacgcaccgccacaucguggggaagcccugccccaagccccaccggcucaaccacaugggcaucugcagcugcgggcuguacaagcacccgggcguccccgugaaguggaagcgcugaggacuaguaauaaggaaacuguaugaaugucugugggcaggaagugaagagauccuucuguaaagguuuuuggaauuaugucugcugaauaauaaacuuuuuugaaauaauaaaucugguagaaaaaugagaucucaaaggcucuuuucagagccaccaaaaaaaaaaaaaaaaaaaaaaaaaaaaaaaaaaaaaaaaaaaaaaaaaaaaaaaaaaaaaaaaaaaaaaaaaaaaaaaaaaaaaaaaaaaaaaaaaaaaa

SEQ ID NO: 35912 - RNA, 1809 nt, Artificial Sequence
  mRNA product Design b-4 (hSL-A100) comprising derived and/or modified sequence from LASV(GA391;Clade III)__CAA36645__GPCmut9 (opt1)
aggagagucccgcagucggcguccagcggcucugcuuguucgugugugugucguugcaggccuuauucaagcuuaccaugggccagaucgugaccuucuuccaggaggucccccacgugaucgaggaggugaugaacaucguccugaucgcccucagcauccuggccauccugaaggggcucuacaacguggcgaccugcggccugaucgggcuggugacguuccuccugcuguccggccgcagcugcucccucaucuacaaggggaccuacgagcugcagacccuggagcucaacauggagacccugaacaugacgaugccgcugagcugcaccaagaacaacucccaccacuacauccgggucggcaacgagaccggccucgagcugacccugacgaacaccagcauccucaaccacaaguucugcaaccuguccgacgcccacaagcgcaaccuguacgaccacagccucauguccaucaucagcaccuuccaccuguccauccccaacuucaaccaguacgaggccaugagcugcgacuucaacgggggcaagaucaccgugcaguacaaccugucccacagcuucgccguggacgccgcggggcacugcggcacgcucgccaacgggguccugcagaccuucaugcggauggccuggggcggcuccuacaucgcccuggacagcgggugcggcaacugggacugcaucaugaccuccuaccaguaccucaucauccagaacaccacgugggacgaccacugccaguucagccgccccucccccaucggguaccugggccugcucagccagcggacccgcgacaucuacaucagccggcgccugcugggcaccuucaccuggacgcucuccgacagcgaggggaacgagaccccgggcggguacugccugacccgguggaugcugaucgaggcggagcucaagugcuucggcaacaccgccguggccaagugcaacgagaagcacgacgaggaguucugcgacaugcugcgccuguucgacuucaacaagcaggccauccggcgccucaagacggaggcccagauguccauccagcugaucaacaaggcggugaacgcccugaucaacgaccagcucaucaugaagaaccaccuccgggacaucaugugcauccccuacugcaacuacagccgcuacugguaccugaaccacaccuccaccgggaagaccagccugccccggugcuggcugaucuccaacggcagcuaccugaacgagacgaaguucuccgacgacaucgagcagcaggccgacaacaugaucaccgagaugcugcagaaggaguacaucgaccgccagggcaagacgccccucgggcuggucgaccuguucguguucagcaccuccuucuaccucaucagcaucuuccugcaccuggugaagaucccgacccaccggcacaucgucggcaagcccugccccaagccccaccgccucaaccacauggggaucugcuccugcggccuguacaagcagccgggggugcccgugcgguggaagcgcugaggacuaguaauaaggaaacuguaugaaugucugugggcaggaagugaagagauccuucuguaaagguuuuuggaauuaugucugcugaauaauaaacuuuuuugaaauaauaaaucugguagaaaaaugagaucucaaaggcucuuuucagagccaccaaaaaaaaaaaaaaaaaaaaaaaaaaaaaaaaaaaaaaaaaaaaaaaaaaaaaaaaaaaaaaaaaaaaaaaaaaaaaaaaaaaaaaaaaaaaaaaaaaaaa

SEQ ID NO: 35913 - RNA, 1812 nt, Artificial Sequence
  mRNA product Design b-4 (hSL-A100) comprising derived and/or modified sequence from LASV(AV;Clade V)__CCA30314__GPCmut9 (opt1)
aggagagucccgcagucggcguccagcggcucugcuuguucgugugugugucguugcaggccuuauucaagcuuaccaugggccagaucgugaccuucuuccaggaggucccccacgugaucgaggaggugaugaacaucguccugaucgcccucagcauccuggccgugcugaaggggcucuacaacaucgcgaccugcggccugaucgggcugaucacguuccuccugcugugcggccgcuccugcagcuccaaccucuacaaggggguguacgagcugcagagccuggaccucaacauggagacccugaacaugaccaugccgcuguccugcaccaagaacaacagccaccacuacauccgggucggcaacgacacgggccucgagcugacccugaccaacaccuccauccucaaccacaaguucugcaaccugagcgacgcccacaagaaggaccuguacgaccacgcccucauguccaucaucagcacguuccaccuguccauccccaacuucaaccaguacgaggccaugagcugcgacuucaacgggggcaagaucuccgugcaguacaaccugagccacuccuacgccaucgacgcggccaaccacugcgggaccguggccaacggcauccuccagaccuucaugcgcauggccuggggcgggagcuacaucgcgcuggacuccggcugcgggaacugggacugcaucaugaccagcuaccaguaccugaucauccagaacacgaccugggagaaccacugccaguucucccggcccagccccaucggcuaccucgggcugcugagccagcgcacccgggacaucuacaucucccgccggcuccugggcaccuucacguggacccugagcgacuccgagggcaacgccacccccgggggcuacugccucacccgcuggaugcugaucgaggccgagcugaagugcuucgggaacacggccgucgccaagugcaacgagaagcacgacgaggaguucugcgacaugcuccggcuguucgacuucaacaagcaggcgaucagccgccugaaguccgaggcccagaugagcauccagcucaucaacaaggccgugaacgcccugaucaacgaccagcugaucaugaagaaccaccuccgggacaucaugugcauccccuacugcaacuacuccaaguacugguaccugaaccacaccaucaccggcaagaccagccugcccaagugcuggcucguguccaacgggagcuaccugaacgagacgcacuucuccgacgacaucgagcagcaggccgacaacaugaucaccgagaugcugcagaaggaguacauggagcgccagggcaagaccccgcugggccucgucgaccuguucguguucagcaccuccuucuaccugaucagcaucuuccuccggcuggugaagaucccgacgcaccgccacaucgucgggaagcccugccccaagccccaccggcugaaccacaugggcaucugcuccugcgggcucuacaagcagccgggcgugcccgugcgcuggaagcggugaggacuaguaauaaggaaacuguaugaaugucugugggcaggaagugaagagauccuucuguaaagguuuuuggaauuaugucugcugaauaauaaacuuuuuugaaauaauaaaucugguagaaaaaugagaucucaaaggcucuuuucagagccaccaaaaaaaaaaaaaaaaaaaaaaaaaaaaaaaaaaaaaaaaaaaaaaaaaaaaaaaaaaaaaaaaaaaaaaaaaaaaaaaaaaaaaaaaaaaaaaaaaaaaa

SEQ ID NO: 35914 - RNA, 1809 nt, Artificial Sequence
  mRNA product Design b-4 (hSL-A100) comprising derived and/or modified sequence from LASV(Togo/2016/7082;Clade VI)__AMR44577__GPCmut9 (opt1)
aggagagucccgcagucggcguccagcggcucugcuuguucgugugugugucguugcaggccuuauucaagcuuaccaugggccagaucaucaccuucuuccaggaggugccccacgucaucgaggaggugaugaacaucgugcugaucgcccucagccugcuggccauccucaagggggucuacaacguggcgaccugcggcaucaucgggcuggugacguuccuguuccucugcggccgcuccugcagccugaucuacaagggguccuacgagcugcagacccucgagcugaacauggagacccugaacaugaccaugccgcucagcugcacgaagaacuccagccaccacuacauccgggucggcaacgagaccggccuggagcugacccucaccaacacguccaucaucaaccacaaguucugcaaccugagcgacgcccacaagcgcaaccuguacgaccacgcccucauguccauccugagcaccuuccaccuguccauccccaacuucaaccaguacgaggccaugagcugcgacuucaacgggggcaagaucuccgugcaguacaaccucagccacgccuacgcgguggacgccgccgagcacugcgggaccgucgccaacggcgugcugcagaccuucaugcggauggcguggggcggguccuacaucgcccuggacagcggcugcgggaacugggacugcaucaugacguccuaccaguaccucaucauccagaacaccaccugggaggaccacugccaguucagccgccccucccccaucggcuaccuggggcugcucagccagcggacccgcgacaucuacaucagccggcgccugcugggcacguucaccuggacccucuccgacagcgagggcaacgagacccccgggggcuacugccugacgcgguggaugcugaucgaggccgagcucaagugcuucgggaacaccgccguggccaagugcaacgagaagcacgacgaggaguucugcgacaugcugcgccuguucgacuucaacaagcaggcgauccagcggcucaaguccgaggcccagaugagcauccagcugaucaacaaggccgucaacgcccugaucaacgaccagcucaucaugaagaaccaccuccgcgacaugaugugcauccccuacugcaacuacuccaaguacugguaccugaaccacaccagcuccggccggaccagccugcccaagugcuggcugguguccaacgggagcuaccugaacgagacgcacuucuccgacgacaucgagcagcaggccgacaacaugaucaccgagaugcuccagaaggaguacaucgaccgccagggcaagaccccgcugggccugguggaccuguucgucuucagcaccuccuucuaccucaucagcaucuuccugcaccugaucaagaucccgacgcaccggcacaucguggggaagcccugccccaagccccaccgccucaaccacaugggcaucugcuccugcgggcuguacaagcagccgggcgugcccacccgguggaagcgcugaggacuaguaauaaggaaacuguaugaaugucugugggcaggaagugaagagauccuucuguaaagguuuuuggaauuaugucugcugaauaauaaacuuuuuugaaauaauaaaucugguagaaaaaugagaucucaaaggcucuuuucagagccaccaaaaaaaaaaaaaaaaaaaaaaaaaaaaaaaaaaaaaaaaaaaaaaaaaaaaaaaaaaaaaaaaaaaaaaaaaaaaaaaaaaaaaaaaaaaaaaaaaaaaa

SEQ ID NO: 35915 - RNA, 1809 nt, Artificial Sequence
  mRNA product Design b-4 (hSL-A100) comprising derived and/or modified sequence from LASV(KAK-428;Clade n.d. (VII))__ANH09740__GPCmut9 (opt1)
aggagagucccgcagucggcguccagcggcucugcuuguucgugugugugucguugcaggccuuauucaagcuuaccaugggccagaucgugaccuucuuccaggaggucccccacgugaucgaggaggugaugaacaucguccugaucgcccucagccugcuggccauccucaaggggcuguacaacuucgcgaccugcggcgugaucgggcugaucacguuccuccugcugugcggccgcuccugcagcgccaccuacaaggggcaguacgagcuccagacccuggagcugaacauggagucccucaacaugaccaugccgcugagcugcacgaagaacaacucccaccacuacauccgggccggcaacaacaccggccuggagcucacccugaccaacacgagcaucaucucccacaaguucugcaaccugagcgacgcccacaagaagaaccucuacgaccacacccugauguccaucaucaccaccuuccaccugagcauccccaacuucaaccaguacgaggccauguccugcgacuucaacgggggcaagaucagcauccaguacaaccucucccacagcuacgcgggggacgccgcccagcacugcggcacgguggccaacgggguccugcagaccuucaugcgcauggcguggggcggcuccuaccuggcccucgacagcgggugccggggcugggacugcaucaucuccagcuaccaguaccugaucauccagaacaccaccugggacgaccacugccaguucucccgccccagccccaucggguaccugggcuucgugagccagaagacgcgggacaucuacaucucccgccggcuccugggcaccuucaccuggacccugagcgacuccgaggggcacgacaugccgggcggguacugccucacgcgcuggaugcugaucgaggccgaccugaagugcuucggcaacaccgccguggccaagugcaacgagaagcacgacgaggaguucugcgacauguggcggcuguucgacuucaacaagcaggcgauccagcgccugaaggccgaggcccagaugaacauccagcugaucaacaaggccgucaacgcccucaucaacgaccagcugaugaugaagaaccaccuccgggacaucaugugcauccccuacugcaacuacagcaaguucugguaccucaacaacaccaccacggggcgcaccucccugccccggugcuggcugaucagcaacggcuccuaccucaacgagacccacuucagcgacgacaucgagcagcaggcggacaacaugaucaccgagaugcugcagaaggaguacauggaccgccagggcaagacgccccuggggcucguggaccuguucguguucuccaccagcuucuaccugaucaccaucuuccugcaccucgucaagaucccgacccaccggcacaucgugggcaagcccugccccaagccccaccgccugaaccacauggggaucugcuccugcggccuguacaagcagccgggggugcccguccgguggaagcgcugaggacuaguaauaaggaaacuguaugaaugucugugggcaggaagugaagagauccuucuguaaagguuuuuggaauuaugucugcugaauaauaaacuuuuuugaaauaauaaaucugguagaaaaaugagaucucaaaggcucuuuucagagccaccaaaaaaaaaaaaaaaaaaaaaaaaaaaaaaaaaaaaaaaaaaaaaaaaaaaaaaaaaaaaaaaaaaaaaaaaaaaaaaaaaaaaaaaaaaaaaaaaaaaaa

SEQ ID NO: 35916 - RNA, 1809 nt, Artificial Sequence; identical to SEQ ID NO: 35910
  mRNA product Design b-4 (hSL-A100) comprising derived and/or modified sequence from LASV(Pinneo-NIG-1969;Clade I)__AIT17836__GPCmut9 (opt1)

SEQ ID NO: 35917 - RNA, 1809 nt, Artificial Sequence
  mRNA product Design b-4 (hSL-A100) comprising derived and/or modified sequence from LASV(ISTH0009-NIG-2011;Clade II)__AIT17404__GPCmut9 (opt1)
aggagagucccgcagucggcguccagcggcucugcuuguucgugugugugucguugcaggccuuauucaagcuuaccaugggccagaucaucaccuucuuccaggaggugccccacgucaucgaggaggugaugaacaucgugcugaucgcccucagccugcuggccauccucaaggggaucuacaacgucgcgaccugcggccuguucgggcugguguccuuccuccugcugugcggccgcagcugcuccacgaccuacaaggggguguacgagcuccagacccuggagcuggacauggccagccucaacaugaccaugccgcuguccugcacgaagaacaacagccaccacuacaucauggucggcaacgagaccggccuggagcucacccugaccaacacguccaucaucaaccacaaguucugcaaccugagcgacgcccacaagaagaaccucuacgaccacgcccugauguccaucaucagcaccuuccaccuguccauccccaacuucaaccaguacgaggccaugagcugcgacuucaacgggggcaagaucuccgugcaguacaaccucagccacgcguacgccguggacgccgccaaccacugcgggaccaucgcgaacggcguccugcagaccuucaugcggauggccuggggcggguccuacaucgcccuggacagcggcugcggguccugggacugcaucaugacgagcuaccaguaccucaucauccagaacaccaccugggaggaccacugccaguucucccgccccagccccaucggcuaccuggggcugcucagccagcggacccgcgacaucuacaucucccggcgccugcugggcacguucaccuggacccucagcgacuccgagggcaacgagacccccgggggcuacugccugacgcgguggaugcugaucgaggccgagcucaagugcuucgggaacaccgccguggcgaagugcaacgagaagcacgacgaggaguucugcgacaugcugcgccuguucgacuucaacaagcaggccauccggcgccucaagaccgaggcccagaugagcauccagcugaucaacaaggccgugaacgcccugaucaacgaccagcucaucaugaagaaccaccuccgggacaucaugugcaucccguacugcaacuacuccaaguacugguaccugaaccacaccgucacgggcaagaccagccugccccgcugcuggcugguguccaacgggagcuaccugaacgagacccacuucuccgacgacaucgagcagcaggcggacaacaugaucaccgagcuccugcagaaggaguacauggaccggcagggcaagacgccccugggccugguggaccucuucgucuucagcaccuccuucuaccugaucagcaucuuccugcaccucaucaagaucccgacccaccgccacaucaccgggaagcccugccccaagccccaccggcugaaccacaugggcaucugcuccugcgggcuguacaagcacccgggcgugcccgugaaguggaagcgcugaggacuaguaauaaggaaacuguaugaaugucugugggcaggaagugaagagauccuucuguaaagguuuuuggaauuaugucugcugaauaauaaacuuuuuugaaauaauaaaucugguagaaaaaugagaucucaaaggcucuuuucagagccaccaaaaaaaaaaaaaaaaaaaaaaaaaaaaaaaaaaaaaaaaaaaaaaaaaaaaaaaaaaaaaaaaaaaaaaaaaaaaaaaaaaaaaaaaaaaaaaaaaaaaa

SEQ ID NO: 35918 - RNA, 1809 nt, Artificial Sequence
  mRNA product Design b-4 (hSL-A100) comprising derived and/or modified sequence from LASV(ISTH2010-NIG-2012;Clade II)__AIT17482__GPCmut9 (opt1)
aggagagucccgcagucggcguccagcggcucugcuuguucgugugugugucguugcaggccuuauucaagcuuaccaugggccagaucaucaccuucuuccaggaggugccccacgucaucgaggaggugaugaacaucgugcugaucgcccucagccugcuggccauccucaaggggaucuacaacgucgcgaccugcggccuguucgggcugguguccuuccuccugcugugcggccgcagcugcuccacgaccuacaaggggguguacgagcuccagacccuggagcuggacauggccagccucaacaugaccaugccgcuguccugcacgaagaacaacagccaccacuacaucauggucggcaacgagaccggccuggagcucacccugaccaacacguccaucaucaaccacaaguucugcaaccugagcgacgcccacaagaagaaccucuacgaccacgcccugauguccaucaucagcaccuuccaccuguccauccccaacuucaaccaguacgaggccaugagcugcgacuucaacgggggcaagaucuccgugcaguacaaccucagccacgcguacgccguggacgccgccaaccacugcgggaccaucgcgaacggcguccugcagaccuucaugcggauggccuggggcggguccuacaucgcccuggacagcggcugcggguccugggacugcaucaugacgagcuaccaguaccucaucauccagaacaucaccugggaggaccacugccaguucucccgccccagccccaucggcuaccuggggcugcucagccagcggacccgcgacaucuacaucucccggcgccugcugggcaccuucacguggacccucagcgacuccgagggcaacgagacccccgggggcuacugccugacccgguggaugcugaucgaggccgagcucaagugcuucgggaacacggccguggcgaagugcaacgagaagcacgacgaggaguucugcgacaugcugcgccuguucgacuucaacaagcaggccauccggcgccucaagaccgaggcccagaugagcauccagcugaucaacaaggccgugaacgcccugaucaacgaccagcucaucaugaagaaccaccuccgggacaucaugugcauccccuacugcaacuacuccaaguacugguaccugaaccacaccgucaccggcaagacgagccugccccgcugcuggcugguguccaacgggagcuaccugaacgagacccacuucuccgacgacaucgagcagcaggcggacaacaugaucaccgagcuccugcagaaggaguacaucgaccggcagggcaagaccccgcugggccugguggaccucuucgucuucagcacguccuucuaccugaucagcaucuuccugcaccucgugaagaucccgacccaccgccacguggucgggaagcccugccccaagccccaccggcugaaccacaugggcaucugcuccugcgggcuguacaagcacccgggcgugcccgugaaguggaagcgcugaggacuaguaauaaggaaacuguaugaaugucugugggcaggaagugaagagauccuucuguaaagguuuuuggaauuaugucugcugaauaauaaacuuuuuugaaauaauaaaucugguagaaaaaugagaucucaaaggcucuuuucagagccaccaaaaaaaaaaaaaaaaaaaaaaaaaaaaaaaaaaaaaaaaaaaaaaaaaaaaaaaaaaaaaaaaaaaaaaaaaaaaaaaaaaaaaaaaaaaaaaaaaaaaa

SEQ ID NO: 35919 - RNA, 1809 nt, Artificial Sequence
  mRNA product Design b-4 (hSL-A100) comprising derived and/or modified sequence from LASV(Lassa virus/H.sapiens-wt/NGA/2015/ISTH_0543;Clade II)__AVO03639__GPCmut9 (opt1)
aggagagucccgcagucggcguccagcggcucugcuuguucgugugugugucguugcaggccuuauucaagcuuaccaugggccagaucaucaccuucuuccaggaggugccccacgucaucgaggaggugaugaacaucgugcugaucgcccucagccugcuggccauccucaaggggaucuacaacgucgcgaccugcggccuguucgggcugguguccuuccuccugcugugcggccgcagcugcuccacgaccuacaaggggguguacgagcuccagacccuggagcuggacauggccaaccucaacaugaccaugccgcugagcugcacgaagaacaacucccaccacuacaucauggucggcaacgagaccggccuggagcucacccugaccaacacgagcaucaucaaccacaaguucugcaaccuguccgacgcccacaagaagaaccucuacgaccacgcccugaugagcaucaucuccaccuuccaccugagcauccccaacuucaaccaguacgaggccauguccugcgacuucaacgggggcaagaucagcgugcaguacaaccucucccacaccuacgcgguggacgccgccaaccacugcgggaccaucgccaacggcguccugcagacguucaugcggauggcguggggcgggagcuacaucgcccuggacuccggcugcgggagcugggacugcaucaugaccuccuaccaguaccucgugauccagaacaccaccugggaggaccacugccaguucagccgccccucccccaucggcuaccuggggcugcucagccagcggacgcgcgacaucuacaucagccggcgccugcugggcaccuucaccuggacccucuccgacagcgagggcaacgagacgcccgggggcuacugccugacccgguggaugcugaucgaggccgagcucaagugcuucgggaacaccgccguggccaagugcaacgagaagcacgacgaggaguucugcgacaugcugcgccuguucgacuucaacaagcaggcgauccggcgccucaagaccgaggcccagauguccauccagcugaucaacaaggccgucaacgcccugaucaacgaccagcucaucaugaagaaccaccuccgggacaucaugugcauccccuacugcaacuacagcaaguacugguaccugaaccacacggugaccggcaagaccucccugccccgcugcuggcuggugagcaacggguccuaccugaacgagacccacuucagcgacgacaucgagcagcaggccgacaacaugaucacggagcuccugcagaaggaguacaucgaccggcagggcaagaccccgcugggccuggucgaccucuucguguucuccaccagcuucuaccugaucuccaucuuccugcaccucgugaagaucccgacccaccgccacaucacggggaagcccugccccaagccccaccggcugaaccacaugggcaucugcagcugcgggcuguacaagcacccgggcguccccgugaaguggaagcgcugaggacuaguaauaaggaaacuguaugaaugucugugggcaggaagugaagagauccuucuguaaagguuuuuggaauuaugucugcugaauaauaaacuuuuuugaaauaauaaaucugguagaaaaaugagaucucaaaggcucuuuucagagccaccaaaaaaaaaaaaaaaaaaaaaaaaaaaaaaaaaaaaaaaaaaaaaaaaaaaaaaaaaaaaaaaaaaaaaaaaaaaaaaaaaaaaaaaaaaaaaaaaaaaaa

SEQ ID NO: 35920 - RNA, 1809 nt, Artificial Sequence
  mRNA product Design b-4 (hSL-A100) comprising derived and/or modified sequence from LASV(Lassa virus/H.sapiens-wt/NGA/2016/ISTH_0009;Clade II)__AVO03571__GPCmut9 (opt1)
aggagagucccgcagucggcguccagcggcucugcuuguucgugugugugucguugcaggccuuauucaagcuuaccaugggccagaucaucaccuucuuccaggaggugccccacgucaucgaggaggugaugaacaucgugcugaucgcccucagccugcuggccauccucaaggggaucuacaacgucgcgaccugcggccugcuggggcucguguccuuccugcugcucugcggccgcagcugcuccacgaccuacaaggggguguacgagcugcagacccuggagcucgacauggccagccugaacaugaccaugccgcuguccugcacgaagaacaacagccaccacuacaucauggucggcaacgagaccggccucgagcugacccugaccaacacguccaucaucaaccacaaguucugcaaccucagcgacgcccacaagaagaaccuguacgaccacgcccugauguccaucaucagcaccuuccaccucuccauccccaacuucaaccaguacgaggccaugagcugcgacuucaacgggggccggaucuccgugcaguacaaccugagccacuccuacgcgguggacgccgccaaccacugcgggaccaucgccaacggcguccugcagaccuucaugcgcauggcguggggcgggagcuacaucgcccucgacuccggcugcgggagcugggacugcaucaugacguccuaccaguaccugaucauccagaacaccaccugggaggaccacugccaguucagccggcccagccccaucggcuaccuggggcuccugucccagcgcacccgggacaucuacaucagccgccggcugcucggcacguucaccuggacccuguccgacagcgagggcaacgagacccccgggggcuacugccugacgcgcuggaugcucaucgaggccgagcugaagugcuucgggaacaccgccguggccaagugcaacgagaagcacgacgaggaguucugcgacaugcugcggcuguucgacuucaacaagcaggcgauccgccggcugaagaccgaggcccagauguccauccagcugaucaacaaggccgugaacgcccucaucaacgaccagcugaucaugaagaaccaccuccgcgacaucaugugcaucccguacugcaacuacagcaaguacugguaccucaaccacaccgucacgggcaagaccucccugccccggugcuggcuggugagcaacggguccuaccucaacgagacccacuucagcgacgacaucgagcagcaggccgacaacaugaucaccgagcugcugcagaaggaguacaucgaccgccagggcaagacgccccugggccucguggaccuguucgucuucuccaccagcuucuaccugaucuccaucuuccuccaccuggugaagaucccgacccaccggcacaucaccgggaagcccugccccaagccccaccgccugaaccacaugggcaucugcagcugcgggcucuacaaccacccgggcgugcccgucaaguggaagcggugaggacuaguaauaaggaaacuguaugaaugucugugggcaggaagugaagagauccuucuguaaagguuuuuggaauuaugucugcugaauaauaaacuuuuuugaaauaauaaaucugguagaaaaaugagaucucaaaggcucuuuucagagccaccaaaaaaaaaaaaaaaaaaaaaaaaaaaaaaaaaaaaaaaaaaaaaaaaaaaaaaaaaaaaaaaaaaaaaaaaaaaaaaaaaaaaaaaaaaaaaaaaaaaaa

SEQ ID NO: 35921 - RNA, 1809 nt, Artificial Sequence
  mRNA product Design b-4 (hSL-A100) comprising derived and/or modified sequence from LASV(Lassa virus/H.sapiens-wt/NGA/2016/ISTH_0017;Clade II)__AVO03567__GPCmut9 (opt1)
aggagagucccgcagucggcguccagcggcucugcuuguucgugugugugucguugcaggccuuauucaagcuuaccaugggccagaucaucaccuucuuccaggaggugccccacgucaucgaggaggugaugaacaucgugcugaucgcccucagccugcuggccauccucaaggggaucuacaacgucgcgaccugcggccuguucgggcugguguccuuccuccugcugugcggccgcagcugcuccacgaccuacaaggggguguacgagcuccagacccuggagcuggacauggccagccucaacaugaccaugccgcuguccugcacgaagaacaacagccaccacuacaucauggucggcaacgagaccggccuggagcucacccugaccaacacguccaucaucaaccacaaguucugcaaccugagcgacgcccacaagaagaaccucuacgaccacgcccugauguccaucaucagcaccuuccaccuguccauccccaacuucaaccaguacgaggccaugagcugcgacuucaacgggggcaagaucuccgugcaguacaaccucagccacaccuacgcgaucgacgccgccaaccacugcgggaccaucgccaacggcgugcugcagacguucaugcggauggcguggggcggguccuacaucgcccuggacagcggcugcggguccugggacugcaucaugaccagcuaccaguaccucaucauccagaacaccaccugggaggaccacugccaguucucccgccccagccccaucggcuaccuggggcugcucagccagcggacgcgcgacaucuacaucucccggcgccugcugggcaccuucaccuggacccucagcgacuccgagggcaacgagacgcccgggggcuacugccugacccgguggaugcugaucgaggccgagcucaagugcuucgggaacaccgccgucgccaagugcaacgagaagcacgacgaggaguucugcgacaugcugcgccuguucgacuucaacaagcaggcgauccggcgccucaagaccgaggcccagaugagcauccagcugaucaacaaggccgugaacgcccugaucaacgaccagcucaucaugaagaaccaccuccgggacaucaugugcauccccuacugcaacuacuccaaguacugguaccugaaccacacggugaccggcaagaccagccugccccgcugcuggcuggucuccaacgggagcuaccugaacgagacccacuucuccgacgacaucgagcagcaggccgacaacaugaucacggagcuccugcagaaggaguacauggaccggcagggcaagaccccgcugggccugguggaccucuucguguucagcaccuccuucuaccugaucagcaucuuccugcaccucguccgcaucccgacccaccggcacgugaucgggaagcccugccccaagccccaccgccugaaccacaugggcaucugcuccugcgggcuguacaagcacccgggcgugcccgucaaguggaagcggugaggacuaguaauaaggaaacuguaugaaugucugugggcaggaagugaagagauccuucuguaaagguuuuuggaauuaugucugcugaauaauaaacuuuuuugaaauaauaaaucugguagaaaaaugagaucucaaaggcucuuuucagagccaccaaaaaaaaaaaaaaaaaaaaaaaaaaaaaaaaaaaaaaaaaaaaaaaaaaaaaaaaaaaaaaaaaaaaaaaaaaaaaaaaaaaaaaaaaaaaaaaaaaaaa

SEQ ID NO: 35922 - RNA, 1809 nt, Artificial Sequence
  mRNA product Design b-4 (hSL-A100) comprising derived and/or modified sequence from LASV(Lassa virus/H.sapiens-wt/NGA/2018/ISTH_0959;Clade II)__AVV65099__GPCmut9 (opt1)
aggagagucccgcagucggcguccagcggcucugcuuguucgugugugugucguugcaggccuuauucaagcuuaccaugggccagaucaucaccuucuuccaggaggugccccacgucaucgaggaggugaugaacaucgugcugaucgcccucagccugcuggccauccucaaggggaucuacaacgucgugaccugcggccuguucgggcugguguccuuccuccugcugugcggccgcagcugcuccacgaccuacaagggggucuacgagcuccagacccuggagcuggacauggcgagccucaacaugaccaugccgcuguccugcacgaagaacaacagccaccacuacaucauggugggcaacgagaccggccuggagcucacccugaccaacacguccaucaucaaccacaaguucugcaaccugagcgacgcccacaagaagaaccucuacgaccacgcccugauguccaucaucagcaccuuccaccuguccauccccaacuucaaccaguacgaggccaugagcugcgacuucaacgggggcaagaucuccgugcaguacaaccucagccacgccuacgcgaucgacgccgccaaccacugcgggaccaucgccaacggcguccugcagaccuucaugcggauggcguggggcggguccuacaucgcccuggacagcggcugcggguccugggacugcaucaugacgagcuaccaguaccucaucauccagaacaccaccugggaggaccacugccaguucucccgccccagccccaucggcuaccuggggcugcucagccagcggacccgcgacaucuacaucucccggcgccugcugggcacguucaccuggacccucagcgacuccgagggcaacgagacccccgggggcuacugccugacgcgguggaugcugaucgaggccgagcucaagugcuucgggaacaccgccguggccaagugcaacgagaagcacgacgaggaguucugcgacaugcugcgccuguucgacuucaacaagcaggcgauccggcgccucaagaccgaggcccagaugagcauccagcugaucaacaaggccgugaacgcccugaucaacgaccagcucaucaugaagaaccaccuccgggacaucaugugcaucccguacugcaacuacuccaaguacugguaccugaaccacaccgucacgggcaagaccagccugccccgcugcuggcugguguccaacgggagcuaccugaacgagacccacuucuccgacgacaucgagcagcaggccgacaacaugaucaccgagcuccugcagaaggaguacaucgaccggcagggcaagacgccccugggccugguggaccucuucgucuucagcaccuccuucuaccugaucagcaucuuccugcaccucgugaagaucccgacccaccgccacgugaucgggaagcccugccccaagccccaccggcugaaccacaugggcaucugcuccugcgggcuguacaagcacccgggcguccccgugaaguggaagcgcugaggacuaguaauaaggaaacuguaugaaugucugugggcaggaagugaagagauccuucuguaaagguuuuuggaauuaugucugcugaauaauaaacuuuuuugaaauaauaaaucugguagaaaaaugagaucucaaaggcucuuuucagagccaccaaaaaaaaaaaaaaaaaaaaaaaaaaaaaaaaaaaaaaaaaaaaaaaaaaaaaaaaaaaaaaaaaaaaaaaaaaaaaaaaaaaaaaaaaaaaaaaaaaaaa

SEQ ID NO: 35923 - RNA, 1809 nt, Artificial Sequence
  mRNA product Design b-4 (hSL-A100) comprising derived and/or modified sequence from LASV(LASV003-NIG-2008;Clade II)__AIT17580__GPCmut9 (opt1)
aggagagucccgcagucggcguccagcggcucugcuuguucgugugugugucguugcaggccuuauucaagcuuaccaugggccagaucaucaccuucuuccaggaggugccccacgucaucgaggaggugaugaacaucgugcugaucgcccucagccugcuggccauccucaaggggaucuacaacgucgcgaccugcggccuguucgggcugguguccuuccuccugcugugcggccgcagcugcuccacgaccuacaaggggguguacgagcuccagacccuggagcuggacauggccagccucaacaugaccaugccgcuguccugcacgaagaacaacagccaccacuacaucauggucggcaacgagaccggccuggagcucacccugaccaacacguccaucaucaaccacaaguucugcaaccugagcgacgcccacaagaagaaccucuacgaccacgcccugauguccaucaucagcaccuuccaccuguccauccccaacuucaaccaguacgaggccaugagcugcgacuucaacgggggcaagaucuccgugcaguacaaccucagccacaccuacgcgguggacgccgccaaccacugcgggaccaucgccaacggcguccugcagacguucaugcggauggcguggggcggguccuacaucgcccuggacagcggcugcggguccugggacugcaucaugaccagcuaccaguaccucaucauccagaacaccaccugggaggaccacugccaguucucccgccccagccccaucggcuaccuggggcugcucagccagcggacgcgcgacaucuacaucucccggcgccugcugggcaccuucaccuggacccucagcgacuccgagagcaacgagacgccgggcggguacugccugacccgguggaugcugaucgaggccgagcucaagugcuucggcaacaccgccguggccaagugcaacgagaagcacgacgaggaguucugcgacaugcugcgccuguucgacuucaacaagcaggcgauccggcgccucaaggccgaggcccagauguccauccagcugaucaacaaggccgugaacgcccugaucaacgaccagcucaucaugaagaaccaccuccgggacaucaugugcauccccuacugcaacuacagcaaguacugguaccugaaccacaccgucacggggcgcaccucccugccccggugcuggcuggugagcaacggcuccuaccugaacgagacccacuucagcgacgacaucgagcagcaggcggacaacaugaucaccgagcuccugcagaaggaguacauggaccgccaggggaagacgccccugggccugguggaccucuucgucuucuccaccagcuucuaccugaucuccaucuuccugcaccucgugaagaucccgacccaccggcacgugaucggcaagcccugccccaagccccaccgccugaaccacauggggaucugcagcugcggccuguacaagcacccggggguccccgugaaguggaagcggugaggacuaguaauaaggaaacuguaugaaugucugugggcaggaagugaagagauccuucuguaaagguuuuuggaauuaugucugcugaauaauaaacuuuuuugaaauaauaaaucugguagaaaaaugagaucucaaaggcucuuuucagagccaccaaaaaaaaaaaaaaaaaaaaaaaaaaaaaaaaaaaaaaaaaaaaaaaaaaaaaaaaaaaaaaaaaaaaaaaaaaaaaaaaaaaaaaaaaaaaaaaaaaaaa

SEQ ID NO: 35924 - RNA, 1809 nt, Artificial Sequence
  mRNA product Design b-4 (hSL-A100) comprising derived and/or modified sequence from LASV(LASV035-NIG-2009;Clade II)__AIT17588__GPCmut9 (opt1)
aggagagucccgcagucggcguccagcggcucugcuuguucgugugugugucguugcaggccuuauucaagcuuaccaugggccagaucaucaccuucuuccaggaggugccccacgucaucgaggaggugaugaacaucgugcugaucgcccucagccugcuggccauccucaaggggaucuacaacgucgcgaccugcggccuguucgggcugguguccuuccuccugcugugcggccgcagcugcuccacgaccuacaaggggguguacgagcuccagacccuggagcuggacauggccagccucaacaugaccaugccgcuguccugcacgaagaacaacagccaccacuacaucauggucggcaacgagaccggccuggagcucacccugaccaacacguccaucaucaaccacaaguucugcaaccugagcgacgcccacaagaagaaccucuacgaccacgcccugauguccaucaucagcaccuuccaccuguccauccccaacuucaaccaguacgaggccaugagcugcgacuucaacgggggcaagaucuccgugcaguacaaccucagccacgcguacgccguggacgccgccaaccacugcgggaccaucgcgaacggcguccugcagaccuucaugcggauggccuggggcggguccuacaucgcccuggacagcggcugcggguccugggacugcaucaugacgagcuaccaguaccucaucauccagaacaccaccugggaggaccacugccaguucucccgccccagccccaucggcuaccuggggcugcucagccagcggacccgcgacaucuacaucucccggcgccugcugggcacguucaccuggacccucagcgacuccgagggcaacgagacccccgggggcuacugccugacgcgguggaugcugaucgaggccgagcucaagugcuucgggaacaccgccguggcgaagugcaacgagaagcacgacgaggaguucugcgacaugcugcgccuguucgacuucaacaagcaggccauccggcgccucaaggccgaggcccagaugagcauccagcugaucaacaaggccgugaacgcgcugaucaacgaccagcucaucaugaagaaccaccuccgggacaucaugugcauccccuacugcaacuacuccaaguacugguaccugaaccacaccgucaccggcaagacgagccugccccgcugcuggcugguguccaacgggagcuaccugaacgagacccacuucuccgacgacaucgagcagcaggccgacaacaugaucaccgagcuccugcagaaggaguacaucgaccggcagggcaagaccccgcugggccugguggaccucuucgucuucagcacguccuucuaccugaucagcaucuuccugcaccucgugaagaucccgacccaccgccacgugaucgggaagcccugccccaagccccaccggcugaaccacaugggcaucugcuccugcgggcuguacaagcacccgggcguccccgugaaguggaagcgcugaggacuaguaauaaggaaacuguaugaaugucugugggcaggaagugaagagauccuucuguaaagguuuuuggaauuaugucugcugaauaauaaacuuuuuugaaauaauaaaucugguagaaaaaugagaucucaaaggcucuuuucagagccaccaaaaaaaaaaaaaaaaaaaaaaaaaaaaaaaaaaaaaaaaaaaaaaaaaaaaaaaaaaaaaaaaaaaaaaaaaaaaaaaaaaaaaaaaaaaaaaaaaaaaa

SEQ ID NO: 35925 - RNA, 1809 nt, Artificial Sequence
  mRNA product Design b-4 (hSL-A100) comprising derived and/or modified sequence from LASV(LASV1000-NIG-2009;Clade II)__AIT17782__GPCmut9 (opt1)
aggagagucccgcagucggcguccagcggcucugcuuguucgugugugugucguugcaggccuuauucaagcuuaccaugggccagaucaucaccuucuuccaggaggugccccacgucaucgaggaggugaugaacaucgugcugaucgcccucagccugcuggccauccucaaggggaucuacaacgucgcgaccugcggccuguucgggcugguguccuuccuccugcugugcggccgcagcugcuccacgaccuacaaggggguguacgagcuccagacccuggagcuggacauggccagccucaacaugaccaugccgcuguccugcacgaagaacaacagccaccacuacaucauggucggcaacgagaccggccuggagcucacccugaccaacacguccaucaucaaccacaaguucugcaaccugagcgacgcccacaagaagaaccucuacgaccacgcccugauguccaucaucagcaccuuccaccuguccauccccaacuucaaccaguacgaggccaugagcugcgacuucaacgggggcaagaucuccgugcaguacaaccucagccacaccuacgcgguggacgccgccaaccacugcgggaccaucgccaacggcguccugcagacguucaugcggauggcguggggcggguccuacaucgcccuggacagcggcugcggguccugggacugcaucaugaccagcuaccaguaccucaucauccagaacaccaccugggaggaccacugccaguucucccgccccagccccaucggcuaccuggggcugcucagccagcggacgcgcgacaucuacaucucccggcgccugcugggcaccuucaccuggacccucagcgacuccgagggcaacgagacgcccgggggcuacugccugacccgguggaugcugaucgaggccgagcucaagugcuucgggaacaccgccguggccaagugcaacgagaagcacgacgaggaguucugcgacaugcugcgccuguucgacuucaacaagcaggcgaucaagcggcucaagaccgaggcccagaugagcauccagcugaucaacaaggccgugaacgcccugaucaacgaccagcucaucaugaagaaccaccuccgcgacaucaugugcauccccuacugcaacuacuccaaguacugguaccugaaccacacggucaccggcaagaccagccugccccggugcuggcugguguccaacgggagcuaccugaacgagacccacuucuccgacgacaucgagcagcaggccgacaacaugaucacggagcuccugcagaaggaguacaucgaccgccagggcaagaccccgcugggccugguggaccucuucgucuucagcaccuccuucuaccugaucagcaucuuccugcaccucgugaagaucccgacccaccggcacguggucgggaagcccugccccaagccccaccgccugaaccacaugggcaucugcuccugcgggcuguacaagcacccgggcgugcccgugaaguggaagcggugaggacuaguaauaaggaaacuguaugaaugucugugggcaggaagugaagagauccuucuguaaagguuuuuggaauuaugucugcugaauaauaaacuuuuuugaaauaauaaaucugguagaaaaaugagaucucaaaggcucuuuucagagccaccaaaaaaaaaaaaaaaaaaaaaaaaaaaaaaaaaaaaaaaaaaaaaaaaaaaaaaaaaaaaaaaaaaaaaaaaaaaaaaaaaaaaaaaaaaaaaaaaaaaaa

SEQ ID NO: 35926 - RNA, 1809 nt, Artificial Sequence
  mRNA product Design b-4 (hSL-A100) comprising derived and/or modified sequence from LASV(LASV221-NIG-2010;Clade II)__AIT17624__GPCmut9 (opt1)
aggagagucccgcagucggcguccagcggcucugcuuguucgugugugugucguugcaggccuuauucaagcuuaccaugggccagaucaucaccuucuuccaggaggugccccacgucaucgaggaggugaugaacaucgugcugaucgcccucagccugcuggccauccucaaggggaucuacaacgucgcgaccugcggccuguucgggcugguguccuuccuccugcugugcggccgcagcugcuccacgaccuacaaggggguguacgagcuccagacccuggagcuggacauggccagccucaacaugaccaugccgcuguccugcacgaagaacaacagccaccacuacaucauggucggcaacgagaccggccuggagcucacccugaccaacacguccaucaucaaccacaaguucugcaaccugagcgacgcccacaagaagaaccucuacgaccacgcccugauguccaucaucagcaccuuccaccuguccauccccaacuucaaccaguacgaggccaugagcugcgacuucaacgggggcaagaucuccgugcaguacaaccucagccacaccuacgcgaucgacgccgccaaccacugcgggaccaucgccaacggcgugcugcagacguucaugcggauggcguggggcggguccuacaucgcccuggacagcggcugcggguccugggacugcaucaugaccagcuaccaguaccucaucauccagaacaccaccugggaggaccacugccaguucucccgccccagccccaucggcuaccuggggcugcucagccagcggacgcgcgacaucuacaucucccggcgccugcugggcaccuucaccuggacccucagcgacuccgagggcaacgagacgcccgggggcuacugccugacccgguggaugcugaucgaggccgagcucaagugcuucgggaacaccgccgucgccaagugcaacgagaagcacgacgaggaguucugcgacaugcugcgccuguucgacuucaacaagcaggcgauccggcgccucaagaccgaggcccagaugagcauccagcugaucaacaaggccgugaacgcccugaucaacgaccagcucaucaugaagaaccaccuccgggacaucaugugcauccccuacugcaacuacuccaaguacugguaccugaaccacacggugaccggcaagaccagccugccccgcugcuggcuggucuccaacgggagcuaccugaacgagacccacuucuccgacgacaucgagcagcaggccgacaacaugaucacggagaugcuccagaaggaguacauggaccggcagggcaagaccccgcugggccugguggaccuguucguguucagcaccuccuucuaccucaucagcaucuuccugcaccuggucaagaucccgacccaccgccacgugaucgggaagcccugccccaagccccaccggcucaaccacaugggcaucugcuccugcgggcuguacaagcacccgggcgugcccgucaaguggaagcgcugaggacuaguaauaaggaaacuguaugaaugucugugggcaggaagugaagagauccuucuguaaagguuuuuggaauuaugucugcugaauaauaaacuuuuuugaaauaauaaaucugguagaaaaaugagaucucaaaggcucuuuucagagccaccaaaaaaaaaaaaaaaaaaaaaaaaaaaaaaaaaaaaaaaaaaaaaaaaaaaaaaaaaaaaaaaaaaaaaaaaaaaaaaaaaaaaaaaaaaaaaaaaaaaaa

SEQ ID NO: 35927 - RNA, 1809 nt, Artificial Sequence
  mRNA product Design b-4 (hSL-A100) comprising derived and/or modified sequence from LASV(LASV237-NIG-2010;Clade II)__AIT17638__GPCmut9 (opt1)
aggagagucccgcagucggcguccagcggcucugcuuguucgugugugugucguugcaggccuuauucaagcuuaccaugggccagaucaucaccuucuuccaggaggugccccacgucaucgaggaggugaugaacaucgugcugaucgcccucagccugcuggccauccucaaggggaucuacaacgucgcgaccugcggccuguucgggcugguguccuuccuccugcugugcggccgcagcugcuccacgaccuacaaggggguguacgagcuccagacccuggagcuggacauggccagccucaacaugaccaugccgcuguccugcacgaagaacaacagccaccacuacaucauggucggcaacgagaccggccuggagcucacccugaccaacacguccaucaucaaccacaaguucugcaaccugagcgacgcccacaagaaggaccucuacgaccacgcccugauguccaucaucagcaccuuccaccuguccauccccaacuucaaccaguacgaggccaugagcugcgacuucaacgggggcaagaucuccgugcaguacaaccucagccacaccuacgcgguggacgccgccaaccacugcgggaccaucgccaacggcguccugcagacguucaugcggauggcguggggcggguccuacaucgcccuggacagcggcugcggguccugggacugcaucaugaccagcuaccaguaccucaucauccagaacaccaccugggaggaccacugccaguucucccgccccagccccaucggcuaccuggggcugcucagccagcggacgcgcgacaucuacaucucccggcgccugcugggcaccuucaccuggacccucagcgacuccgagggcaacgagacgcccgggggcuacugccugacccgguggaugcugaucgaggccgagcucaagugcuucgggaacaccgccguggccaagugcaacgagaagcacgacgaggaguucugcgacaugcugcgccuguucgacuucaacaagcaggcgauccggcgccucaagaccgaggcccagaugagcauccagcugaucaacaaggccgugaacgcccugaucaacgaccagcucaucaugaagaaccaccuccgggacaucaugugcauccccuacugcaacuacuccaaguacugguaccugaaccacacggucaccggcaagaccagccugccccgcugcuggcugguguccaacgggagcuaccugaacgagacccacuucuccgacgacaucgagcagcaggccgacaacaugaucacggagcuccugcagaaggaguacauggaccggcagggcaagaccccgcugggccugguggaccucuucgucuucagcaccuccuucuaccugaucagcaucuuccugcaccucaucaagaucccgacccaccgccacaucacggggaagcccugccccaagccccaccggcugaaccacaugggcaucugcuccugcgggcuguacaagcacccgggcgugcccgugaaguggaagcgcugaggacuaguaauaaggaaacuguaugaaugucugugggcaggaagugaagagauccuucuguaaagguuuuuggaauuaugucugcugaauaauaaacuuuuuugaaauaauaaaucugguagaaaaaugagaucucaaaggcucuuuucagagccaccaaaaaaaaaaaaaaaaaaaaaaaaaaaaaaaaaaaaaaaaaaaaaaaaaaaaaaaaaaaaaaaaaaaaaaaaaaaaaaaaaaaaaaaaaaaaaaaaaaaaa

SEQ ID NO: 35928 - RNA, 1809 nt, Artificial Sequence
  mRNA product Design b-4 (hSL-A100) comprising derived and/or modified sequence from LASV(LASV253-NIG-2011;Clade II)__AIT17670__GPCmut9 (opt1)
aggagagucccgcagucggcguccagcggcucugcuuguucgugugugugucguugcaggccuuauucaagcuuaccaugggccagaucaucaccuucuuccaggaggugccccacgucaucgaggaggugaugaacaucgugcugaucgcccucagccugcuggccauccucaaggggaucuacaacgucgcgaccugcggccuguucgggcugguguccuuccuccugcugugcggccgcagcugcuccacgaccuacaaggggguguacgagcuccagacccuggagcuggacauggccagccucaacaugaccaugccgcuguccugcacgaagaacaacagccaccacuacaucauggucggcaacgagaccggccuggagcucacccugaccaacacguccaucaucaaccacaaguucugcaaccugagcgacgcccacaagaagaaccucuacgaccacgcccugauguccaucaucagcaccuuccaccuguccauccccaacuucaaccaguacgaggccaugagcugcgacuucaacgggggcaagaucuccgugcaguacaaccucagccacaccuacgcgguggacgccgccaaccacugcgggaccaucgccaacggcguccugcagacguucaugcggauggcguggggcggguccuacaucgcccuggacagcggcugcggguccugggacugcaucaugaccagcuaccaguaccucaucauccagaacaccaccugggaggaccacugccaguucucccgccccagccccaucggcuaccuggggcugcucagccagcggacgcgcgacaucuacaucucccggcgccugcugggcaccuucaccuggacccucagcgacuccgagggcaacgagacgcccgggggcuacugccugacccgguggaugcugaucgaggccgagcucaagugcuucgggaacaccgccguggccaagugcaacgagaagcacgacgaggaguucugcgacaugcugcgccuguucgacuucaacaagcaggcgauccggcgccucaaggccgaggcccagaugagcauccagcugaucaacaaggccgugaacgcccugaucaacgaccagcucaucaugaagaaccaccuccgggacaucaugugcaucccguacugcaacuacuccaaguacugguaccugaaccacaccgucacgggccgcaccagccugccccggugcuggcugguguccaacgggagcuaccugaacgagacccacuucuccgacgacaucgagcagcaggcggacaacaugaucaccgagcuccugcagaaggaguacaucgaccgccagggcaagacgccccugggccugguggaccucuucgucuucagcaccuccuucuaccugaucagcaucuuccugcaccucgugaagaucccgacccaccggcacaucaucgggaagcccugccccaagccccaccgccugaaccacaugggcaucugcuccugcgggcuguacaagcacccgggcgugcccgucaaguggaagcggugaggacuaguaauaaggaaacuguaugaaugucugugggcaggaagugaagagauccuucuguaaagguuuuuggaauuaugucugcugaauaauaaacuuuuuugaaauaauaaaucugguagaaaaaugagaucucaaaggcucuuuucagagccaccaaaaaaaaaaaaaaaaaaaaaaaaaaaaaaaaaaaaaaaaaaaaaaaaaaaaaaaaaaaaaaaaaaaaaaaaaaaaaaaaaaaaaaaaaaaaaaaaaaaaa

SEQ ID NO: 35929 - RNA, 1809 nt, Artificial Sequence
  mRNA product Design b-4 (hSL-A100) comprising derived and/or modified sequence from LASV(LASV254-NIG-2011;Clade II)__AIT17674__GPCmut9 (opt1)
aggagagucccgcagucggcguccagcggcucugcuuguucgugugugugucguugcaggccuuauucaagcuuaccaugggccagaucaucaccuucuuccaggaggugccccacgucaucgaggaggugaugaacaucgugcugaucgcccucagccugcuggccauccucaaggggaucuacaacgucgcgaccugcggccuguucgggcugguguccuuccuccugcugugcggccgcagcugcuccacgaccuacaaggggguguacgagcuccagacccuggagcuggacaugaccaaccucaacaugacgaugccgcugagcugcaccaagaacaacucccaccacuacaucauggucggcaacgagaccggccuggagcucacccugacgaacaccagcaucaucaaccacaaguucugcaaccuguccgacgcccacaagaagaaccucuacaaccacgcccugaugagcaucaucuccaccuuccaccugagcauccccaacuucaaccaguacgaggccauguccugcgacuucaacgggggcaagaucagcgugcaguacaaccucucccacagcuacgccguggacgcggccaaccacugcgggaccaucgccaacggcguccugcagacguucaugcggauggccuggggcggguccuacaucgcgcuggacagcggcugcgggaacugggacugcaucaugaccuccuaccaguaccucaucauccagaacaccaccugggaggaccacugccaguucagccgccccucccccaucggcuaccuggggcugcucagccagcggacgcgcgacaucuacaucagccggcgccugcugggcaccuucaccuggacccucuccgacagcgagggcaacgagacgcccgggggcuacugccugacccgguggaugcugaucgaggccgagcucaagugcuucgggaacaccgccguggccaagugcaacgagaagcacgacgaggaguucugcgacaugcugcgccuguucgacuucaacaagcaggccauccggcgccucaagaccgaggcgcaggccaacauccagcugaucaacaaggccgugaacgcccugaucaacgaccagcucaucaugaagaaccaccuccgggacaucaugugcauccccuacugcaacuacuccaaguacugguaccugaaccacacggucaccggcaagaccagccugccccgcugcuggcugguguccaacgggagcuaccugaacgagacccacuucuccgacgacaucgagcagcaggccgacaacaugaucacggagcuccugcagaaggaguacauggaccggcagggcaagaccccgcugggccugguggaccucuucgucuucagcaccuccuucuaccugaucagcaucuuccugcaccucgugaagaucccgacccaccgccacgugaucgggaagcccugccccaagccccaccggcugaaccacaugggcaucugcuccugcgggcuguacaagcacccgggcguccccgugaaguggaagcgcugaggacuaguaauaaggaaacuguaugaaugucugugggcaggaagugaagagauccuucuguaaagguuuuuggaauuaugucugcugaauaauaaacuuuuuugaaauaauaaaucugguagaaaaaugagaucucaaaggcucuuuucagagccaccaaaaaaaaaaaaaaaaaaaaaaaaaaaaaaaaaaaaaaaaaaaaaaaaaaaaaaaaaaaaaaaaaaaaaaaaaaaaaaaaaaaaaaaaaaaaaaaaaaaaa

SEQ ID NO: 35930 - RNA, 1809 nt, Artificial Sequence
  mRNA product Design b-4 (hSL-A100) comprising derived and/or modified sequence from LASV(Nig08-A19;Clade III)__ADU56618__GPCmut9 (opt1)
aggagagucccgcagucggcguccagcggcucugcuuguucgugugugugucguugcaggccuuauucaagcuuaccaugggccagaucgugaccuucuuccaggaggucccccacgugaucgaggaggugaugaacaucguccugaucgcccucagcauccuggccauccugaaggggcucuacaacaucgcgaccugcggccugaucgggcuggugacguuccuccugcuguccggccgcagcugcuccaugaccuacaaggggguguacgagcuccagacccuggagcugaacaugaacacccucaacaugacgaugccgcugagcugcaccaagaacaacucccaccacuacaucauggucggcaacgagaccggccuggagcucacccugacgaacaccagccugcuccaccacaaguucugcaaccuguccgacgcccacaagaagaaccuguacgaccacacccucaugagcaucaucuccaccuuccaccugagcauccccaacuucaaccaguacgaggccauguccugcgacuucaacgggggcaagaucacggugcaguacaaccugagccacuccuacgccaucgacgccgcgaaccacugcgggaccguggccaacggcguccuccagaccuucaugcggauggccuggggcgggagcuacaucgcccuggacuccggcugcgggaagugggacugcaucaugaccagcuaccaguaccugaucauccagaacacgaccugggaggaccacugccaguucucccgccccagccccaucggcuaccucgggcugcugucccagcggacccgcgacaucuacaucagccggcgccuccugggcaccuucacguggacccugagcgacuccgagggcaacgagacccccgggggcuacugccucacccgguggaugcugaucgaggcggagcugaagugcuucgggaacacggccguggccaagugcaacgagaagcacgacgaggaguucugcgacaugcuccgccuguucgacuucaacaagcaggccauccggcgccugaaggccgaggcgcagaugagcauccagcucaucaacaaggccgugaacgcccugaucaacgaccagcugaucaugaagaaccaccuccgggacaucaugugcauccccuacugcaacuacuccaaguacugguaccugaaccacaccagcaccggccgcaccucccugccccggugcuggcucgucagcaacggguccuaccugaacgagacgcacuucagcgacgacaucgagcagcaggccgacaacaugaucaccgagaugcugcagaaggaguaccuggaccgccagggcaagaccccgcucggccugguggaccuguucguguucuccaccagcuucuaccucaucuccaucuuccugcaccuggucaagaucccgacgcaccggcacaucguggggaagcccugccccaagccccaccgccucaaccacaugggcaucugcagcugcgggcuguacaagcagccgggcgugcccguccgguggaagcgcugaggacuaguaauaaggaaacuguaugaaugucugugggcaggaagugaagagauccuucuguaaagguuuuuggaauuaugucugcugaauaauaaacuuuuuugaaauaauaaaucugguagaaaaaugagaucucaaaggcucuuuucagagccaccaaaaaaaaaaaaaaaaaaaaaaaaaaaaaaaaaaaaaaaaaaaaaaaaaaaaaaaaaaaaaaaaaaaaaaaaaaaaaaaaaaaaaaaaaaaaaaaaaaaaa

SEQ ID NO: 35931 - RNA, 1812 nt, Artificial Sequence
  mRNA product Design b-4 (hSL-A100) comprising derived and/or modified sequence from LASV(G1180-SLE-2010;Clade IV)__AIT17168__GPCmut9 (opt1)
aggagagucccgcagucggcguccagcggcucugcuuguucgugugugugucguugcaggccuuauucaagcuuaccaugggccagaucgugaccuucuuccaggaggucccccacgugaucgaggaggugaugaacaucguccugaucgcccucagcauccuggccgugcugaaggggcucuacaacuucgcgaccugcggccugguggggcugcucaccuuccugcugcucugcggccgcuccugcaccgccagccgguacaagggggucuacgagcugcagacccuggagcucaacauggagacccugaacaugacgaugccgcuguccugcaccaagaacaacagccaccacuacaucauggugggcaacgagaccggccucgagcugacccugacgaacaccuccaucaucaaccacaaguucugcaaccucagcgacgcccacaagaagaaccuguacgaccacgcccugauguccaucaucagcaccuuccaccucuccauccccaacuucaaccaguacgaggccaugagcugcgacuucaacgggggcaagaucuccgugcaguacaaccugagccacuccuacgcgggggacgccgccaaccacugcggcaccgucgccaacggggugcugcagacguucaugcgcauggcguggggcggcagcuacaucgcccucgacuccgggugcggcagcugggacugcaucaugaccuccuaccaguaccugaucauccagaacaccaccugggaggaccacugccaguucagccggcccucccccaucggguaccugggccuccugagccagcgcacgcgggacaucuacaucagccgccggcugcucggcaccuucaccuggacccuguccgacagcgaggggaaggacacgccgggcggguacugccugacccgcuggaugcucaucgaggccgagcugaagugcuucggcaacaccgccguggccaagugcaacgagaagcacgacgaggaguucugcgacaugcugcggcuguucgacuucaacaagcaggcgauccagcgccugaaggccgaggcccagauguccauccagcugaucaacaaggccgucaacgcccucaucaacgaccagcugaucaugaagaaccaccuccgggacaucaugugcauccccuacugcaacuacagcaaguacugguaccucaaccacaccacgaccgggaagaccucccugcccaagugcuggcuggugagcaacggcuccuaccucaacgagacccacuucagcgacgacaucgagcagcaggcggacaacaugaucacggagaugcugcagaaggaguacauggagcgccagggcaagacgccccuggggcugguggaccucuucgucuucuccaccagcuucuaccugaucuccaucuuccugcaccucgugaagaucccgacccaccggcacaucgugggcaagagcugccccaagccccaccgccugaaccacauggggaucugcuccugcggccuguacaagcagcccggggucccggugaaguggaagcggugaggacuaguaauaaggaaacuguaugaaugucugugggcaggaagugaagagauccuucuguaaagguuuuuggaauuaugucugcugaauaauaaacuuuuuugaaauaauaaaucugguagaaaaaugagaucucaaaggcucuuuucagagccaccaaaaaaaaaaaaaaaaaaaaaaaaaaaaaaaaaaaaaaaaaaaaaaaaaaaaaaaaaaaaaaaaaaaaaaaaaaaaaaaaaaaaaaaaaaaaaaaaaaaaa

SEQ ID NO: 35932 - RNA, 1812 nt, Artificial Sequence
  mRNA product Design b-4 (hSL-A100) comprising derived and/or modified sequence from LASV(G1442-SLE-2011;Clade IV)__AIT17180__GPCmut9 (opt1)
aggagagucccgcagucggcguccagcggcucugcuuguucgugugugugucguugcaggccuuauucaagcuuaccaugggccagaucgugaccuucuuccaggaggucccccacgugaucgaggaggugaugaacaucguccugaucgcccucagcauccuggccgugcugaaggggcucuacaacguggcgaccugcggccugaucgggcuggucacguuccuccugcugugcggccgcuccugcaccaccacccucuacaaggggguguacgagcugcagacgcuggagcucaacauggagacccugaacaugaccaugccgcugagcugcaccaagaacaacucccaccacuacauccgggugggcaacgagacgggccucgagcugacccugaccaacaccagcaucaucaaccacaaguucugcaaccucuccgacgcccacaagaagaaccuguacgaccacgcccugaugagcaucaucuccacguuccaccucagcauccccaacuucaaccaguacgaggccauguccugcgacuucaacgggggcaagaucagcguccaguacaaccugucccacagcuacgccggggacgcggccaaccacugcggcaccguggccaacggggugcugcagaccuucaugcgcauggccuggggcggcuccuacaucgcgcucgacagcgggugcggcaacugggacugcaucaugaccuccuaccaguaccugaucauccagaacacgaccugggacgaccacugccaguucagccggcccucccccaucggguaccugggccuccugagccagcgcacccgggacgucuacaucucccgccggcugcucggcaccuucacguggacccugagcgacagcgaggggaaggacaccccgggcggguacugccugacccgcuggaugcucaucgaggccgagcugaagugcuucggcaacacggccguggccaagugcaacgagaagcacgacgaggaguucugcgacaugcugcggcuguucgacuucaacaagcaggccauccagcgccugaaggcggaggcccagauguccauccagcugaucaacaaggccgugaacgcccucaucaacgaccagcugaucaugaagaaccaccuccgggacaucaugugcauccccuacugcaacuacagcaaguacugguaccucaacaacaccgccaccgggaagaccucccugcccaagugcuggcugaucagcaacggcuccuaccucaacgagacgcacuucagcgacgacaucgagcaggaggcggacaacaugaucaccgagaugcugcagaaggaguacauggagcgccagggcaagacgccccuggggcuggucgaccucuucguguucuccaccagcuucuaccugaucuccaucuuccugcaccucgugaagaucccgacccaccggcacaucgucggcaagagcugccccaagccccaccgccugaaccacauggggaucugcuccugcggccuguacaagcagcccggggugccggugcgguggaagcgcugaggacuaguaauaaggaaacuguaugaaugucugugggcaggaagugaagagauccuucuguaaagguuuuuggaauuaugucugcugaauaauaaacuuuuuugaaauaauaaaucugguagaaaaaugagaucucaaaggcucuuuucagagccaccaaaaaaaaaaaaaaaaaaaaaaaaaaaaaaaaaaaaaaaaaaaaaaaaaaaaaaaaaaaaaaaaaaaaaaaaaaaaaaaaaaaaaaaaaaaaaaaaaaaaa

SEQ ID NO: 35933 - RNA, 1812 nt, Artificial Sequence
  mRNA product Design b-4 (hSL-A100) comprising derived and/or modified sequence from LASV(G3010-SLE-2013;Clade IV)__AIT17344__GPCmut9 (opt1)
aggagagucccgcagucggcguccagcggcucugcuuguucgugugugugucguugcaggccuuauucaagcuuaccaugggccagaucgugaccuucuuccaggaggucccccacgugaucgaggaggugaugaacaucguccugaucgcccucagcauccuggccgugcugaaggggcucuacaacuucgcgaccugcggccugguggggcuggucacguuccuccugcugugcggccgcuccugcaccaccagccucuacaaggggguguacgagcugcagacccuggagcucaacauggagacgcugaacaugaccaugccgcuguccugcaccaagaacaacagccaccacuacaucauggugggcaacgagaccggccucgagcugacgcugaccaacaccuccaucaucaaccacaaguucugcaaccucagcgacgcccacaagaagaaccuguacaaccacgcccugauguccaucaucagcaccuuccaccucuccauccccaacuucaaccaguacgaggccaugagcugcgacuucaacgggggcaagaucuccguccaguacaaccugagccacuccuacgccggggacgcggccagccacugcggcacgguggccaacggggugcugcagaccuucaugcggauggccuggggcggcuccuacaucgcgcucgacagcgggugcggcaagugggacugcaucaugaccuccuaccaguaccugaucauccagaacaccacgugggaggaccacugccaguucagccgccccucccccaucggguaccugggccuccugagccagcggacccgcgacaucuacaucagccggcgccugcucggcaccuucaccuggacgcuguccgacagcgaggggaaggacaccccgggcggguacugccugacccgguggaugcucaucgaggccgagcugaagugcuucggcaacaccgccgucgccaagugcaacgagaagcacgacgaggaguucugcgacaugcugcgccucuucgacuucaacaagcaggccauccagcggcugaagacggaggcgcagauguccauccagcugaucaacaaggccgugaacgcccucaucaacgaccagcugaucaugaagaaccaccuccgcgacaucaugugcauccccuacugcaacuacagcaaguacugguaccugaaccacaccaccaccgggaagacgucccugcccaagugcuggcuggugagcaacggcuccuaccucaacgagacccacuucagcgacgacaucgagcagcaggccgacaacaugaucaccgagaugcugcagaaggaguacauggagcggcagggcaagacgccccuggggcuggucgaccucuucguguucuccaccagcuucuaccugaucuccaucuuccugcaccucgugaagaucccgacccaccgccacaucgucggcaagagcugccccaagccccaccggcugaaccacauggggaucugcuccugcggccuguacaagcagcccggggugccggugcgcuggaagcggugaggacuaguaauaaggaaacuguaugaaugucugugggcaggaagugaagagauccuucuguaaagguuuuuggaauuaugucugcugaauaauaaacuuuuuugaaauaauaaaucugguagaaaaaugagaucucaaaggcucuuuucagagccaccaaaaaaaaaaaaaaaaaaaaaaaaaaaaaaaaaaaaaaaaaaaaaaaaaaaaaaaaaaaaaaaaaaaaaaaaaaaaaaaaaaaaaaaaaaaaaaaaaaaaa

SEQ ID NO: 35934 - RNA, 1812 nt, Artificial Sequence
  mRNA product Design b-4 (hSL-A100) comprising derived and/or modified sequence from LASV(G502-SLE-2009;Clade IV)__AIT17126__GPCmut9 (opt1)
aggagagucccgcagucggcguccagcggcucugcuuguucgugugugugucguugcaggccuuauucaagcuuaccaugggccagaucgugaccuucuuccaggaggucccccacgugaucgaggaggugaugaacaucguccugaucgcccucagcauccuggccgugcugaaggggcucuacaacuucgcgaccugcggccugguggggcugcucacguuccugcugcucugcggccgcuccugcaccaccgggcuguacaagggcgucuacgagcugcagacccucgagcugaacauggagacgcugaacaugaccaugccgcucagcugcaccaagaacaacucccaccacuacaucauggugggcaacgagaccgggcuggagcugacgcucaccaacaccagcaucaucaaccacaaguucugcaaccuguccgacgcccacaagaagaaccuguacgaccacgcccucaugagcaucaucuccaccuuccaccugagcauccccaacuucaaccaguacgaggccauguccugcgacuucaacggcgggaagaucagcgugcaguacaaccugucccacagcuacgccggcgacgcggccgaccacugcgggacggucgccaacggcgugcuccagaccuucaugcggauggccuggggcggguccuacaucgcgcuggacagcggcugcgggcgcugggacugcaucaugaccuccuaccaguaccugaucauccagaacaccacgugggaggaccacugccaguucagccggcccucccccaucggcuaccucggccugcugagccagcgcacccgggacaucuacaucucccgccggcuccuggggaccuucaccuggacgcugagcgacagcgagggcaaggacacccccgggggcuacugccucacccgcuggaugcugaucgaggccgagcugaagugcuucgggaacaccgccguggccaagugcaacgagaagcacgacgaggaguucugcgacaugcuccggcuguucgacuucaacaagcaggccauccagcgccugaaggcggaggcccagauguccauccagcucaucaacaaggccgucaacgcccugaucaacgaccagcuggugaugaagaaccaccuccgggacaucaugugcauccccuacugcaacuacagccgcuacugguaccugaaccacacgaccaccggccggaccucccugcccaagugcuggcucgugagcaacggcuccuaccugaacgagacgcacuucagcgacgacaucgagcagcaggccgacaacaugaucaccgagaugcugcagaaggaguacauggagcgccaggggaagaccccgcugggccucgucgaccuguucguguucuccaccagcuucuaccugaucuccaucuuccuccaccuggugaagaucccgacgcaccggcacaucgucggcaagagcugccccaagccccaccgccugaaccacauggggaucugcuccugcgggcucuacaagcagcccggcgugccggugaaguggaagcggugaggacuaguaauaaggaaacuguaugaaugucugugggcaggaagugaagagauccuucuguaaagguuuuuggaauuaugucugcugaauaauaaacuuuuuugaaauaauaaaucugguagaaaaaugagaucucaaaggcucuuuucagagccaccaaaaaaaaaaaaaaaaaaaaaaaaaaaaaaaaaaaaaaaaaaaaaaaaaaaaaaaaaaaaaaaaaaaaaaaaaaaaaaaaaaaaaaaaaaaaaaaaaaaaa

SEQ ID NO: 35935 - RNA, 1812 nt, Artificial Sequence
  mRNA product Design b-4 (hSL-A100) comprising derived and/or modified sequence from LASV(G733-SLE-2010;Clade IV)__AIT17154__GPCmut9 (opt1)
aggagagucccgcagucggcguccagcggcucugcuuguucgugugugugucguugcaggccuuauucaagcuuaccaugggccagaucgugaccuucuuccaggaggucccccacgugaucgaggaggugaugaacaucguccugaucgcccucagcauccuggccgugcugaaggggcucuacaacuucgcgaccugcggcaucguggggcuggucuccuuccugcuccugugcggccgcagcugcacgaccucccuguacaaggggguguacgagcuccagacccuggagcugaacauggagacccucaacaugacgaugccgcugagcugcaccaagaacaacucccaccacuacaucauggugggcaacgagaccggccuggagcucacccugacgaacaccagcaucaucaaccacaaguucugcaaccuguccgacgcccacaagaagaaccucuacgaccacgcccugaugagcaucaucuccaccuuccaccugagcauccccaacuucaaccaguacgaggccauguccugcgacuucaacgggggcaagaucagcguccaguacaaccucucccacagcuacgccggggacgcggccaaccacugcggcaccaucgccaacggggugcugcagacguucaugcggauggccuggggcggcuccuacaucgcgcuggacagcgggugcgaccgcugggacugcaucaugaccuccuaccaguaccucaucauccagaacaccaccugggaggaccacugccaguucagccggcccucccccaucggcuaccuggggcugcucagccagcgcacgcgggacaucuacaucagccgccggcugcugggcaccuucaccuggacccucuccgacagcgagggcaaggacacgcccgggggcuacugccugacccgcuggaugcugaucgaggccgagcucaagugcuucgggaacaccgccguggccaagugcaacgagaagcacgacgaggaguucugcgacaugcugcggcuguucgacuucaacaagcaggccauccagcgccucaaggcggaggcccagauguccauccagcugaucaacaaggccgucaacgcccugaucaacgaccagcucaucaugaagaaccaccuccgggacaucaugugcauccccuacugcaacuacagcaaguacugguaccugaaccacaccacgaccggcaagaccucccugcccaagugcuggcuggugagcaacggguccuaccugaacgagacccacuucagcgacgacaucgagcagcaggccgacaacaugaucacggagaugcuccagaaggaguacauggagcgccagggcaagaccccgcugggccugguggaccuguucgucuucuccaccagcuucuaccucaucuccaucuuccugcaccuggugaagaucccgacccaccggcacguggucggcaagagcugccccaagccccaccgccucaaccacauggggaucugcuccugcgggcuguacggccagcccggggugccggugaaguggaagcggugaggacuaguaauaaggaaacuguaugaaugucugugggcaggaagugaagagauccuucuguaaagguuuuuggaauuaugucugcugaauaauaaacuuuuuugaaauaauaaaucugguagaaaaaugagaucucaaaggcucuuuucagagccaccaaaaaaaaaaaaaaaaaaaaaaaaaaaaaaaaaaaaaaaaaaaaaaaaaaaaaaaaaaaaaaaaaaaaaaaaaaaaaaaaaaaaaaaaaaaaaaaaaaaaa

SEQ ID NO: 35936 - RNA, 1812 nt, Artificial Sequence
  mRNA product Design b-4 (hSL-A100) comprising derived and/or modified sequence from MOPV/LASV reassortant(IGS-1;Clade IV)__AFY05576__GPCmut9 (opt1)
aggagagucccgcagucggcguccagcggcucugcuuguucgugugugugucguugcaggccuuauucaagcuuaccaugggccagaucgugaccuucuuccaggaggucccccacgugaucgaggaggugaugaacaucguccugaucgcccucagcgugcuggccgugcugaaggggcucuacaacuucgcgaccugcggccuggucgggcuggugacguuccuccugcugugcggccgcuccugcaccaccagccucuacaaggggguguacgagcugcagacccuggagcucaacauggagacgcugaacaugaccaugccgcuguccugcaccaagaacaacagccaccacuacaucauggucggcaacgagaccggccucgagcugacgcugaccaacaccuccaucaucaaccacaaguucugcaaccucagcgacgcccacaagaagaaccuguacgaccacgcccugauguccaucaucagcaccuuccaccucuccauccccaacuucaaccaguacgaggccaugagcugcgacuucaacgggggcaagaucuccgugcaguacaaccugagccacuccuacgccggggacgcggccaaccacugcggcacgguggccaacgggguccugcagaccuucaugcggauggccuggggcggcagcuacaucgcgcucgacuccgggugcggcaacugggacugcaucaugaccagcuaccaguaccugaucauccagaacaccacgugggaggaccacugccaguucucccgccccagccccaucggguaccugggccuccugucccagcggacccgcgacaucuacaucagccggcgccugcucggcaccuucaccuggacgcugagcgacuccgagggggaggacaccccgggcggguacugccugacccgguggaugcucaucgaggccgagcugaagugcuucggcaacaccgccguggccaagugcaacgagaagcacgacgaggaguucugcgacaugcugcgccucuucgacuucaacaagcaggccauccagcggcugaaggcggaggcccagaugagcauccagcugaucaacaaggccgugaacgcccucaucaacgaccagcugaucaugaagaaccaccuccgcgacaucaugugcauccccuacugcaacuacuccaaguacugguaccugaaccacacgaccaccgggcggaccagccugcccaagugcuggcuggucuccaacggcagcuaccucaacgagacgcacuucuccgacgacaucgagcagcaggccgacaacaugaucaccgagaugcugcagaaggaguacauggagcgccagggcaagacgccccuggggcugguggaccucuucguguucagcaccuccuucuaccugaucagcaucuuccugcaccucgucaagaucccgacccaccggcacaucgugggcaaguccugccccaagccccaccgccugaaccacauggggaucugcagcugcggccuguacaagcagcccggggugccggucaaguggaagcggugaggacuaguaauaaggaaacuguaugaaugucugugggcaggaagugaagagauccuucuguaaagguuuuuggaauuaugucugcugaauaauaaacuuuuuugaaauaauaaaucugguagaaaaaugagaucucaaaggcucuuuucagagccaccaaaaaaaaaaaaaaaaaaaaaaaaaaaaaaaaaaaaaaaaaaaaaaaaaaaaaaaaaaaaaaaaaaaaaaaaaaaaaaaaaaaaaaaaaaaaaaaaaaaaa

SEQ ID NO: 35937 - RNA, 1812 nt, Artificial Sequence
  mRNA product Design b-4 (hSL-A100) comprising derived and/or modified sequence from LASV(LM765-SLE-2012;Clade IV)__AIT17814__GPCmut9 (opt1)
aggagagucccgcagucggcguccagcggcucugcuuguucgugugugugucguugcaggccuuauucaagcuuaccaugggccagaucgugaccuucuuccaggaggucccccacgugaucgaggaggugaugaacaucguccugaucgcccucagcauccuggccgugcugaaggggcucuacaacuucgcgaccugcggccugguggggcuggucacguuccuccugcugugcggccgcuccugcaccaccagccucuacaaggggguguacgagcugcagacccuggagcucaacauggagacgcugaacaugaccaugccgcuguccugcaccaagaacaacagccaccacuacaucauggugggcaacgagaccggccucgagcugacgcugaccaacaccuccaucaucgaccacaaguucugcaaccucagcgacgcccaccggaagaaccuguacgaccacgcccugauguccaucaucagcaccuuccaccucuccauccccaacuucaaccaguacgaggccaugagcugcgacuucaacgggggcaagaucuccguccaguacaaccugagccacuccuacgccaaggacgcggccgaccacugcgggacgguggccaacggcgugcugcagaccuucaugcgcauggccuggggcgggagcuacaucgcgcucgacuccggcugcgggcggugggacugcaucaugaccagcuaccaguaccugaucauccagaacaccacgugggaggaccacugccaguucucccgccccagccccaucggcuaccuggggcuccugucccagcggacccgcgacaucuacaucagccggcgccugcucggcaccuucaccuggacgcugagcgacuccgagggcaaggacacccccgggggcuacugccugacccgguggaugcucaucgaggccgagcugaagugcuucgggaacaccgccgucgccaagugcaacgagaagcacgacgaggaguucugcgacaugcugcgccucuucgacuucaacaagcaggccauccagcggcugaaggcggaggcccagaugagcauccagcugaucaacaaggccgugaacgcccucaucaacgaccagcugaucaugaagaaccaccuccgcgacaucaugugcauccccuacugcaacuacuccaaguacugguaccugaaccacacgaccaccggcaagaccagccugcccaagugcuggcugguguccaacgggagcuaccucaacgagacgcacuucuccgacgacaucgagcagcaggccgacaacaugaucaccgagaugcugcagaaggaguacauggagcggcagggcaagaccccgcugggccuggucgaccucuucguguucagcaccuccuucuaccugaucagcaucuuccugcaccucgugaagaucccgacgcaccgccacaucgucgggaagcccugccccaagccccaccggcugaaccacaugggcaucugcuccugcgggcuguacaagcagccgggcgugcccgugaaguggaagcgcugaggacuaguaauaaggaaacuguaugaaugucugugggcaggaagugaagagauccuucuguaaagguuuuuggaauuaugucugcugaauaauaaacuuuuuugaaauaauaaaucugguagaaaaaugagaucucaaaggcucuuuucagagccaccaaaaaaaaaaaaaaaaaaaaaaaaaaaaaaaaaaaaaaaaaaaaaaaaaaaaaaaaaaaaaaaaaaaaaaaaaaaaaaaaaaaaaaaaaaaaaaaaaaaaa

SEQ ID NO: 35938 - RNA, 1812 nt, Artificial Sequence
  mRNA product Design b-4 (hSL-A100) comprising derived and/or modified sequence from LASV(LM776-SLE-2012;Clade IV)__AIT17824__GPCmut9 (opt1)
aggagagucccgcagucggcguccagcggcucugcuuguucgugugugugucguugcaggccuuauucaagcuuaccaugggccagaucgugaccuucuuccaggaggucccccacgugaucgaggaggugaugaacaucguccugaucgcccucagcauccuggccgugcugaaggggcucuacaacuucgcgaccugcggccugguggggcuggucacguuccuccugcugugcggccgcuccugcaccaccagcguguacaaggggguguacgagcuccagacccuggagcugaacauggagacgcucaacaugaccaugccgcuguccugcaccaagaacaacagccaccacuacaucauggucggcaacgagaccggccuggagcucacgcugaccaacaccuccaucaucaaccacaaguucugcaaccugagcgacgcccacaagaagaaccucuacgaccacgcccugauguccaucaucagcaccuuccaccuguccauccccaacuucaaccaguacgaggccaugagcugcgacuucaacgggggcaagaucuccgugcaguacaaccucagccacuccuacgccggggacgcggccaaccacugcggcacgguggccaacgggguccugcagaccuucaugcggauggccuggggcggcagcuacaucgcgcuggacuccgggugcggcaagugggacugcaucaugaccagcuaccaguaccucaucauccagaacaccacgugggaggaccacugccaguucucccgccccagccccaucggguaccugggccugcucucccagcggacccgcgacaucuacaucagccggcgccugcugggcaccuucaccuggacgcucagcgacuccgaggggaaggacaccccgggcggguacugccugacccgguggaugcugaucgaggccgagcucaagugcuucggcaacaccgccguggccaagugcaacgagaagcacgacgaggaguucugcgacaugcugcgccuguucgacuucaacaagcaggccauccagcggcucaaggcggaggcccagaugagcauccagcugaucaacaaggccgugaacgcccugaucaacgaccagcucaucaugaagaaccaccuccgcgacaucaugugcauccccuacugcaacuacuccaaguacugguaccugaaccacacgaccaccgggaagaccagccugcccaagugcuggcuggucuccaacggcagcuaccugaacgagacgcacuucuccgacgacaucgagcagcaggccgacaacaugaucaccgagaugcuccagaaggaguacauggagcggcagggcaagacgccccuggggcugguggaccuguucguguucagcaccuccuucuaccucaucagcaucuuccugcaccuggucaagaucccgacccaccgccacaucgugggcaaguccugccccaagccccaccggcucaaccacauggggaucugcagcugcggccuguacaagcagcccggggugccgguccgcuggaagcggugaggacuaguaauaaggaaacuguaugaaugucugugggcaggaagugaagagauccuucuguaaagguuuuuggaauuaugucugcugaauaauaaacuuuuuugaaauaauaaaucugguagaaaaaugagaucucaaaggcucuuuucagagccaccaaaaaaaaaaaaaaaaaaaaaaaaaaaaaaaaaaaaaaaaaaaaaaaaaaaaaaaaaaaaaaaaaaaaaaaaaaaaaaaaaaaaaaaaaaaaaaaaaaaaa

SEQ ID NO: 35939 - RNA, 1812 nt, Artificial Sequence
  mRNA product Design b-4 (hSL-A100) comprising derived and/or modified sequence from LASV(Mad39;Clade IV)__ANH09722__GPCmut9 (opt1)
aggagagucccgcagucggcguccagcggcucugcuuguucgugugugugucguugcaggccuuauucaagcuuaccaugggccagaucgugaccuucuuccaggaggucccccacgugaucgaggaggugaugaacaucguccugaucgcccucagcauccuggccgugcugaaggggcucuacaacguggcgaccugcggccugaucgggcuggucacguuccuccugcugugcggccgcuccugcaccaccacccucuacaaggggguguacgagcugcaggcccuggagcucaacauggagacgcugaacaugaccaugccgcugagcugcaccaagaacaacucccaccacuacauccgggugggcaacgagaccggccucgagcugacgcugaccaacaccagccucaucaaccacaaguucugcaaccuguccgacgcccacaagaagaaccuguacgaccacgcccucaugagcaucaucuccaccuuccaccugagcauccccaacuucaaccaguacgaggccauguccugcgacuucaacgacgggaagaucagcguccaguacaaccugucccacacguacgcgggcgacaccgccaaccacugcgggaccguggccaacggcgugcuccagaccuucaugcgcauggccuggggcgggagcuacaucgcgcuggacuccggcugcgggggcugggacugcaucaugacgagcuaccaguaccugaucauccagaacaccaccugggaggaccacugccaguucucccggcccagccccaucggguaccucggccugcugucccagcgcacccgggacaucuacaucagccgccggcuccugggcacguucaccuggacccuguccgacagcgaggggaaggacaccccgggcggguacugccucacgcgcuggaugcugaucgaggccgagcugaagugcuucggcaacaccgccgucgccaagugcaacgagaagcacgacgaggaguucugcgacaugcuccggcuguucgacuucaacaagcaggccauccagcgccugaaggcggaggcccagaugagcauccagcucaucaacaaggccgugaacgcccugaucaacgaccagcugaucaugaagaaccaccuccgggacaucaugugcauccccuacugcaacuacuccaaguacugguaccugaaccacaccgugaccgggaagacgagccugcccaagugcuggcucgucuccaacggcagcuaccugaacgagacccacuucuccgacgacaucgagcagcaggccgacaacaugaucaccgagaugcugcagaaggaguacauggagcgccagggcaagacgccccuggggcucguggaccuguucguguucagcaccuccuucuaccugaucagcaucuuccuccaccuggucaagaucccgacccaccggcacguggugggcaagcccugccccaagccccaccgccugaaccacauggggaucugcuccugcggcuucuacaagcagccggggguccccgugcgguggaagcgcugaggacuaguaauaaggaaacuguaugaaugucugugggcaggaagugaagagauccuucuguaaagguuuuuggaauuaugucugcugaauaauaaacuuuuuugaaauaauaaaucugguagaaaaaugagaucucaaaggcucuuuucagagccaccaaaaaaaaaaaaaaaaaaaaaaaaaaaaaaaaaaaaaaaaaaaaaaaaaaaaaaaaaaaaaaaaaaaaaaaaaaaaaaaaaaaaaaaaaaaaaaaaaaaaa

SEQ ID NO: 35940 - RNA, 1812 nt, Artificial Sequence
  mRNA product Design b-4 (hSL-A100) comprising derived and/or modified sequence from LASV(Z0947-SLE-2011;Clade IV)__AIT17840__GPCmut9 (opt1)
aggagagucccgcagucggcguccagcggcucugcuuguucgugugugugucguugcaggccuuauucaagcuuaccaugggccagaucgugaccuucuuccaggaggucccccacgugaucgaggaggugaugaacaucguccugaucgcccucagcauccuggccgugcugaaggggcucuacaacuucgcgaccugcggccugguggggcuggucacguuccuccugcugugcggccgcuccugcaccaucagccucuacaaggggguguacgagcugcagacccuggagcucaacauggagacccugaacaugacgaugccgcuguccugcaccaagaacaacagccaccacuacaucauggugggcaacgagaccggccucgagcugacccugacgaacaccuccaucaucaaccacaaguucugcaaccucagcgacgcccacaagaagaaccuguacgaccacgcccugauguccaucaucagcaccuuccaccucuccauccccaacuucaaccaguacgaggccaugagcugcgacuucaacgggggcaagaucuccguccaguacaaccugagccacuccuacgccggggacgcggccaaccacugcggcaccguggccaacggggugcugcagacguucaugcggauggccuggggcggcagcuacaucgcgcucgacuccgggugcgaccgcugggacugcaucaugaccagcuaccaguaccugaucauccagaacaccaccugggaggaccacugccaguucucccggcccagccccaucggcuaccuggggcuccugucccagcgcacgcgggacaucuacaucagccgccggcugcucggcaccuucaccuggacccugagcgacuccgagggcaaggacacgcccgggggcuacugccugacccgcuggaugcucaucgaggccgagcugaagugcuucgggaacaccgccgucgccaagugcaacgagaagcacgacgaggaguucugcgacaugcugcggcuguucgacuucaacaagcaggccauccagcgccugaaggcggaggcccagaugagcauccagcugaucaacaaggccgugaacgcccucaucaacgaccagcugaucaugaagaaccaccuccgggacaucaugugcauccccuacugcaacuacuccaaguacugguaccucaaccacaccacgaccggcaagaccagccugcccaagugcuggcugguguccaacgggagcuaccucaacgagacccacuucuccgacgacaucgagcagcaggccgacaacaugaucacggagaugcugcagaaggaguacauggagcgccagggcaagaccccgcugggccuggucgaccucuucguguucagcaccuccuucuaccugaucagcaucuuccugcaccucgugaagaucccgacccaccggcacaucgucgggaagcccugccccaagccccaccgccugaaccacaugggcaucugcuccugcgggcuguacaagcagccgggcgugcccgugaaguggaagcggugaggacuaguaauaaggaaacuguaugaaugucugugggcaggaagugaagagauccuucuguaaagguuuuuggaauuaugucugcugaauaauaaacuuuuuugaaauaauaaaucugguagaaaaaugagaucucaaaggcucuuuucagagccaccaaaaaaaaaaaaaaaaaaaaaaaaaaaaaaaaaaaaaaaaaaaaaaaaaaaaaaaaaaaaaaaaaaaaaaaaaaaaaaaaaaaaaaaaaaaaaaaaaaaaa

SEQ ID NO: 35941 - RNA, 1812 nt, Artificial Sequence
  mRNA product Design b-4 (hSL-A100) comprising derived and/or modified sequence from LASV(Josiah;Clade IV)__NP_694870__GPCmut9 (opt4)
aggagagucccgcagucggcguccagcggcucugcuuguucgugugugugucguugcaggccuuauucaagcuuaccaugggccagaucgugaccuucuuccaggaggugccccacgugaucgaggaggugaugaacaucgugcugaucgcccugagcgugcuggccgugcugaagggccuguacaacuucgccaccugcggccuggugggccuggugaccuuccugcugcugugcggcagaagcugcaccaccagccuguacaagggcguguacgagcugcagacccuggagcugaacauggagacccugaacaugaccaugccccugagcugcaccaagaacaacagccaccacuacaucauggugggcaacgagaccggccuggagcugacccugaccaacaccagcaucaucaaccacaaguucugcaaccugagcgacgcccacaagaagaaccuguacgaccacgcccugaugagcaucaucagcaccuuccaccugagcauccccaacuucaaccaguacgaggccaugagcugcgacuucaacggcggcaagaucagcgugcaguacaaccugagccacagcuacgccggcgacgccgccaaccacugcggcaccguggccaacggcgugcugcagaccuucaugagaauggccuggggcggcagcuacaucgcccuggacagcggcugcggcaacugggacugcaucaugaccagcuaccaguaccugaucauccagaacaccaccugggaggaccacugccaguucagcagacccagccccaucggcuaccugggccugcugagccagagaaccagagacaucuacaucagcagaagacugcugggcaccuucaccuggacccugagcgacagcgagggcaaggacacccccggcggcuacugccugaccagauggaugcugaucgaggccgagcugaagugcuucggcaacaccgccguggccaagugcaacgagaagcacgacgaggaguucugcgacaugcugagacuguucgacuucaacaagcaggccauccagagacugaaggccgaggcccagaugagcauccagcugaucaacaaggccgugaacgcccugaucaacgaccagcugaucaugaagaaccaccugagagacaucaugugcauccccuacugcaacuacagcaaguacugguaccugaaccacaccaccaccggcagaaccagccugcccaagugcuggcuggugagcaacggcagcuaccugaacgagacccacuucagcgacgacaucgagcagcaggccgacaacaugaucaccgagaugcugcagaaggaguacauggagagacagggcaagaccccccugggccugguggaccuguucguguucagcaccagcuucuaccugaucagcaucuuccugcaccuggugaagauccccacccacagacacaucgugggcaagagcugccccaagccccacagacugaaccacaugggcaucugcagcugcggccuguacaagcagcccggcgugcccgugaaguggaagagaugaggacuaguaauaaggaaacuguaugaaugucugugggcaggaagugaagagauccuucuguaaagguuuuuggaauuaugucugcugaauaauaaacuuuuuugaaauaauaaaucugguagaaaaaugagaucucaaaggcucuuuucagagccaccaaaaaaaaaaaaaaaaaaaaaaaaaaaaaaaaaaaaaaaaaaaaaaaaaaaaaaaaaaaaaaaaaaaaaaaaaaaaaaaaaaaaaaaaaaaaaaaaaaaaa

SEQ ID NO: 35942 - RNA, 1809 nt, Artificial Sequence
  mRNA product Design b-4 (hSL-A100) comprising derived and/or modified sequence from LASV(LP;Clade I)__AAF86701__GPCmut9 (opt4)
aggagagucccgcagucggcguccagcggcucugcuuguucgugugugugucguugcaggccuuauucaagcuuaccaugggccagaucaucaccuucuuccaggaggugccccacgugaucgaggaggugaugaacaucgugcugaucgcccugagccugcuggccauccugaagggccuguacaacaucgccaccugcggcaucaucggccugguggccuuccuguuccugugcggcaagagcugcagccugacccugaagggcggcuacgagcugcagacccuggagcugaacauggagacccugaacaugaccaugccccugagcugcaccaagaacagcagccaccacuacaucagagugggcaacgagaccggccuggagcugacccugaccaacaccagcaucaucaaccacaaguucugcaaccugagcgacgcccacaagaagaaccuguacgaccacgcccugaugagcaucaucagcaccuuccaccugagcauccccaacuucaaccaguacgaggccaugagcugcgacuucaacggcggcaagaucagcgugcaguacaaccugagccacagcuacgccggcgacgccgccgagcacugcggcaccguggccaacggcgugcugcagaccuucaugagaauggccuggggcggcagauacaucgcccuggacagcggcugcggcaacugggacugcaucaugaccagcuaccaguaccugaucauccagaacaccaccugggaggaccacugccaguucagcagacccagccccaucggcuaccugggccugcugagccagagaaccagagacaucuacaucagcagaagacugcugggcaccuucaccuggacccugagcgacagcgagggcaacgagacccccggcggcuacugccugaccagauggaugcugaucgaggccgagcugaagugcuucggcaacaccgccguggccaagugcaacgagaagcacgacgaggaguucugcgacaugcugagacuguucgacuucaacaagcaggccaucagaagacugaaggccgaggcccagaugagcauccagcugaucaacaaggccgugaacgcccugaucaacgaccagcugaucaugaagaaccaccugagagacaucaugugcauccccuacugcaacuacagcaaguacugguaccugaaccacaccagcagcggcagaaccagccugcccaagugcuggcugaucagcaacggcagcuaccugaacgagacccaguucagcgacgacaucgagcagcaggccgacaacaugaucaccgagaugcugcagaaggaguacaucgagagacagggcaagaccccccugggccugguggacaucuucaucuucagcaccagcuucuaccugaucagcaucuuccugcaccugaucaagauccccacccacagacacaucgugggcaagcccugccccaagccccacagacugaaccacaugggcgugugcagcugcggccuguacaagcaccccggcgugcccaccaaguggaagagaugaggacuaguaauaaggaaacuguaugaaugucugugggcaggaagugaagagauccuucuguaaagguuuuuggaauuaugucugcugaauaauaaacuuuuuugaaauaauaaaucugguagaaaaaugagaucucaaaggcucuuuucagagccaccaaaaaaaaaaaaaaaaaaaaaaaaaaaaaaaaaaaaaaaaaaaaaaaaaaaaaaaaaaaaaaaaaaaaaaaaaaaaaaaaaaaaaaaaaaaaaaaaaaaaa

SEQ ID NO: 35943 - RNA, 1809 nt, Artificial Sequence
  mRNA product Design b-4 (hSL-A100) comprising derived and/or modified sequence from LASV(803213;Clade II)__AAF86703__GPCmut9 (opt4)
aggagagucccgcagucggcguccagcggcucugcuuguucgugugugugucguugcaggccuuauucaagcuuaccaugggccagaucaucaccuucuuccaggaggugccccacgugaucgaggaggugaugaacaucgugcugaucgcccugagccugcuggccauccugaagggcaucuacaacguggccaccugcggccuguucggccugaucagcuuccugcugcugugcggcagaagcugcagcgugaccuacaagggcguguacgagcugcagacccuggagcugaacauggccaaccugaacaugaccaugccccugagcugcaccaagaacaacagccaccacuacaucauggugggcaacgagaccggccuggagcugacccugaccaacaccagcaucaucaaccacaaguucugcaaccugagcgacgcccacaagaagaaccuguacgaccacgcccugaugagcaucaucagcaccuuccaccugagcauccccaacuucaaccaguacgaggccaugagcugcgacuucaacggcggcaagaucagcgugcaguacaaccugagccacagcuucgccguggacgccgccaaccacugcggcaccaucgccaacggcgugcugcagaccuucaugagaauggccuggggcggcagcuacaucgcccuggacagcggcugcggcaacugggacugcaucaugaccagcuaccaguaccugaucauccagaacaccaccugggaggaccacugccaguucagcagacccagccccaucggcuaccugggccugcugagccagagaaccagagacaucuacaucagcagaagacugcugggcaccuucaccuggacccugagcgacagcgagggcaacgaggcccccggcggcuacugccugaccagauggaugcugaucgaggccgagcugaagugcuucggcaacaccgccguggccaagugcaacgagaagcacgacgaggaguucugcgacaugcugagacuguucgacuucaacaagcaggccaucaagagacugaagaccgaggcccagaugagcauccagcugaucaacaaggccgugaacgcccugaucaacgaccagcugaucaugaagaaccaccugagagacaucaugugcauccccuacugcaacuacagcagauacugguaccugaaccacaccgugaccggcaagaccagccugcccagaugcuggcuggugagcaacggcagcuaccugaacgagacccacuucagcgacgacaucgagcagcaggccgacaacaugaucaccgagaugcugcagaaggaguacauggacagacagggcaagaccccccugggccugguggaccuguucguguucagcaccagcuucuaccugaucagcaucuuccugcaccuggugaagauccccacccacagacacaucgugggcaagcccugccccaagccccacagacugaaccacaugggcaucugcagcugcggccuguacaagcaccccggcgugcccgugaaguggaagagaugaggacuaguaauaaggaaacuguaugaaugucugugggcaggaagugaagagauccuucuguaaagguuuuuggaauuaugucugcugaauaauaaacuuuuuugaaauaauaaaucugguagaaaaaugagaucucaaaggcucuuuucagagccaccaaaaaaaaaaaaaaaaaaaaaaaaaaaaaaaaaaaaaaaaaaaaaaaaaaaaaaaaaaaaaaaaaaaaaaaaaaaaaaaaaaaaaaaaaaaaaaaaaaaaa

SEQ ID NO: 35944 - RNA, 1809 nt, Artificial Sequence
  mRNA product Design b-4 (hSL-A100) comprising derived and/or modified sequence from LASV(GA391;Clade III)__CAA36645__GPCmut9 (opt4)
aggagagucccgcagucggcguccagcggcucugcuuguucgugugugugucguugcaggccuuauucaagcuuaccaugggccagaucgugaccuucuuccaggaggugccccacgugaucgaggaggugaugaacaucgugcugaucgcccugagcauccuggccauccugaagggccuguacaacguggccaccugcggccugaucggccuggugaccuuccugcugcugagcggcagaagcugcagccugaucuacaagggcaccuacgagcugcagacccuggagcugaacauggagacccugaacaugaccaugccccugagcugcaccaagaacaacagccaccacuacaucagagugggcaacgagaccggccuggagcugacccugaccaacaccagcauccugaaccacaaguucugcaaccugagcgacgcccacaagagaaaccuguacgaccacagccugaugagcaucaucagcaccuuccaccugagcauccccaacuucaaccaguacgaggccaugagcugcgacuucaacggcggcaagaucaccgugcaguacaaccugagccacagcuucgccguggacgccgccggccacugcggcacccuggccaacggcgugcugcagaccuucaugagaauggccuggggcggcagcuacaucgcccuggacagcggcugcggcaacugggacugcaucaugaccagcuaccaguaccugaucauccagaacaccaccugggacgaccacugccaguucagcagacccagccccaucggcuaccugggccugcugagccagagaaccagagacaucuacaucagcagaagacugcugggcaccuucaccuggacccugagcgacagcgagggcaacgagacccccggcggcuacugccugaccagauggaugcugaucgaggccgagcugaagugcuucggcaacaccgccguggccaagugcaacgagaagcacgacgaggaguucugcgacaugcugagacuguucgacuucaacaagcaggccaucagaagacugaagaccgaggcccagaugagcauccagcugaucaacaaggccgugaacgcccugaucaacgaccagcugaucaugaagaaccaccugagagacaucaugugcauccccuacugcaacuacagcagauacugguaccugaaccacaccagcaccggcaagaccagccugcccagaugcuggcugaucagcaacggcagcuaccugaacgagaccaaguucagcgacgacaucgagcagcaggccgacaacaugaucaccgagaugcugcagaaggaguacaucgacagacagggcaagaccccccugggccugguggaccuguucguguucagcaccagcuucuaccugaucagcaucuuccugcaccuggugaagauccccacccacagacacaucgugggcaagcccugccccaagccccacagacugaaccacaugggcaucugcagcugcggccuguacaagcagcccggcgugcccgugagauggaagagaugaggacuaguaauaaggaaacuguaugaaugucugugggcaggaagugaagagauccuucuguaaagguuuuuggaauuaugucugcugaauaauaaacuuuuuugaaauaauaaaucugguagaaaaaugagaucucaaaggcucuuuucagagccaccaaaaaaaaaaaaaaaaaaaaaaaaaaaaaaaaaaaaaaaaaaaaaaaaaaaaaaaaaaaaaaaaaaaaaaaaaaaaaaaaaaaaaaaaaaaaaaaaaaaaa

SEQ ID NO: 35945 - RNA, 1812 nt, Artificial Sequence
  mRNA product Design b-4 (hSL-A100) comprising derived and/or modified sequence from LASV(AV;Clade V)__CCA30314__GPCmut9 (opt4)
aggagagucccgcagucggcguccagcggcucugcuuguucgugugugugucguugcaggccuuauucaagcuuaccaugggccagaucgugaccuucuuccaggaggugccccacgugaucgaggaggugaugaacaucgugcugaucgcccugagcauccuggccgugcugaagggccuguacaacaucgccaccugcggccugaucggccugaucaccuuccugcugcugugcggcagaagcugcagcagcaaccuguacaagggcguguacgagcugcagagccuggaccugaacauggagacccugaacaugaccaugccccugagcugcaccaagaacaacagccaccacuacaucagagugggcaacgacaccggccuggagcugacccugaccaacaccagcauccugaaccacaaguucugcaaccugagcgacgcccacaagaaggaccuguacgaccacgcccugaugagcaucaucagcaccuuccaccugagcauccccaacuucaaccaguacgaggccaugagcugcgacuucaacggcggcaagaucagcgugcaguacaaccugagccacagcuacgccaucgacgccgccaaccacugcggcaccguggccaacggcauccugcagaccuucaugagaauggccuggggcggcagcuacaucgcccuggacagcggcugcggcaacugggacugcaucaugaccagcuaccaguaccugaucauccagaacaccaccugggagaaccacugccaguucagcagacccagccccaucggcuaccugggccugcugagccagagaaccagagacaucuacaucagcagaagacugcugggcaccuucaccuggacccugagcgacagcgagggcaacgccacccccggcggcuacugccugaccagauggaugcugaucgaggccgagcugaagugcuucggcaacaccgccguggccaagugcaacgagaagcacgacgaggaguucugcgacaugcugagacuguucgacuucaacaagcaggccaucagcagacugaagagcgaggcccagaugagcauccagcugaucaacaaggccgugaacgcccugaucaacgaccagcugaucaugaagaaccaccugagagacaucaugugcauccccuacugcaacuacagcaaguacugguaccugaaccacaccaucaccggcaagaccagccugcccaagugcuggcuggugagcaacggcagcuaccugaacgagacccacuucagcgacgacaucgagcagcaggccgacaacaugaucaccgagaugcugcagaaggaguacauggagagacagggcaagaccccccugggccugguggaccuguucguguucagcaccagcuucuaccugaucagcaucuuccugagacuggugaagauccccacccacagacacaucgugggcaagcccugccccaagccccacagacugaaccacaugggcaucugcagcugcggccuguacaagcagcccggcgugcccgugagauggaagagaugaggacuaguaauaaggaaacuguaugaaugucugugggcaggaagugaagagauccuucuguaaagguuuuuggaauuaugucugcugaauaauaaacuuuuuugaaauaauaaaucugguagaaaaaugagaucucaaaggcucuuuucagagccaccaaaaaaaaaaaaaaaaaaaaaaaaaaaaaaaaaaaaaaaaaaaaaaaaaaaaaaaaaaaaaaaaaaaaaaaaaaaaaaaaaaaaaaaaaaaaaaaaaaaaa

SEQ ID NO: 35946 - RNA, 1809 nt, Artificial Sequence
  mRNA product Design b-4 (hSL-A100) comprising derived and/or modified sequence from LASV(Togo/2016/7082;Clade VI)__AMR44577__GPCmut9 (opt4)
aggagagucccgcagucggcguccagcggcucugcuuguucgugugugugucguugcaggccuuauucaagcuuaccaugggccagaucaucaccuucuuccaggaggugccccacgugaucgaggaggugaugaacaucgugcugaucgcccugagccugcuggccauccugaagggcguguacaacguggccaccugcggcaucaucggccuggugaccuuccuguuccugugcggcagaagcugcagccugaucuacaagggcagcuacgagcugcagacccuggagcugaacauggagacccugaacaugaccaugccccugagcugcaccaagaacagcagccaccacuacaucagagugggcaacgagaccggccuggagcugacccugaccaacaccagcaucaucaaccacaaguucugcaaccugagcgacgcccacaagagaaaccuguacgaccacgcccugaugagcauccugagcaccuuccaccugagcauccccaacuucaaccaguacgaggccaugagcugcgacuucaacggcggcaagaucagcgugcaguacaaccugagccacgccuacgccguggacgccgccgagcacugcggcaccguggccaacggcgugcugcagaccuucaugagaauggccuggggcggcagcuacaucgcccuggacagcggcugcggcaacugggacugcaucaugaccagcuaccaguaccugaucauccagaacaccaccugggaggaccacugccaguucagcagacccagccccaucggcuaccugggccugcugagccagagaaccagagacaucuacaucagcagaagacugcugggcaccuucaccuggacccugagcgacagcgagggcaacgagacccccggcggcuacugccugaccagauggaugcugaucgaggccgagcugaagugcuucggcaacaccgccguggccaagugcaacgagaagcacgacgaggaguucugcgacaugcugagacuguucgacuucaacaagcaggccauccagagacugaagagcgaggcccagaugagcauccagcugaucaacaaggccgugaacgcccugaucaacgaccagcugaucaugaagaaccaccugagagacaugaugugcauccccuacugcaacuacagcaaguacugguaccugaaccacaccagcagcggcagaaccagccugcccaagugcuggcuggugagcaacggcagcuaccugaacgagacccacuucagcgacgacaucgagcagcaggccgacaacaugaucaccgagaugcugcagaaggaguacaucgacagacagggcaagaccccccugggccugguggaccuguucguguucagcaccagcuucuaccugaucagcaucuuccugcaccugaucaagauccccacccacagacacaucgugggcaagcccugccccaagccccacagacugaaccacaugggcaucugcagcugcggccuguacaagcagcccggcgugcccaccagauggaagagaugaggacuaguaauaaggaaacuguaugaaugucugugggcaggaagugaagagauccuucuguaaagguuuuuggaauuaugucugcugaauaauaaacuuuuuugaaauaauaaaucugguagaaaaaugagaucucaaaggcucuuuucagagccaccaaaaaaaaaaaaaaaaaaaaaaaaaaaaaaaaaaaaaaaaaaaaaaaaaaaaaaaaaaaaaaaaaaaaaaaaaaaaaaaaaaaaaaaaaaaaaaaaaaaaa

SEQ ID NO: 35947 - RNA, 1809 nt, Artificial Sequence
  mRNA product Design b-4 (hSL-A100) comprising derived and/or modified sequence from LASV(KAK-428;Clade n.d. (VII))__ANH09740__GPCmut9 (opt4)
aggagagucccgcagucggcguccagcggcucugcuuguucgugugugugucguugcaggccuuauucaagcuuaccaugggccagaucgugaccuucuuccaggaggugccccacgugaucgaggaggugaugaacaucgugcugaucgcccugagccugcuggccauccugaagggccuguacaacuucgccaccugcggcgugaucggccugaucaccuuccugcugcugugcggcagaagcugcagcgccaccuacaagggccaguacgagcugcagacccuggagcugaacauggagagccugaacaugaccaugccccugagcugcaccaagaacaacagccaccacuacaucagagccggcaacaacaccggccuggagcugacccugaccaacaccagcaucaucagccacaaguucugcaaccugagcgacgcccacaagaagaaccuguacgaccacacccugaugagcaucaucaccaccuuccaccugagcauccccaacuucaaccaguacgaggccaugagcugcgacuucaacggcggcaagaucagcauccaguacaaccugagccacagcuacgccggcgacgccgcccagcacugcggcaccguggccaacggcgugcugcagaccuucaugagaauggccuggggcggcagcuaccuggcccuggacagcggcugcagaggcugggacugcaucaucagcagcuaccaguaccugaucauccagaacaccaccugggacgaccacugccaguucagcagacccagccccaucggcuaccugggcuucgugagccagaagaccagagacaucuacaucagcagaagacugcugggcaccuucaccuggacccugagcgacagcgagggccacgacaugcccggcggcuacugccugaccagauggaugcugaucgaggccgaccugaagugcuucggcaacaccgccguggccaagugcaacgagaagcacgacgaggaguucugcgacauguggagacuguucgacuucaacaagcaggccauccagagacugaaggccgaggcccagaugaacauccagcugaucaacaaggccgugaacgcccugaucaacgaccagcugaugaugaagaaccaccugagagacaucaugugcauccccuacugcaacuacagcaaguucugguaccugaacaacaccaccaccggcagaaccagccugcccagaugcuggcugaucagcaacggcagcuaccugaacgagacccacuucagcgacgacaucgagcagcaggccgacaacaugaucaccgagaugcugcagaaggaguacauggacagacagggcaagaccccccugggccugguggaccuguucguguucagcaccagcuucuaccugaucaccaucuuccugcaccuggugaagauccccacccacagacacaucgugggcaagcccugccccaagccccacagacugaaccacaugggcaucugcagcugcggccuguacaagcagcccggcgugcccgugagauggaagagaugaggacuaguaauaaggaaacuguaugaaugucugugggcaggaagugaagagauccuucuguaaagguuuuuggaauuaugucugcugaauaauaaacuuuuuugaaauaauaaaucugguagaaaaaugagaucucaaaggcucuuuucagagccaccaaaaaaaaaaaaaaaaaaaaaaaaaaaaaaaaaaaaaaaaaaaaaaaaaaaaaaaaaaaaaaaaaaaaaaaaaaaaaaaaaaaaaaaaaaaaaaaaaaaaa

SEQ ID NO: 35948 - RNA, 1809 nt, Artificial Sequence; identical to SEQ ID NO: 35942
  mRNA product Design b-4 (hSL-A100) comprising derived and/or modified sequence from LASV(Pinneo-NIG-1969;Clade I)__AIT17836__GPCmut9 (opt4)

SEQ ID NO: 35949 - RNA, 1809 nt, Artificial Sequence
  mRNA product Design b-4 (hSL-A100) comprising derived and/or modified sequence from LASV(ISTH0009-NIG-2011;Clade II)__AIT17404__GPCmut9 (opt4)
aggagagucccgcagucggcguccagcggcucugcuuguucgugugugugucguugcaggccuuauucaagcuuaccaugggccagaucaucaccuucuuccaggaggugccccacgugaucgaggaggugaugaacaucgugcugaucgcccugagccugcuggccauccugaagggcaucuacaacguggccaccugcggccuguucggccuggugagcuuccugcugcugugcggcagaagcugcagcaccaccuacaagggcguguacgagcugcagacccuggagcuggacauggccagccugaacaugaccaugccccugagcugcaccaagaacaacagccaccacuacaucauggugggcaacgagaccggccuggagcugacccugaccaacaccagcaucaucaaccacaaguucugcaaccugagcgacgcccacaagaagaaccuguacgaccacgcccugaugagcaucaucagcaccuuccaccugagcauccccaacuucaaccaguacgaggccaugagcugcgacuucaacggcggcaagaucagcgugcaguacaaccugagccacgccuacgccguggacgccgccaaccacugcggcaccaucgccaacggcgugcugcagaccuucaugagaauggccuggggcggcagcuacaucgcccuggacagcggcugcggcagcugggacugcaucaugaccagcuaccaguaccugaucauccagaacaccaccugggaggaccacugccaguucagcagacccagccccaucggcuaccugggccugcugagccagagaaccagagacaucuacaucagcagaagacugcugggcaccuucaccuggacccugagcgacagcgagggcaacgagacccccggcggcuacugccugaccagauggaugcugaucgaggccgagcugaagugcuucggcaacaccgccguggccaagugcaacgagaagcacgacgaggaguucugcgacaugcugagacuguucgacuucaacaagcaggccaucagaagacugaagaccgaggcccagaugagcauccagcugaucaacaaggccgugaacgcccugaucaacgaccagcugaucaugaagaaccaccugagagacaucaugugcauccccuacugcaacuacagcaaguacugguaccugaaccacaccgugaccggcaagaccagccugcccagaugcuggcuggugagcaacggcagcuaccugaacgagacccacuucagcgacgacaucgagcagcaggccgacaacaugaucaccgagcugcugcagaaggaguacauggacagacagggcaagaccccccugggccugguggaccuguucguguucagcaccagcuucuaccugaucagcaucuuccugcaccugaucaagauccccacccacagacacaucaccggcaagcccugccccaagccccacagacugaaccacaugggcaucugcagcugcggccuguacaagcaccccggcgugcccgugaaguggaagagaugaggacuaguaauaaggaaacuguaugaaugucugugggcaggaagugaagagauccuucuguaaagguuuuuggaauuaugucugcugaauaauaaacuuuuuugaaauaauaaaucugguagaaaaaugagaucucaaaggcucuuuucagagccaccaaaaaaaaaaaaaaaaaaaaaaaaaaaaaaaaaaaaaaaaaaaaaaaaaaaaaaaaaaaaaaaaaaaaaaaaaaaaaaaaaaaaaaaaaaaaaaaaaaaaa

SEQ ID NO: 35950 - RNA, 1809 nt, Artificial Sequence
  mRNA product Design b-4 (hSL-A100) comprising derived and/or modified sequence from LASV(ISTH2010-NIG-2012;Clade II)__AIT17482__GPCmut9 (opt4)
aggagagucccgcagucggcguccagcggcucugcuuguucgugugugugucguugcaggccuuauucaagcuuaccaugggccagaucaucaccuucuuccaggaggugccccacgugaucgaggaggugaugaacaucgugcugaucgcccugagccugcuggccauccugaagggcaucuacaacguggccaccugcggccuguucggccuggugagcuuccugcugcugugcggcagaagcugcagcaccaccuacaagggcguguacgagcugcagacccuggagcuggacauggccagccugaacaugaccaugccccugagcugcaccaagaacaacagccaccacuacaucauggugggcaacgagaccggccuggagcugacccugaccaacaccagcaucaucaaccacaaguucugcaaccugagcgacgcccacaagaagaaccuguacgaccacgcccugaugagcaucaucagcaccuuccaccugagcauccccaacuucaaccaguacgaggccaugagcugcgacuucaacggcggcaagaucagcgugcaguacaaccugagccacgccuacgccguggacgccgccaaccacugcggcaccaucgccaacggcgugcugcagaccuucaugagaauggccuggggcggcagcuacaucgcccuggacagcggcugcggcagcugggacugcaucaugaccagcuaccaguaccugaucauccagaacaucaccugggaggaccacugccaguucagcagacccagccccaucggcuaccugggccugcugagccagagaaccagagacaucuacaucagcagaagacugcugggcaccuucaccuggacccugagcgacagcgagggcaacgagacccccggcggcuacugccugaccagauggaugcugaucgaggccgagcugaagugcuucggcaacaccgccguggccaagugcaacgagaagcacgacgaggaguucugcgacaugcugagacuguucgacuucaacaagcaggccaucagaagacugaagaccgaggcccagaugagcauccagcugaucaacaaggccgugaacgcccugaucaacgaccagcugaucaugaagaaccaccugagagacaucaugugcauccccuacugcaacuacagcaaguacugguaccugaaccacaccgugaccggcaagaccagccugcccagaugcuggcuggugagcaacggcagcuaccugaacgagacccacuucagcgacgacaucgagcagcaggccgacaacaugaucaccgagcugcugcagaaggaguacaucgacagacagggcaagaccccccugggccugguggaccuguucguguucagcaccagcuucuaccugaucagcaucuuccugcaccuggugaagauccccacccacagacacguggugggcaagcccugccccaagccccacagacugaaccacaugggcaucugcagcugcggccuguacaagcaccccggcgugcccgugaaguggaagagaugaggacuaguaauaaggaaacuguaugaaugucugugggcaggaagugaagagauccuucuguaaagguuuuuggaauuaugucugcugaauaauaaacuuuuuugaaauaauaaaucugguagaaaaaugagaucucaaaggcucuuuucagagccaccaaaaaaaaaaaaaaaaaaaaaaaaaaaaaaaaaaaaaaaaaaaaaaaaaaaaaaaaaaaaaaaaaaaaaaaaaaaaaaaaaaaaaaaaaaaaaaaaaaaaa

SEQ ID NO: 35951 - RNA, 1809 nt, Artificial Sequence
  mRNA product Design b-4 (hSL-A100) comprising derived and/or modified sequence from LASV(Lassa virus/H.sapiens-wt/NGA/2015/ISTH_0543;Clade II)__AVO03639__GPCmut9 (opt4)
aggagagucccgcagucggcguccagcggcucugcuuguucgugugugugucguugcaggccuuauucaagcuuaccaugggccagaucaucaccuucuuccaggaggugccccacgugaucgaggaggugaugaacaucgugcugaucgcccugagccugcuggccauccugaagggcaucuacaacguggccaccugcggccuguucggccuggugagcuuccugcugcugugcggcagaagcugcagcaccaccuacaagggcguguacgagcugcagacccuggagcuggacauggccaaccugaacaugaccaugccccugagcugcaccaagaacaacagccaccacuacaucauggugggcaacgagaccggccuggagcugacccugaccaacaccagcaucaucaaccacaaguucugcaaccugagcgacgcccacaagaagaaccuguacgaccacgcccugaugagcaucaucagcaccuuccaccugagcauccccaacuucaaccaguacgaggccaugagcugcgacuucaacggcggcaagaucagcgugcaguacaaccugagccacaccuacgccguggacgccgccaaccacugcggcaccaucgccaacggcgugcugcagaccuucaugagaauggccuggggcggcagcuacaucgcccuggacagcggcugcggcagcugggacugcaucaugaccagcuaccaguaccuggugauccagaacaccaccugggaggaccacugccaguucagcagacccagccccaucggcuaccugggccugcugagccagagaaccagagacaucuacaucagcagaagacugcugggcaccuucaccuggacccugagcgacagcgagggcaacgagacccccggcggcuacugccugaccagauggaugcugaucgaggccgagcugaagugcuucggcaacaccgccguggccaagugcaacgagaagcacgacgaggaguucugcgacaugcugagacuguucgacuucaacaagcaggccaucagaagacugaagaccgaggcccagaugagcauccagcugaucaacaaggccgugaacgcccugaucaacgaccagcugaucaugaagaaccaccugagagacaucaugugcauccccuacugcaacuacagcaaguacugguaccugaaccacaccgugaccggcaagaccagccugcccagaugcuggcuggugagcaacggcagcuaccugaacgagacccacuucagcgacgacaucgagcagcaggccgacaacaugaucaccgagcugcugcagaaggaguacaucgacagacagggcaagaccccccugggccugguggaccuguucguguucagcaccagcuucuaccugaucagcaucuuccugcaccuggugaagauccccacccacagacacaucaccggcaagcccugccccaagccccacagacugaaccacaugggcaucugcagcugcggccuguacaagcaccccggcgugcccgugaaguggaagagaugaggacuaguaauaaggaaacuguaugaaugucugugggcaggaagugaagagauccuucuguaaagguuuuuggaauuaugucugcugaauaauaaacuuuuuugaaauaauaaaucugguagaaaaaugagaucucaaaggcucuuuucagagccaccaaaaaaaaaaaaaaaaaaaaaaaaaaaaaaaaaaaaaaaaaaaaaaaaaaaaaaaaaaaaaaaaaaaaaaaaaaaaaaaaaaaaaaaaaaaaaaaaaaaaa

SEQ ID NO: 35952 - RNA, 1809 nt, Artificial Sequence
  mRNA product Design b-4 (hSL-A100) comprising derived and/or modified sequence from LASV(Lassa virus/H.sapiens-wt/NGA/2016/ISTH_0009;Clade II)__AVO03571__GPCmut9 (opt4)
aggagagucccgcagucggcguccagcggcucugcuuguucgugugugugucguugcaggccuuauucaagcuuaccaugggccagaucaucaccuucuuccaggaggugccccacgugaucgaggaggugaugaacaucgugcugaucgcccugagccugcuggccauccugaagggcaucuacaacguggccaccugcggccugcugggccuggugagcuuccugcugcugugcggcagaagcugcagcaccaccuacaagggcguguacgagcugcagacccuggagcuggacauggccagccugaacaugaccaugccccugagcugcaccaagaacaacagccaccacuacaucauggugggcaacgagaccggccuggagcugacccugaccaacaccagcaucaucaaccacaaguucugcaaccugagcgacgcccacaagaagaaccuguacgaccacgcccugaugagcaucaucagcaccuuccaccugagcauccccaacuucaaccaguacgaggccaugagcugcgacuucaacggcggcagaaucagcgugcaguacaaccugagccacagcuacgccguggacgccgccaaccacugcggcaccaucgccaacggcgugcugcagaccuucaugagaauggccuggggcggcagcuacaucgcccuggacagcggcugcggcagcugggacugcaucaugaccagcuaccaguaccugaucauccagaacaccaccugggaggaccacugccaguucagcagacccagccccaucggcuaccugggccugcugagccagagaaccagagacaucuacaucagcagaagacugcugggcaccuucaccuggacccugagcgacagcgagggcaacgagacccccggcggcuacugccugaccagauggaugcugaucgaggccgagcugaagugcuucggcaacaccgccguggccaagugcaacgagaagcacgacgaggaguucugcgacaugcugagacuguucgacuucaacaagcaggccaucagaagacugaagaccgaggcccagaugagcauccagcugaucaacaaggccgugaacgcccugaucaacgaccagcugaucaugaagaaccaccugagagacaucaugugcauccccuacugcaacuacagcaaguacugguaccugaaccacaccgugaccggcaagaccagccugcccagaugcuggcuggugagcaacggcagcuaccugaacgagacccacuucagcgacgacaucgagcagcaggccgacaacaugaucaccgagcugcugcagaaggaguacaucgacagacagggcaagaccccccugggccugguggaccuguucguguucagcaccagcuucuaccugaucagcaucuuccugcaccuggugaagauccccacccacagacacaucaccggcaagcccugccccaagccccacagacugaaccacaugggcaucugcagcugcggccuguacaaccaccccggcgugcccgugaaguggaagagaugaggacuaguaauaaggaaacuguaugaaugucugugggcaggaagugaagagauccuucuguaaagguuuuuggaauuaugucugcugaauaauaaacuuuuuugaaauaauaaaucugguagaaaaaugagaucucaaaggcucuuuucagagccaccaaaaaaaaaaaaaaaaaaaaaaaaaaaaaaaaaaaaaaaaaaaaaaaaaaaaaaaaaaaaaaaaaaaaaaaaaaaaaaaaaaaaaaaaaaaaaaaaaaaaa

SEQ ID NO: 35953 - RNA, 1809 nt, Artificial Sequence
  mRNA product Design b-4 (hSL-A100) comprising derived and/or modified sequence from LASV(Lassa virus/H.sapiens-wt/NGA/2016/ISTH_0017;Clade II)__AVO03567__GPCmut9 (opt4)
aggagagucccgcagucggcguccagcggcucugcuuguucgugugugugucguugcaggccuuauucaagcuuaccaugggccagaucaucaccuucuuccaggaggugccccacgugaucgaggaggugaugaacaucgugcugaucgcccugagccugcuggccauccugaagggcaucuacaacguggccaccugcggccuguucggccuggugagcuuccugcugcugugcggcagaagcugcagcaccaccuacaagggcguguacgagcugcagacccuggagcuggacauggccagccugaacaugaccaugccccugagcugcaccaagaacaacagccaccacuacaucauggugggcaacgagaccggccuggagcugacccugaccaacaccagcaucaucaaccacaaguucugcaaccugagcgacgcccacaagaagaaccuguacgaccacgcccugaugagcaucaucagcaccuuccaccugagcauccccaacuucaaccaguacgaggccaugagcugcgacuucaacggcggcaagaucagcgugcaguacaaccugagccacaccuacgccaucgacgccgccaaccacugcggcaccaucgccaacggcgugcugcagaccuucaugagaauggccuggggcggcagcuacaucgcccuggacagcggcugcggcagcugggacugcaucaugaccagcuaccaguaccugaucauccagaacaccaccugggaggaccacugccaguucagcagacccagccccaucggcuaccugggccugcugagccagagaaccagagacaucuacaucagcagaagacugcugggcaccuucaccuggacccugagcgacagcgagggcaacgagacccccggcggcuacugccugaccagauggaugcugaucgaggccgagcugaagugcuucggcaacaccgccguggccaagugcaacgagaagcacgacgaggaguucugcgacaugcugagacuguucgacuucaacaagcaggccaucagaagacugaagaccgaggcccagaugagcauccagcugaucaacaaggccgugaacgcccugaucaacgaccagcugaucaugaagaaccaccugagagacaucaugugcauccccuacugcaacuacagcaaguacugguaccugaaccacaccgugaccggcaagaccagccugcccagaugcuggcuggugagcaacggcagcuaccugaacgagacccacuucagcgacgacaucgagcagcaggccgacaacaugaucaccgagcugcugcagaaggaguacauggacagacagggcaagaccccccugggccugguggaccuguucguguucagcaccagcuucuaccugaucagcaucuuccugcaccuggugagaauccccacccacagacacgugaucggcaagcccugccccaagccccacagacugaaccacaugggcaucugcagcugcggccuguacaagcaccccggcgugcccgugaaguggaagagaugaggacuaguaauaaggaaacuguaugaaugucugugggcaggaagugaagagauccuucuguaaagguuuuuggaauuaugucugcugaauaauaaacuuuuuugaaauaauaaaucugguagaaaaaugagaucucaaaggcucuuuucagagccaccaaaaaaaaaaaaaaaaaaaaaaaaaaaaaaaaaaaaaaaaaaaaaaaaaaaaaaaaaaaaaaaaaaaaaaaaaaaaaaaaaaaaaaaaaaaaaaaaaaaaa

SEQ ID NO: 35954 - RNA, 1809 nt, Artificial Sequence
  mRNA product Design b-4 (hSL-A100) comprising derived and/or modified sequence from LASV(Lassa virus/H.sapiens-wt/NGA/2018/ISTH_0959;Clade II)__AVV65099__GPCmut9 (opt4)
aggagagucccgcagucggcguccagcggcucugcuuguucgugugugugucguugcaggccuuauucaagcuuaccaugggccagaucaucaccuucuuccaggaggugccccacgugaucgaggaggugaugaacaucgugcugaucgcccugagccugcuggccauccugaagggcaucuacaacguggugaccugcggccuguucggccuggugagcuuccugcugcugugcggcagaagcugcagcaccaccuacaagggcguguacgagcugcagacccuggagcuggacauggccagccugaacaugaccaugccccugagcugcaccaagaacaacagccaccacuacaucauggugggcaacgagaccggccuggagcugacccugaccaacaccagcaucaucaaccacaaguucugcaaccugagcgacgcccacaagaagaaccuguacgaccacgcccugaugagcaucaucagcaccuuccaccugagcauccccaacuucaaccaguacgaggccaugagcugcgacuucaacggcggcaagaucagcgugcaguacaaccugagccacgccuacgccaucgacgccgccaaccacugcggcaccaucgccaacggcgugcugcagaccuucaugagaauggccuggggcggcagcuacaucgcccuggacagcggcugcggcagcugggacugcaucaugaccagcuaccaguaccugaucauccagaacaccaccugggaggaccacugccaguucagcagacccagccccaucggcuaccugggccugcugagccagagaaccagagacaucuacaucagcagaagacugcugggcaccuucaccuggacccugagcgacagcgagggcaacgagacccccggcggcuacugccugaccagauggaugcugaucgaggccgagcugaagugcuucggcaacaccgccguggccaagugcaacgagaagcacgacgaggaguucugcgacaugcugagacuguucgacuucaacaagcaggccaucagaagacugaagaccgaggcccagaugagcauccagcugaucaacaaggccgugaacgcccugaucaacgaccagcugaucaugaagaaccaccugagagacaucaugugcauccccuacugcaacuacagcaaguacugguaccugaaccacaccgugaccggcaagaccagccugcccagaugcuggcuggugagcaacggcagcuaccugaacgagacccacuucagcgacgacaucgagcagcaggccgacaacaugaucaccgagcugcugcagaaggaguacaucgacagacagggcaagaccccccugggccugguggaccuguucguguucagcaccagcuucuaccugaucagcaucuuccugcaccuggugaagauccccacccacagacacgugaucggcaagcccugccccaagccccacagacugaaccacaugggcaucugcagcugcggccuguacaagcaccccggcgugcccgugaaguggaagagaugaggacuaguaauaaggaaacuguaugaaugucugugggcaggaagugaagagauccuucuguaaagguuuuuggaauuaugucugcugaauaauaaacuuuuuugaaauaauaaaucugguagaaaaaugagaucucaaaggcucuuuucagagccaccaaaaaaaaaaaaaaaaaaaaaaaaaaaaaaaaaaaaaaaaaaaaaaaaaaaaaaaaaaaaaaaaaaaaaaaaaaaaaaaaaaaaaaaaaaaaaaaaaaaaa

SEQ ID NO: 35955 - RNA, 1809 nt, Artificial Sequence
  mRNA product Design b-4 (hSL-A100) comprising derived and/or modified sequence from LASV(LASV003-NIG-2008;Clade II)__AIT17580__GPCmut9 (opt4)
aggagagucccgcagucggcguccagcggcucugcuuguucgugugugugucguugcaggccuuauucaagcuuaccaugggccagaucaucaccuucuuccaggaggugccccacgugaucgaggaggugaugaacaucgugcugaucgcccugagccugcuggccauccugaagggcaucuacaacguggccaccugcggccuguucggccuggugagcuuccugcugcugugcggcagaagcugcagcaccaccuacaagggcguguacgagcugcagacccuggagcuggacauggccagccugaacaugaccaugccccugagcugcaccaagaacaacagccaccacuacaucauggugggcaacgagaccggccuggagcugacccugaccaacaccagcaucaucaaccacaaguucugcaaccugagcgacgcccacaagaagaaccuguacgaccacgcccugaugagcaucaucagcaccuuccaccugagcauccccaacuucaaccaguacgaggccaugagcugcgacuucaacggcggcaagaucagcgugcaguacaaccugagccacaccuacgccguggacgccgccaaccacugcggcaccaucgccaacggcgugcugcagaccuucaugagaauggccuggggcggcagcuacaucgcccuggacagcggcugcggcagcugggacugcaucaugaccagcuaccaguaccugaucauccagaacaccaccugggaggaccacugccaguucagcagacccagccccaucggcuaccugggccugcugagccagagaaccagagacaucuacaucagcagaagacugcugggcaccuucaccuggacccugagcgacagcgagagcaacgagacccccggcggcuacugccugaccagauggaugcugaucgaggccgagcugaagugcuucggcaacaccgccguggccaagugcaacgagaagcacgacgaggaguucugcgacaugcugagacuguucgacuucaacaagcaggccaucagaagacugaaggccgaggcccagaugagcauccagcugaucaacaaggccgugaacgcccugaucaacgaccagcugaucaugaagaaccaccugagagacaucaugugcauccccuacugcaacuacagcaaguacugguaccugaaccacaccgugaccggcagaaccagccugcccagaugcuggcuggugagcaacggcagcuaccugaacgagacccacuucagcgacgacaucgagcagcaggccgacaacaugaucaccgagcugcugcagaaggaguacauggacagacagggcaagaccccccugggccugguggaccuguucguguucagcaccagcuucuaccugaucagcaucuuccugcaccuggugaagauccccacccacagacacgugaucggcaagcccugccccaagccccacagacugaaccacaugggcaucugcagcugcggccuguacaagcaccccggcgugcccgugaaguggaagagaugaggacuaguaauaaggaaacuguaugaaugucugugggcaggaagugaagagauccuucuguaaagguuuuuggaauuaugucugcugaauaauaaacuuuuuugaaauaauaaaucugguagaaaaaugagaucucaaaggcucuuuucagagccaccaaaaaaaaaaaaaaaaaaaaaaaaaaaaaaaaaaaaaaaaaaaaaaaaaaaaaaaaaaaaaaaaaaaaaaaaaaaaaaaaaaaaaaaaaaaaaaaaaaaaa

SEQ ID NO: 35956 - RNA, 1809 nt, Artificial Sequence
  mRNA product Design b-4 (hSL-A100) comprising derived and/or modified sequence from LASV(LASV035-NIG-2009;Clade II)__AIT17588__GPCmut9 (opt4)
aggagagucccgcagucggcguccagcggcucugcuuguucgugugugugucguugcaggccuuauucaagcuuaccaugggccagaucaucaccuucuuccaggaggugccccacgugaucgaggaggugaugaacaucgugcugaucgcccugagccugcuggccauccugaagggcaucuacaacguggccaccugcggccuguucggccuggugagcuuccugcugcugugcggcagaagcugcagcaccaccuacaagggcguguacgagcugcagacccuggagcuggacauggccagccugaacaugaccaugccccugagcugcaccaagaacaacagccaccacuacaucauggugggcaacgagaccggccuggagcugacccugaccaacaccagcaucaucaaccacaaguucugcaaccugagcgacgcccacaagaagaaccuguacgaccacgcccugaugagcaucaucagcaccuuccaccugagcauccccaacuucaaccaguacgaggccaugagcugcgacuucaacggcggcaagaucagcgugcaguacaaccugagccacgccuacgccguggacgccgccaaccacugcggcaccaucgccaacggcgugcugcagaccuucaugagaauggccuggggcggcagcuacaucgcccuggacagcggcugcggcagcugggacugcaucaugaccagcuaccaguaccugaucauccagaacaccaccugggaggaccacugccaguucagcagacccagccccaucggcuaccugggccugcugagccagagaaccagagacaucuacaucagcagaagacugcugggcaccuucaccuggacccugagcgacagcgagggcaacgagacccccggcggcuacugccugaccagauggaugcugaucgaggccgagcugaagugcuucggcaacaccgccguggccaagugcaacgagaagcacgacgaggaguucugcgacaugcugagacuguucgacuucaacaagcaggccaucagaagacugaaggccgaggcccagaugagcauccagcugaucaacaaggccgugaacgcccugaucaacgaccagcugaucaugaagaaccaccugagagacaucaugugcauccccuacugcaacuacagcaaguacugguaccugaaccacaccgugaccggcaagaccagccugcccagaugcuggcuggugagcaacggcagcuaccugaacgagacccacuucagcgacgacaucgagcagcaggccgacaacaugaucaccgagcugcugcagaaggaguacaucgacagacagggcaagaccccccugggccugguggaccuguucguguucagcaccagcuucuaccugaucagcaucuuccugcaccuggugaagauccccacccacagacacgugaucggcaagcccugccccaagccccacagacugaaccacaugggcaucugcagcugcggccuguacaagcaccccggcgugcccgugaaguggaagagaugaggacuaguaauaaggaaacuguaugaaugucugugggcaggaagugaagagauccuucuguaaagguuuuuggaauuaugucugcugaauaauaaacuuuuuugaaauaauaaaucugguagaaaaaugagaucucaaaggcucuuuucagagccaccaaaaaaaaaaaaaaaaaaaaaaaaaaaaaaaaaaaaaaaaaaaaaaaaaaaaaaaaaaaaaaaaaaaaaaaaaaaaaaaaaaaaaaaaaaaaaaaaaaaaa

SEQ ID NO: 35957 - RNA, 1809 nt, Artificial Sequence
  mRNA product Design b-4 (hSL-A100) comprising derived and/or modified sequence from LASV(LASV1000-NIG-2009;Clade II)__AIT17782__GPCmut9 (opt4)
aggagagucccgcagucggcguccagcggcucugcuuguucgugugugugucguugcaggccuuauucaagcuuaccaugggccagaucaucaccuucuuccaggaggugccccacgugaucgaggaggugaugaacaucgugcugaucgcccugagccugcuggccauccugaagggcaucuacaacguggccaccugcggccuguucggccuggugagcuuccugcugcugugcggcagaagcugcagcaccaccuacaagggcguguacgagcugcagacccuggagcuggacauggccagccugaacaugaccaugccccugagcugcaccaagaacaacagccaccacuacaucauggugggcaacgagaccggccuggagcugacccugaccaacaccagcaucaucaaccacaaguucugcaaccugagcgacgcccacaagaagaaccuguacgaccacgcccugaugagcaucaucagcaccuuccaccugagcauccccaacuucaaccaguacgaggccaugagcugcgacuucaacggcggcaagaucagcgugcaguacaaccugagccacaccuacgccguggacgccgccaaccacugcggcaccaucgccaacggcgugcugcagaccuucaugagaauggccuggggcggcagcuacaucgcccuggacagcggcugcggcagcugggacugcaucaugaccagcuaccaguaccugaucauccagaacaccaccugggaggaccacugccaguucagcagacccagccccaucggcuaccugggccugcugagccagagaaccagagacaucuacaucagcagaagacugcugggcaccuucaccuggacccugagcgacagcgagggcaacgagacccccggcggcuacugccugaccagauggaugcugaucgaggccgagcugaagugcuucggcaacaccgccguggccaagugcaacgagaagcacgacgaggaguucugcgacaugcugagacuguucgacuucaacaagcaggccaucaagagacugaagaccgaggcccagaugagcauccagcugaucaacaaggccgugaacgcccugaucaacgaccagcugaucaugaagaaccaccugagagacaucaugugcauccccuacugcaacuacagcaaguacugguaccugaaccacaccgugaccggcaagaccagccugcccagaugcuggcuggugagcaacggcagcuaccugaacgagacccacuucagcgacgacaucgagcagcaggccgacaacaugaucaccgagcugcugcagaaggaguacaucgacagacagggcaagaccccccugggccugguggaccuguucguguucagcaccagcuucuaccugaucagcaucuuccugcaccuggugaagauccccacccacagacacguggugggcaagcccugccccaagccccacagacugaaccacaugggcaucugcagcugcggccuguacaagcaccccggcgugcccgugaaguggaagagaugaggacuaguaauaaggaaacuguaugaaugucugugggcaggaagugaagagauccuucuguaaagguuuuuggaauuaugucugcugaauaauaaacuuuuuugaaauaauaaaucugguagaaaaaugagaucucaaaggcucuuuucagagccaccaaaaaaaaaaaaaaaaaaaaaaaaaaaaaaaaaaaaaaaaaaaaaaaaaaaaaaaaaaaaaaaaaaaaaaaaaaaaaaaaaaaaaaaaaaaaaaaaaaaaa

SEQ ID NO: 35958 - RNA, 1809 nt, Artificial Sequence
  mRNA product Design b-4 (hSL-A100) comprising derived and/or modified sequence from LASV(LASV221-NIG-2010;Clade II)__AIT17624__GPCmut9 (opt4)
aggagagucccgcagucggcguccagcggcucugcuuguucgugugugugucguugcaggccuuauucaagcuuaccaugggccagaucaucaccuucuuccaggaggugccccacgugaucgaggaggugaugaacaucgugcugaucgcccugagccugcuggccauccugaagggcaucuacaacguggccaccugcggccuguucggccuggugagcuuccugcugcugugcggcagaagcugcagcaccaccuacaagggcguguacgagcugcagacccuggagcuggacauggccagccugaacaugaccaugccccugagcugcaccaagaacaacagccaccacuacaucauggugggcaacgagaccggccuggagcugacccugaccaacaccagcaucaucaaccacaaguucugcaaccugagcgacgcccacaagaagaaccuguacgaccacgcccugaugagcaucaucagcaccuuccaccugagcauccccaacuucaaccaguacgaggccaugagcugcgacuucaacggcggcaagaucagcgugcaguacaaccugagccacaccuacgccaucgacgccgccaaccacugcggcaccaucgccaacggcgugcugcagaccuucaugagaauggccuggggcggcagcuacaucgcccuggacagcggcugcggcagcugggacugcaucaugaccagcuaccaguaccugaucauccagaacaccaccugggaggaccacugccaguucagcagacccagccccaucggcuaccugggccugcugagccagagaaccagagacaucuacaucagcagaagacugcugggcaccuucaccuggacccugagcgacagcgagggcaacgagacccccggcggcuacugccugaccagauggaugcugaucgaggccgagcugaagugcuucggcaacaccgccguggccaagugcaacgagaagcacgacgaggaguucugcgacaugcugagacuguucgacuucaacaagcaggccaucagaagacugaagaccgaggcccagaugagcauccagcugaucaacaaggccgugaacgcccugaucaacgaccagcugaucaugaagaaccaccugagagacaucaugugcauccccuacugcaacuacagcaaguacugguaccugaaccacaccgugaccggcaagaccagccugcccagaugcuggcuggugagcaacggcagcuaccugaacgagacccacuucagcgacgacaucgagcagcaggccgacaacaugaucaccgagaugcugcagaaggaguacauggacagacagggcaagaccccccugggccugguggaccuguucguguucagcaccagcuucuaccugaucagcaucuuccugcaccuggugaagauccccacccacagacacgugaucggcaagcccugccccaagccccacagacugaaccacaugggcaucugcagcugcggccuguacaagcaccccggcgugcccgugaaguggaagagaugaggacuaguaauaaggaaacuguaugaaugucugugggcaggaagugaagagauccuucuguaaagguuuuuggaauuaugucugcugaauaauaaacuuuuuugaaauaauaaaucugguagaaaaaugagaucucaaaggcucuuuucagagccaccaaaaaaaaaaaaaaaaaaaaaaaaaaaaaaaaaaaaaaaaaaaaaaaaaaaaaaaaaaaaaaaaaaaaaaaaaaaaaaaaaaaaaaaaaaaaaaaaaaaaa

SEQ ID NO: 35959 - RNA, 1809 nt, Artificial Sequence
  mRNA product Design b-4 (hSL-A100) comprising derived and/or modified sequence from LASV(LASV237-NIG-2010;Clade II)__AIT17638__GPCmut9 (opt4)
aggagagucccgcagucggcguccagcggcucugcuuguucgugugugugucguugcaggccuuauucaagcuuaccaugggccagaucaucaccuucuuccaggaggugccccacgugaucgaggaggugaugaacaucgugcugaucgcccugagccugcuggccauccugaagggcaucuacaacguggccaccugcggccuguucggccuggugagcuuccugcugcugugcggcagaagcugcagcaccaccuacaagggcguguacgagcugcagacccuggagcuggacauggccagccugaacaugaccaugccccugagcugcaccaagaacaacagccaccacuacaucauggugggcaacgagaccggccuggagcugacccugaccaacaccagcaucaucaaccacaaguucugcaaccugagcgacgcccacaagaaggaccuguacgaccacgcccugaugagcaucaucagcaccuuccaccugagcauccccaacuucaaccaguacgaggccaugagcugcgacuucaacggcggcaagaucagcgugcaguacaaccugagccacaccuacgccguggacgccgccaaccacugcggcaccaucgccaacggcgugcugcagaccuucaugagaauggccuggggcggcagcuacaucgcccuggacagcggcugcggcagcugggacugcaucaugaccagcuaccaguaccugaucauccagaacaccaccugggaggaccacugccaguucagcagacccagccccaucggcuaccugggccugcugagccagagaaccagagacaucuacaucagcagaagacugcugggcaccuucaccuggacccugagcgacagcgagggcaacgagacccccggcggcuacugccugaccagauggaugcugaucgaggccgagcugaagugcuucggcaacaccgccguggccaagugcaacgagaagcacgacgaggaguucugcgacaugcugagacuguucgacuucaacaagcaggccaucagaagacugaagaccgaggcccagaugagcauccagcugaucaacaaggccgugaacgcccugaucaacgaccagcugaucaugaagaaccaccugagagacaucaugugcauccccuacugcaacuacagcaaguacugguaccugaaccacaccgugaccggcaagaccagccugcccagaugcuggcuggugagcaacggcagcuaccugaacgagacccacuucagcgacgacaucgagcagcaggccgacaacaugaucaccgagcugcugcagaaggaguacauggacagacagggcaagaccccccugggccugguggaccuguucguguucagcaccagcuucuaccugaucagcaucuuccugcaccugaucaagauccccacccacagacacaucaccggcaagcccugccccaagccccacagacugaaccacaugggcaucugcagcugcggccuguacaagcaccccggcgugcccgugaaguggaagagaugaggacuaguaauaaggaaacuguaugaaugucugugggcaggaagugaagagauccuucuguaaagguuuuuggaauuaugucugcugaauaauaaacuuuuuugaaauaauaaaucugguagaaaaaugagaucucaaaggcucuuuucagagccaccaaaaaaaaaaaaaaaaaaaaaaaaaaaaaaaaaaaaaaaaaaaaaaaaaaaaaaaaaaaaaaaaaaaaaaaaaaaaaaaaaaaaaaaaaaaaaaaaaaaaa

SEQ ID NO: 35960 - RNA, 1809 nt, Artificial Sequence
  mRNA product Design b-4 (hSL-A100) comprising derived and/or modified sequence from LASV(LASV253-NIG-2011;Clade II)__AIT17670__GPCmut9 (opt4)
aggagagucccgcagucggcguccagcggcucugcuuguucgugugugugucguugcaggccuuauucaagcuuaccaugggccagaucaucaccuucuuccaggaggugccccacgugaucgaggaggugaugaacaucgugcugaucgcccugagccugcuggccauccugaagggcaucuacaacguggccaccugcggccuguucggccuggugagcuuccugcugcugugcggcagaagcugcagcaccaccuacaagggcguguacgagcugcagacccuggagcuggacauggccagccugaacaugaccaugccccugagcugcaccaagaacaacagccaccacuacaucauggugggcaacgagaccggccuggagcugacccugaccaacaccagcaucaucaaccacaaguucugcaaccugagcgacgcccacaagaagaaccuguacgaccacgcccugaugagcaucaucagcaccuuccaccugagcauccccaacuucaaccaguacgaggccaugagcugcgacuucaacggcggcaagaucagcgugcaguacaaccugagccacaccuacgccguggacgccgccaaccacugcggcaccaucgccaacggcgugcugcagaccuucaugagaauggccuggggcggcagcuacaucgcccuggacagcggcugcggcagcugggacugcaucaugaccagcuaccaguaccugaucauccagaacaccaccugggaggaccacugccaguucagcagacccagccccaucggcuaccugggccugcugagccagagaaccagagacaucuacaucagcagaagacugcugggcaccuucaccuggacccugagcgacagcgagggcaacgagacccccggcggcuacugccugaccagauggaugcugaucgaggccgagcugaagugcuucggcaacaccgccguggccaagugcaacgagaagcacgacgaggaguucugcgacaugcugagacuguucgacuucaacaagcaggccaucagaagacugaaggccgaggcccagaugagcauccagcugaucaacaaggccgugaacgcccugaucaacgaccagcugaucaugaagaaccaccugagagacaucaugugcauccccuacugcaacuacagcaaguacugguaccugaaccacaccgugaccggcagaaccagccugcccagaugcuggcuggugagcaacggcagcuaccugaacgagacccacuucagcgacgacaucgagcagcaggccgacaacaugaucaccgagcugcugcagaaggaguacaucgacagacagggcaagaccccccugggccugguggaccuguucguguucagcaccagcuucuaccugaucagcaucuuccugcaccuggugaagauccccacccacagacacaucaucggcaagcccugccccaagccccacagacugaaccacaugggcaucugcagcugcggccuguacaagcaccccggcgugcccgugaaguggaagagaugaggacuaguaauaaggaaacuguaugaaugucugugggcaggaagugaagagauccuucuguaaagguuuuuggaauuaugucugcugaauaauaaacuuuuuugaaauaauaaaucugguagaaaaaugagaucucaaaggcucuuuucagagccaccaaaaaaaaaaaaaaaaaaaaaaaaaaaaaaaaaaaaaaaaaaaaaaaaaaaaaaaaaaaaaaaaaaaaaaaaaaaaaaaaaaaaaaaaaaaaaaaaaaaaa

SEQ ID NO: 35961 - RNA, 1809 nt, Artificial Sequence
  mRNA product Design b-4 (hSL-A100) comprising derived and/or modified sequence from LASV(LASV254-NIG-2011;Clade II)__AIT17674__GPCmut9 (opt4)
aggagagucccgcagucggcguccagcggcucugcuuguucgugugugugucguugcaggccuuauucaagcuuaccaugggccagaucaucaccuucuuccaggaggugccccacgugaucgaggaggugaugaacaucgugcugaucgcccugagccugcuggccauccugaagggcaucuacaacguggccaccugcggccuguucggccuggugagcuuccugcugcugugcggcagaagcugcagcaccaccuacaagggcguguacgagcugcagacccuggagcuggacaugaccaaccugaacaugaccaugccccugagcugcaccaagaacaacagccaccacuacaucauggugggcaacgagaccggccuggagcugacccugaccaacaccagcaucaucaaccacaaguucugcaaccugagcgacgcccacaagaagaaccuguacaaccacgcccugaugagcaucaucagcaccuuccaccugagcauccccaacuucaaccaguacgaggccaugagcugcgacuucaacggcggcaagaucagcgugcaguacaaccugagccacagcuacgccguggacgccgccaaccacugcggcaccaucgccaacggcgugcugcagaccuucaugagaauggccuggggcggcagcuacaucgcccuggacagcggcugcggcaacugggacugcaucaugaccagcuaccaguaccugaucauccagaacaccaccugggaggaccacugccaguucagcagacccagccccaucggcuaccugggccugcugagccagagaaccagagacaucuacaucagcagaagacugcugggcaccuucaccuggacccugagcgacagcgagggcaacgagacccccggcggcuacugccugaccagauggaugcugaucgaggccgagcugaagugcuucggcaacaccgccguggccaagugcaacgagaagcacgacgaggaguucugcgacaugcugagacuguucgacuucaacaagcaggccaucagaagacugaagaccgaggcccaggccaacauccagcugaucaacaaggccgugaacgcccugaucaacgaccagcugaucaugaagaaccaccugagagacaucaugugcauccccuacugcaacuacagcaaguacugguaccugaaccacaccgugaccggcaagaccagccugcccagaugcuggcuggugagcaacggcagcuaccugaacgagacccacuucagcgacgacaucgagcagcaggccgacaacaugaucaccgagcugcugcagaaggaguacauggacagacagggcaagaccccccugggccugguggaccuguucguguucagcaccagcuucuaccugaucagcaucuuccugcaccuggugaagauccccacccacagacacgugaucggcaagcccugccccaagccccacagacugaaccacaugggcaucugcagcugcggccuguacaagcaccccggcgugcccgugaaguggaagagaugaggacuaguaauaaggaaacuguaugaaugucugugggcaggaagugaagagauccuucuguaaagguuuuuggaauuaugucugcugaauaauaaacuuuuuugaaauaauaaaucugguagaaaaaugagaucucaaaggcucuuuucagagccaccaaaaaaaaaaaaaaaaaaaaaaaaaaaaaaaaaaaaaaaaaaaaaaaaaaaaaaaaaaaaaaaaaaaaaaaaaaaaaaaaaaaaaaaaaaaaaaaaaaaaa

SEQ ID NO: 35962 - RNA, 1809 nt, Artificial Sequence
  mRNA product Design b-4 (hSL-A100) comprising derived and/or modified sequence from LASV(Nig08-A19;Clade III)__ADU56618__GPCmut9 (opt4)
aggagagucccgcagucggcguccagcggcucugcuuguucgugugugugucguugcaggccuuauucaagcuuaccaugggccagaucgugaccuucuuccaggaggugccccacgugaucgaggaggugaugaacaucgugcugaucgcccugagcauccuggccauccugaagggccuguacaacaucgccaccugcggccugaucggccuggugaccuuccugcugcugagcggcagaagcugcagcaugaccuacaagggcguguacgagcugcagacccuggagcugaacaugaacacccugaacaugaccaugccccugagcugcaccaagaacaacagccaccacuacaucauggugggcaacgagaccggccuggagcugacccugaccaacaccagccugcugcaccacaaguucugcaaccugagcgacgcccacaagaagaaccuguacgaccacacccugaugagcaucaucagcaccuuccaccugagcauccccaacuucaaccaguacgaggccaugagcugcgacuucaacggcggcaagaucaccgugcaguacaaccugagccacagcuacgccaucgacgccgccaaccacugcggcaccguggccaacggcgugcugcagaccuucaugagaauggccuggggcggcagcuacaucgcccuggacagcggcugcggcaagugggacugcaucaugaccagcuaccaguaccugaucauccagaacaccaccugggaggaccacugccaguucagcagacccagccccaucggcuaccugggccugcugagccagagaaccagagacaucuacaucagcagaagacugcugggcaccuucaccuggacccugagcgacagcgagggcaacgagacccccggcggcuacugccugaccagauggaugcugaucgaggccgagcugaagugcuucggcaacaccgccguggccaagugcaacgagaagcacgacgaggaguucugcgacaugcugagacuguucgacuucaacaagcaggccaucagaagacugaaggccgaggcccagaugagcauccagcugaucaacaaggccgugaacgcccugaucaacgaccagcugaucaugaagaaccaccugagagacaucaugugcauccccuacugcaacuacagcaaguacugguaccugaaccacaccagcaccggcagaaccagccugcccagaugcuggcuggugagcaacggcagcuaccugaacgagacccacuucagcgacgacaucgagcagcaggccgacaacaugaucaccgagaugcugcagaaggaguaccuggacagacagggcaagaccccccugggccugguggaccuguucguguucagcaccagcuucuaccugaucagcaucuuccugcaccuggugaagauccccacccacagacacaucgugggcaagcccugccccaagccccacagacugaaccacaugggcaucugcagcugcggccuguacaagcagcccggcgugcccgugagauggaagagaugaggacuaguaauaaggaaacuguaugaaugucugugggcaggaagugaagagauccuucuguaaagguuuuuggaauuaugucugcugaauaauaaacuuuuuugaaauaauaaaucugguagaaaaaugagaucucaaaggcucuuuucagagccaccaaaaaaaaaaaaaaaaaaaaaaaaaaaaaaaaaaaaaaaaaaaaaaaaaaaaaaaaaaaaaaaaaaaaaaaaaaaaaaaaaaaaaaaaaaaaaaaaaaaaa

SEQ ID NO: 35963 - RNA, 1812 nt, Artificial Sequence
  mRNA product Design b-4 (hSL-A100) comprising derived and/or modified sequence from LASV(G1180-SLE-2010;Clade IV)__AIT17168__GPCmut9 (opt4)
aggagagucccgcagucggcguccagcggcucugcuuguucgugugugugucguugcaggccuuauucaagcuuaccaugggccagaucgugaccuucuuccaggaggugccccacgugaucgaggaggugaugaacaucgugcugaucgcccugagcauccuggccgugcugaagggccuguacaacuucgccaccugcggccuggugggccugcugaccuuccugcugcugugcggcagaagcugcaccgccagcagauacaagggcguguacgagcugcagacccuggagcugaacauggagacccugaacaugaccaugccccugagcugcaccaagaacaacagccaccacuacaucauggugggcaacgagaccggccuggagcugacccugaccaacaccagcaucaucaaccacaaguucugcaaccugagcgacgcccacaagaagaaccuguacgaccacgcccugaugagcaucaucagcaccuuccaccugagcauccccaacuucaaccaguacgaggccaugagcugcgacuucaacggcggcaagaucagcgugcaguacaaccugagccacagcuacgccggcgacgccgccaaccacugcggcaccguggccaacggcgugcugcagaccuucaugagaauggccuggggcggcagcuacaucgcccuggacagcggcugcggcagcugggacugcaucaugaccagcuaccaguaccugaucauccagaacaccaccugggaggaccacugccaguucagcagacccagccccaucggcuaccugggccugcugagccagagaaccagagacaucuacaucagcagaagacugcugggcaccuucaccuggacccugagcgacagcgagggcaaggacacccccggcggcuacugccugaccagauggaugcugaucgaggccgagcugaagugcuucggcaacaccgccguggccaagugcaacgagaagcacgacgaggaguucugcgacaugcugagacuguucgacuucaacaagcaggccauccagagacugaaggccgaggcccagaugagcauccagcugaucaacaaggccgugaacgcccugaucaacgaccagcugaucaugaagaaccaccugagagacaucaugugcauccccuacugcaacuacagcaaguacugguaccugaaccacaccaccaccggcaagaccagccugcccaagugcuggcuggugagcaacggcagcuaccugaacgagacccacuucagcgacgacaucgagcagcaggccgacaacaugaucaccgagaugcugcagaaggaguacauggagagacagggcaagaccccccugggccugguggaccuguucguguucagcaccagcuucuaccugaucagcaucuuccugcaccuggugaagauccccacccacagacacaucgugggcaagagcugccccaagccccacagacugaaccacaugggcaucugcagcugcggccuguacaagcagcccggcgugcccgugaaguggaagagaugaggacuaguaauaaggaaacuguaugaaugucugugggcaggaagugaagagauccuucuguaaagguuuuuggaauuaugucugcugaauaauaaacuuuuuugaaauaauaaaucugguagaaaaaugagaucucaaaggcucuuuucagagccaccaaaaaaaaaaaaaaaaaaaaaaaaaaaaaaaaaaaaaaaaaaaaaaaaaaaaaaaaaaaaaaaaaaaaaaaaaaaaaaaaaaaaaaaaaaaaaaaaaaaaa

SEQ ID NO: 35964 - RNA, 1812 nt, Artificial Sequence
  mRNA product Design b-4 (hSL-A100) comprising derived and/or modified sequence from LASV(G1442-SLE-2011;Clade IV)__AIT17180__GPCmut9 (opt4)
aggagagucccgcagucggcguccagcggcucugcuuguucgugugugugucguugcaggccuuauucaagcuuaccaugggccagaucgugaccuucuuccaggaggugccccacgugaucgaggaggugaugaacaucgugcugaucgcccugagcauccuggccgugcugaagggccuguacaacguggccaccugcggccugaucggccuggugaccuuccugcugcugugcggcagaagcugcaccaccacccuguacaagggcguguacgagcugcagacccuggagcugaacauggagacccugaacaugaccaugccccugagcugcaccaagaacaacagccaccacuacaucagagugggcaacgagaccggccuggagcugacccugaccaacaccagcaucaucaaccacaaguucugcaaccugagcgacgcccacaagaagaaccuguacgaccacgcccugaugagcaucaucagcaccuuccaccugagcauccccaacuucaaccaguacgaggccaugagcugcgacuucaacggcggcaagaucagcgugcaguacaaccugagccacagcuacgccggcgacgccgccaaccacugcggcaccguggccaacggcgugcugcagaccuucaugagaauggccuggggcggcagcuacaucgcccuggacagcggcugcggcaacugggacugcaucaugaccagcuaccaguaccugaucauccagaacaccaccugggacgaccacugccaguucagcagacccagccccaucggcuaccugggccugcugagccagagaaccagagacguguacaucagcagaagacugcugggcaccuucaccuggacccugagcgacagcgagggcaaggacacccccggcggcuacugccugaccagauggaugcugaucgaggccgagcugaagugcuucggcaacaccgccguggccaagugcaacgagaagcacgacgaggaguucugcgacaugcugagacuguucgacuucaacaagcaggccauccagagacugaaggccgaggcccagaugagcauccagcugaucaacaaggccgugaacgcccugaucaacgaccagcugaucaugaagaaccaccugagagacaucaugugcauccccuacugcaacuacagcaaguacugguaccugaacaacaccgccaccggcaagaccagccugcccaagugcuggcugaucagcaacggcagcuaccugaacgagacccacuucagcgacgacaucgagcaggaggccgacaacaugaucaccgagaugcugcagaaggaguacauggagagacagggcaagaccccccugggccugguggaccuguucguguucagcaccagcuucuaccugaucagcaucuuccugcaccuggugaagauccccacccacagacacaucgugggcaagagcugccccaagccccacagacugaaccacaugggcaucugcagcugcggccuguacaagcagcccggcgugcccgugagauggaagagaugaggacuaguaauaaggaaacuguaugaaugucugugggcaggaagugaagagauccuucuguaaagguuuuuggaauuaugucugcugaauaauaaacuuuuuugaaauaauaaaucugguagaaaaaugagaucucaaaggcucuuuucagagccaccaaaaaaaaaaaaaaaaaaaaaaaaaaaaaaaaaaaaaaaaaaaaaaaaaaaaaaaaaaaaaaaaaaaaaaaaaaaaaaaaaaaaaaaaaaaaaaaaaaaaa

SEQ ID NO: 35965 - RNA, 1812 nt, Artificial Sequence
  mRNA product Design b-4 (hSL-A100) comprising derived and/or modified sequence from LASV(G3010-SLE-2013;Clade IV)__AIT17344__GPCmut9 (opt4)
aggagagucccgcagucggcguccagcggcucugcuuguucgugugugugucguugcaggccuuauucaagcuuaccaugggccagaucgugaccuucuuccaggaggugccccacgugaucgaggaggugaugaacaucgugcugaucgcccugagcauccuggccgugcugaagggccuguacaacuucgccaccugcggccuggugggccuggugaccuuccugcugcugugcggcagaagcugcaccaccagccuguacaagggcguguacgagcugcagacccuggagcugaacauggagacccugaacaugaccaugccccugagcugcaccaagaacaacagccaccacuacaucauggugggcaacgagaccggccuggagcugacccugaccaacaccagcaucaucaaccacaaguucugcaaccugagcgacgcccacaagaagaaccuguacaaccacgcccugaugagcaucaucagcaccuuccaccugagcauccccaacuucaaccaguacgaggccaugagcugcgacuucaacggcggcaagaucagcgugcaguacaaccugagccacagcuacgccggcgacgccgccagccacugcggcaccguggccaacggcgugcugcagaccuucaugagaauggccuggggcggcagcuacaucgcccuggacagcggcugcggcaagugggacugcaucaugaccagcuaccaguaccugaucauccagaacaccaccugggaggaccacugccaguucagcagacccagccccaucggcuaccugggccugcugagccagagaaccagagacaucuacaucagcagaagacugcugggcaccuucaccuggacccugagcgacagcgagggcaaggacacccccggcggcuacugccugaccagauggaugcugaucgaggccgagcugaagugcuucggcaacaccgccguggccaagugcaacgagaagcacgacgaggaguucugcgacaugcugagacuguucgacuucaacaagcaggccauccagagacugaagaccgaggcccagaugagcauccagcugaucaacaaggccgugaacgcccugaucaacgaccagcugaucaugaagaaccaccugagagacaucaugugcauccccuacugcaacuacagcaaguacugguaccugaaccacaccaccaccggcaagaccagccugcccaagugcuggcuggugagcaacggcagcuaccugaacgagacccacuucagcgacgacaucgagcagcaggccgacaacaugaucaccgagaugcugcagaaggaguacauggagagacagggcaagaccccccugggccugguggaccuguucguguucagcaccagcuucuaccugaucagcaucuuccugcaccuggugaagauccccacccacagacacaucgugggcaagagcugccccaagccccacagacugaaccacaugggcaucugcagcugcggccuguacaagcagcccggcgugcccgugagauggaagagaugaggacuaguaauaaggaaacuguaugaaugucugugggcaggaagugaagagauccuucuguaaagguuuuuggaauuaugucugcugaauaauaaacuuuuuugaaauaauaaaucugguagaaaaaugagaucucaaaggcucuuuucagagccaccaaaaaaaaaaaaaaaaaaaaaaaaaaaaaaaaaaaaaaaaaaaaaaaaaaaaaaaaaaaaaaaaaaaaaaaaaaaaaaaaaaaaaaaaaaaaaaaaaaaaa

SEQ ID NO: 35966 - RNA, 1812 nt, Artificial Sequence
  mRNA product Design b-4 (hSL-A100) comprising derived and/or modified sequence from LASV(G502-SLE-2009;Clade IV)__AIT17126__GPCmut9 (opt4)
aggagagucccgcagucggcguccagcggcucugcuuguucgugugugugucguugcaggccuuauucaagcuuaccaugggccagaucgugaccuucuuccaggaggugccccacgugaucgaggaggugaugaacaucgugcugaucgcccugagcauccuggccgugcugaagggccuguacaacuucgccaccugcggccuggugggccugcugaccuuccugcugcugugcggcagaagcugcaccaccggccuguacaagggcguguacgagcugcagacccuggagcugaacauggagacccugaacaugaccaugccccugagcugcaccaagaacaacagccaccacuacaucauggugggcaacgagaccggccuggagcugacccugaccaacaccagcaucaucaaccacaaguucugcaaccugagcgacgcccacaagaagaaccuguacgaccacgcccugaugagcaucaucagcaccuuccaccugagcauccccaacuucaaccaguacgaggccaugagcugcgacuucaacggcggcaagaucagcgugcaguacaaccugagccacagcuacgccggcgacgccgccgaccacugcggcaccguggccaacggcgugcugcagaccuucaugagaauggccuggggcggcagcuacaucgcccuggacagcggcugcggcagaugggacugcaucaugaccagcuaccaguaccugaucauccagaacaccaccugggaggaccacugccaguucagcagacccagccccaucggcuaccugggccugcugagccagagaaccagagacaucuacaucagcagaagacugcugggcaccuucaccuggacccugagcgacagcgagggcaaggacacccccggcggcuacugccugaccagauggaugcugaucgaggccgagcugaagugcuucggcaacaccgccguggccaagugcaacgagaagcacgacgaggaguucugcgacaugcugagacuguucgacuucaacaagcaggccauccagagacugaaggccgaggcccagaugagcauccagcugaucaacaaggccgugaacgcccugaucaacgaccagcuggugaugaagaaccaccugagagacaucaugugcauccccuacugcaacuacagcagauacugguaccugaaccacaccaccaccggcagaaccagccugcccaagugcuggcuggugagcaacggcagcuaccugaacgagacccacuucagcgacgacaucgagcagcaggccgacaacaugaucaccgagaugcugcagaaggaguacauggagagacagggcaagaccccccugggccugguggaccuguucguguucagcaccagcuucuaccugaucagcaucuuccugcaccuggugaagauccccacccacagacacaucgugggcaagagcugccccaagccccacagacugaaccacaugggcaucugcagcugcggccuguacaagcagcccggcgugcccgugaaguggaagagaugaggacuaguaauaaggaaacuguaugaaugucugugggcaggaagugaagagauccuucuguaaagguuuuuggaauuaugucugcugaauaauaaacuuuuuugaaauaauaaaucugguagaaaaaugagaucucaaaggcucuuuucagagccaccaaaaaaaaaaaaaaaaaaaaaaaaaaaaaaaaaaaaaaaaaaaaaaaaaaaaaaaaaaaaaaaaaaaaaaaaaaaaaaaaaaaaaaaaaaaaaaaaaaaaa

SEQ ID NO: 35967 - RNA, 1812 nt, Artificial Sequence
  mRNA product Design b-4 (hSL-A100) comprising derived and/or modified sequence from LASV(G733-SLE-2010;Clade IV)__AIT17154__GPCmut9 (opt4)
aggagagucccgcagucggcguccagcggcucugcuuguucgugugugugucguugcaggccuuauucaagcuuaccaugggccagaucgugaccuucuuccaggaggugccccacgugaucgaggaggugaugaacaucgugcugaucgcccugagcauccuggccgugcugaagggccuguacaacuucgccaccugcggcaucgugggccuggugagcuuccugcugcugugcggcagaagcugcaccaccagccuguacaagggcguguacgagcugcagacccuggagcugaacauggagacccugaacaugaccaugccccugagcugcaccaagaacaacagccaccacuacaucauggugggcaacgagaccggccuggagcugacccugaccaacaccagcaucaucaaccacaaguucugcaaccugagcgacgcccacaagaagaaccuguacgaccacgcccugaugagcaucaucagcaccuuccaccugagcauccccaacuucaaccaguacgaggccaugagcugcgacuucaacggcggcaagaucagcgugcaguacaaccugagccacagcuacgccggcgacgccgccaaccacugcggcaccaucgccaacggcgugcugcagaccuucaugagaauggccuggggcggcagcuacaucgcccuggacagcggcugcgacagaugggacugcaucaugaccagcuaccaguaccugaucauccagaacaccaccugggaggaccacugccaguucagcagacccagccccaucggcuaccugggccugcugagccagagaaccagagacaucuacaucagcagaagacugcugggcaccuucaccuggacccugagcgacagcgagggcaaggacacccccggcggcuacugccugaccagauggaugcugaucgaggccgagcugaagugcuucggcaacaccgccguggccaagugcaacgagaagcacgacgaggaguucugcgacaugcugagacuguucgacuucaacaagcaggccauccagagacugaaggccgaggcccagaugagcauccagcugaucaacaaggccgugaacgcccugaucaacgaccagcugaucaugaagaaccaccugagagacaucaugugcauccccuacugcaacuacagcaaguacugguaccugaaccacaccaccaccggcaagaccagccugcccaagugcuggcuggugagcaacggcagcuaccugaacgagacccacuucagcgacgacaucgagcagcaggccgacaacaugaucaccgagaugcugcagaaggaguacauggagagacagggcaagaccccccugggccugguggaccuguucguguucagcaccagcuucuaccugaucagcaucuuccugcaccuggugaagauccccacccacagacacguggugggcaagagcugccccaagccccacagacugaaccacaugggcaucugcagcugcggccuguacggccagcccggcgugcccgugaaguggaagagaugaggacuaguaauaaggaaacuguaugaaugucugugggcaggaagugaagagauccuucuguaaagguuuuuggaauuaugucugcugaauaauaaacuuuuuugaaauaauaaaucugguagaaaaaugagaucucaaaggcucuuuucagagccaccaaaaaaaaaaaaaaaaaaaaaaaaaaaaaaaaaaaaaaaaaaaaaaaaaaaaaaaaaaaaaaaaaaaaaaaaaaaaaaaaaaaaaaaaaaaaaaaaaaaaa

SEQ ID NO: 35968 - RNA, 1812 nt, Artificial Sequence
  mRNA product Design b-4 (hSL-A100) comprising derived and/or modified sequence from MOPV/LASV reassortant(IGS-1;Clade IV)__AFY05576__GPCmut9 (opt4)
aggagagucccgcagucggcguccagcggcucugcuuguucgugugugugucguugcaggccuuauucaagcuuaccaugggccagaucgugaccuucuuccaggaggugccccacgugaucgaggaggugaugaacaucgugcugaucgcccugagcgugcuggccgugcugaagggccuguacaacuucgccaccugcggccuggugggccuggugaccuuccugcugcugugcggcagaagcugcaccaccagccuguacaagggcguguacgagcugcagacccuggagcugaacauggagacccugaacaugaccaugccccugagcugcaccaagaacaacagccaccacuacaucauggugggcaacgagaccggccuggagcugacccugaccaacaccagcaucaucaaccacaaguucugcaaccugagcgacgcccacaagaagaaccuguacgaccacgcccugaugagcaucaucagcaccuuccaccugagcauccccaacuucaaccaguacgaggccaugagcugcgacuucaacggcggcaagaucagcgugcaguacaaccugagccacagcuacgccggcgacgccgccaaccacugcggcaccguggccaacggcgugcugcagaccuucaugagaauggccuggggcggcagcuacaucgcccuggacagcggcugcggcaacugggacugcaucaugaccagcuaccaguaccugaucauccagaacaccaccugggaggaccacugccaguucagcagacccagccccaucggcuaccugggccugcugagccagagaaccagagacaucuacaucagcagaagacugcugggcaccuucaccuggacccugagcgacagcgagggcgaggacacccccggcggcuacugccugaccagauggaugcugaucgaggccgagcugaagugcuucggcaacaccgccguggccaagugcaacgagaagcacgacgaggaguucugcgacaugcugagacuguucgacuucaacaagcaggccauccagagacugaaggccgaggcccagaugagcauccagcugaucaacaaggccgugaacgcccugaucaacgaccagcugaucaugaagaaccaccugagagacaucaugugcauccccuacugcaacuacagcaaguacugguaccugaaccacaccaccaccggcagaaccagccugcccaagugcuggcuggugagcaacggcagcuaccugaacgagacccacuucagcgacgacaucgagcagcaggccgacaacaugaucaccgagaugcugcagaaggaguacauggagagacagggcaagaccccccugggccugguggaccuguucguguucagcaccagcuucuaccugaucagcaucuuccugcaccuggugaagauccccacccacagacacaucgugggcaagagcugccccaagccccacagacugaaccacaugggcaucugcagcugcggccuguacaagcagcccggcgugcccgugaaguggaagagaugaggacuaguaauaaggaaacuguaugaaugucugugggcaggaagugaagagauccuucuguaaagguuuuuggaauuaugucugcugaauaauaaacuuuuuugaaauaauaaaucugguagaaaaaugagaucucaaaggcucuuuucagagccaccaaaaaaaaaaaaaaaaaaaaaaaaaaaaaaaaaaaaaaaaaaaaaaaaaaaaaaaaaaaaaaaaaaaaaaaaaaaaaaaaaaaaaaaaaaaaaaaaaaaaa

SEQ ID NO: 35969 - RNA, 1812 nt, Artificial Sequence
  mRNA product Design b-4 (hSL-A100) comprising derived and/or modified sequence from LASV(LM765-SLE-2012;Clade IV)__AIT17814__GPCmut9 (opt4)
aggagagucccgcagucggcguccagcggcucugcuuguucgugugugugucguugcaggccuuauucaagcuuaccaugggccagaucgugaccuucuuccaggaggugccccacgugaucgaggaggugaugaacaucgugcugaucgcccugagcauccuggccgugcugaagggccuguacaacuucgccaccugcggccuggugggccuggugaccuuccugcugcugugcggcagaagcugcaccaccagccuguacaagggcguguacgagcugcagacccuggagcugaacauggagacccugaacaugaccaugccccugagcugcaccaagaacaacagccaccacuacaucauggugggcaacgagaccggccuggagcugacccugaccaacaccagcaucaucgaccacaaguucugcaaccugagcgacgcccacagaaagaaccuguacgaccacgcccugaugagcaucaucagcaccuuccaccugagcauccccaacuucaaccaguacgaggccaugagcugcgacuucaacggcggcaagaucagcgugcaguacaaccugagccacagcuacgccaaggacgccgccgaccacugcggcaccguggccaacggcgugcugcagaccuucaugagaauggccuggggcggcagcuacaucgcccuggacagcggcugcggcagaugggacugcaucaugaccagcuaccaguaccugaucauccagaacaccaccugggaggaccacugccaguucagcagacccagccccaucggcuaccugggccugcugagccagagaaccagagacaucuacaucagcagaagacugcugggcaccuucaccuggacccugagcgacagcgagggcaaggacacccccggcggcuacugccugaccagauggaugcugaucgaggccgagcugaagugcuucggcaacaccgccguggccaagugcaacgagaagcacgacgaggaguucugcgacaugcugagacuguucgacuucaacaagcaggccauccagagacugaaggccgaggcccagaugagcauccagcugaucaacaaggccgugaacgcccugaucaacgaccagcugaucaugaagaaccaccugagagacaucaugugcauccccuacugcaacuacagcaaguacugguaccugaaccacaccaccaccggcaagaccagccugcccaagugcuggcuggugagcaacggcagcuaccugaacgagacccacuucagcgacgacaucgagcagcaggccgacaacaugaucaccgagaugcugcagaaggaguacauggagagacagggcaagaccccccugggccugguggaccuguucguguucagcaccagcuucuaccugaucagcaucuuccugcaccuggugaagauccccacccacagacacaucgugggcaagcccugccccaagccccacagacugaaccacaugggcaucugcagcugcggccuguacaagcagcccggcgugcccgugaaguggaagagaugaggacuaguaauaaggaaacuguaugaaugucugugggcaggaagugaagagauccuucuguaaagguuuuuggaauuaugucugcugaauaauaaacuuuuuugaaauaauaaaucugguagaaaaaugagaucucaaaggcucuuuucagagccaccaaaaaaaaaaaaaaaaaaaaaaaaaaaaaaaaaaaaaaaaaaaaaaaaaaaaaaaaaaaaaaaaaaaaaaaaaaaaaaaaaaaaaaaaaaaaaaaaaaaaa

SEQ ID NO: 35970 - RNA, 1812 nt, Artificial Sequence
  mRNA product Design b-4 (hSL-A100) comprising derived and/or modified sequence from LASV(LM776-SLE-2012;Clade IV)__AIT17824__GPCmut9 (opt4)
aggagagucccgcagucggcguccagcggcucugcuuguucgugugugugucguugcaggccuuauucaagcuuaccaugggccagaucgugaccuucuuccaggaggugccccacgugaucgaggaggugaugaacaucgugcugaucgcccugagcauccuggccgugcugaagggccuguacaacuucgccaccugcggccuggugggccuggugaccuuccugcugcugugcggcagaagcugcaccaccagcguguacaagggcguguacgagcugcagacccuggagcugaacauggagacccugaacaugaccaugccccugagcugcaccaagaacaacagccaccacuacaucauggugggcaacgagaccggccuggagcugacccugaccaacaccagcaucaucaaccacaaguucugcaaccugagcgacgcccacaagaagaaccuguacgaccacgcccugaugagcaucaucagcaccuuccaccugagcauccccaacuucaaccaguacgaggccaugagcugcgacuucaacggcggcaagaucagcgugcaguacaaccugagccacagcuacgccggcgacgccgccaaccacugcggcaccguggccaacggcgugcugcagaccuucaugagaauggccuggggcggcagcuacaucgcccuggacagcggcugcggcaagugggacugcaucaugaccagcuaccaguaccugaucauccagaacaccaccugggaggaccacugccaguucagcagacccagccccaucggcuaccugggccugcugagccagagaaccagagacaucuacaucagcagaagacugcugggcaccuucaccuggacccugagcgacagcgagggcaaggacacccccggcggcuacugccugaccagauggaugcugaucgaggccgagcugaagugcuucggcaacaccgccguggccaagugcaacgagaagcacgacgaggaguucugcgacaugcugagacuguucgacuucaacaagcaggccauccagagacugaaggccgaggcccagaugagcauccagcugaucaacaaggccgugaacgcccugaucaacgaccagcugaucaugaagaaccaccugagagacaucaugugcauccccuacugcaacuacagcaaguacugguaccugaaccacaccaccaccggcaagaccagccugcccaagugcuggcuggugagcaacggcagcuaccugaacgagacccacuucagcgacgacaucgagcagcaggccgacaacaugaucaccgagaugcugcagaaggaguacauggagagacagggcaagaccccccugggccugguggaccuguucguguucagcaccagcuucuaccugaucagcaucuuccugcaccuggugaagauccccacccacagacacaucgugggcaagagcugccccaagccccacagacugaaccacaugggcaucugcagcugcggccuguacaagcagcccggcgugcccgugagauggaagagaugaggacuaguaauaaggaaacuguaugaaugucugugggcaggaagugaagagauccuucuguaaagguuuuuggaauuaugucugcugaauaauaaacuuuuuugaaauaauaaaucugguagaaaaaugagaucucaaaggcucuuuucagagccaccaaaaaaaaaaaaaaaaaaaaaaaaaaaaaaaaaaaaaaaaaaaaaaaaaaaaaaaaaaaaaaaaaaaaaaaaaaaaaaaaaaaaaaaaaaaaaaaaaaaaa

SEQ ID NO: 35971 - RNA, 1812 nt, Artificial Sequence
  mRNA product Design b-4 (hSL-A100) comprising derived and/or modified sequence from LASV(Mad39;Clade IV)__ANH09722__GPCmut9 (opt4)
aggagagucccgcagucggcguccagcggcucugcuuguucgugugugugucguugcaggccuuauucaagcuuaccaugggccagaucgugaccuucuuccaggaggugccccacgugaucgaggaggugaugaacaucgugcugaucgcccugagcauccuggccgugcugaagggccuguacaacguggccaccugcggccugaucggccuggugaccuuccugcugcugugcggcagaagcugcaccaccacccuguacaagggcguguacgagcugcaggcccuggagcugaacauggagacccugaacaugaccaugccccugagcugcaccaagaacaacagccaccacuacaucagagugggcaacgagaccggccuggagcugacccugaccaacaccagccugaucaaccacaaguucugcaaccugagcgacgcccacaagaagaaccuguacgaccacgcccugaugagcaucaucagcaccuuccaccugagcauccccaacuucaaccaguacgaggccaugagcugcgacuucaacgacggcaagaucagcgugcaguacaaccugagccacaccuacgccggcgacaccgccaaccacugcggcaccguggccaacggcgugcugcagaccuucaugagaauggccuggggcggcagcuacaucgcccuggacagcggcugcggcggcugggacugcaucaugaccagcuaccaguaccugaucauccagaacaccaccugggaggaccacugccaguucagcagacccagccccaucggcuaccugggccugcugagccagagaaccagagacaucuacaucagcagaagacugcugggcaccuucaccuggacccugagcgacagcgagggcaaggacacccccggcggcuacugccugaccagauggaugcugaucgaggccgagcugaagugcuucggcaacaccgccguggccaagugcaacgagaagcacgacgaggaguucugcgacaugcugagacuguucgacuucaacaagcaggccauccagagacugaaggccgaggcccagaugagcauccagcugaucaacaaggccgugaacgcccugaucaacgaccagcugaucaugaagaaccaccugagagacaucaugugcauccccuacugcaacuacagcaaguacugguaccugaaccacaccgugaccggcaagaccagccugcccaagugcuggcuggugagcaacggcagcuaccugaacgagacccacuucagcgacgacaucgagcagcaggccgacaacaugaucaccgagaugcugcagaaggaguacauggagagacagggcaagaccccccugggccugguggaccuguucguguucagcaccagcuucuaccugaucagcaucuuccugcaccuggugaagauccccacccacagacacguggugggcaagcccugccccaagccccacagacugaaccacaugggcaucugcagcugcggcuucuacaagcagcccggcgugcccgugagauggaagagaugaggacuaguaauaaggaaacuguaugaaugucugugggcaggaagugaagagauccuucuguaaagguuuuuggaauuaugucugcugaauaauaaacuuuuuugaaauaauaaaucugguagaaaaaugagaucucaaaggcucuuuucagagccaccaaaaaaaaaaaaaaaaaaaaaaaaaaaaaaaaaaaaaaaaaaaaaaaaaaaaaaaaaaaaaaaaaaaaaaaaaaaaaaaaaaaaaaaaaaaaaaaaaaaaa

SEQ ID NO: 35972 - RNA, 1812 nt, Artificial Sequence
  mRNA product Design b-4 (hSL-A100) comprising derived and/or modified sequence from LASV(Z0947-SLE-2011;Clade IV)__AIT17840__GPCmut9 (opt4)
aggagagucccgcagucggcguccagcggcucugcuuguucgugugugugucguugcaggccuuauucaagcuuaccaugggccagaucgugaccuucuuccaggaggugccccacgugaucgaggaggugaugaacaucgugcugaucgcccugagcauccuggccgugcugaagggccuguacaacuucgccaccugcggccuggugggccuggugaccuuccugcugcugugcggcagaagcugcaccaucagccuguacaagggcguguacgagcugcagacccuggagcugaacauggagacccugaacaugaccaugccccugagcugcaccaagaacaacagccaccacuacaucauggugggcaacgagaccggccuggagcugacccugaccaacaccagcaucaucaaccacaaguucugcaaccugagcgacgcccacaagaagaaccuguacgaccacgcccugaugagcaucaucagcaccuuccaccugagcauccccaacuucaaccaguacgaggccaugagcugcgacuucaacggcggcaagaucagcgugcaguacaaccugagccacagcuacgccggcgacgccgccaaccacugcggcaccguggccaacggcgugcugcagaccuucaugagaauggccuggggcggcagcuacaucgcccuggacagcggcugcgacagaugggacugcaucaugaccagcuaccaguaccugaucauccagaacaccaccugggaggaccacugccaguucagcagacccagccccaucggcuaccugggccugcugagccagagaaccagagacaucuacaucagcagaagacugcugggcaccuucaccuggacccugagcgacagcgagggcaaggacacccccggcggcuacugccugaccagauggaugcugaucgaggccgagcugaagugcuucggcaacaccgccguggccaagugcaacgagaagcacgacgaggaguucugcgacaugcugagacuguucgacuucaacaagcaggccauccagagacugaaggccgaggcccagaugagcauccagcugaucaacaaggccgugaacgcccugaucaacgaccagcugaucaugaagaaccaccugagagacaucaugugcauccccuacugcaacuacagcaaguacugguaccugaaccacaccaccaccggcaagaccagccugcccaagugcuggcuggugagcaacggcagcuaccugaacgagacccacuucagcgacgacaucgagcagcaggccgacaacaugaucaccgagaugcugcagaaggaguacauggagagacagggcaagaccccccugggccugguggaccuguucguguucagcaccagcuucuaccugaucagcaucuuccugcaccuggugaagauccccacccacagacacaucgugggcaagcccugccccaagccccacagacugaaccacaugggcaucugcagcugcggccuguacaagcagcccggcgugcccgugaaguggaagagaugaggacuaguaauaaggaaacuguaugaaugucugugggcaggaagugaagagauccuucuguaaagguuuuuggaauuaugucugcugaauaauaaacuuuuuugaaauaauaaaucugguagaaaaaugagaucucaaaggcucuuuucagagccaccaaaaaaaaaaaaaaaaaaaaaaaaaaaaaaaaaaaaaaaaaaaaaaaaaaaaaaaaaaaaaaaaaaaaaaaaaaaaaaaaaaaaaaaaaaaaaaaaaaaaa

SEQ ID NO: 35973 - RNA, 1812 nt, Artificial Sequence
  mRNA product Design b-4 (hSL-A100) comprising derived and/or modified sequence from LASV(Josiah;Clade IV)__NP_694870__GPCmut9 (opt5)
aggagagucccgcagucggcguccagcggcucugcuuguucgugugugugucguugcaggccuuauucaagcuuaccaugggccagaucgugaccuucuuucaagaggucccccacguuauugaagaggugaugaacaucgugcugauugcccucagcguccuggcugugcuuaaggggcuguacaauuucgccacaugcggacucguuggccuggugacguuucuucugcucugugggagauccugcaccacaucucuguauaaaggagucuacgaacugcagacccucgagcugaacauggaaacacuuaauaugaccaugccucugagcuguacaaagaacaauucccaucacuauaucauggugggcaacgagaccgggcucgagcugacgcuuaccaauacaucuauuaucaaccauaaauucugcaaucugagcgacgcgcacaagaaaaaccucuacgaucaugcucugauguccaucauuucuaccuuucaccugagcaucccgaauuucaaccaguaugaagccauguccugugacuuuaauggaggcaagauuagcguucaguacaaccucucucacuccuaugccggcgaugcugccaaucauugcgggacaguggcuaacggaguccugcaaaccuucaugcggauggccuggggcgggagcuacaucgcgcuugacucuggauguggcaacugggauugcauuaugacguccuaccaguaucugaucauucagaauacaaccugggaggaccacugucaguuuagccgccccucuccuaucggguaccucggacugcuuucccaaagaacacgggauaucuauauuagccgcagacugcucggcaccuucaccuggacacuguccgacucugaaggcaaggauacgcccgggggauacugccugacccgguggaugcucaucgaggccgagcugaaauguuuuggcaacacagcuguggccaagugcaaugaaaaacaugacgaggaguucugcgauaugcuucgccuguuugacuucaacaagcaggcuauucagagacucaaagccgaagcgcagaugagcauccaacugauuaauaaggccgugaacgcucuuaucaaugaucagcugaucaugaagaaccaccuccgggacauuauguguaucccuuauugcaauuacuccaaauauugguaccugaaccacaccacaaccgggcgcacgagccugcccaaguguuggcucgucucuaauggauccuaccugaacgaaacacauuucagcgacgauauugagcagcaagccgacaauaugaucaccgagaugcuucagaaagaauauauggagagacagggcaagaccccucuggggcucguugaucuguuuguguucucuaccagcuuuuaccugauuuccaucuuccuucaccucgugaaaaucccgacacaucggcacauugucggaaagucuugccccaaaccucaucgccugaaccacaugggcaucuguagcugcggccuguauaagcagcccggggugccuguuaaguggaaaagaugaggacuaguaauaaggaaacuguaugaaugucugugggcaggaagugaagagauccuucuguaaagguuuuuggaauuaugucugcugaauaauaaacuuuuuugaaauaauaaaucugguagaaaaaugagaucucaaaggcucuuuucagagccaccaaaaaaaaaaaaaaaaaaaaaaaaaaaaaaaaaaaaaaaaaaaaaaaaaaaaaaaaaaaaaaaaaaaaaaaaaaaaaaaaaaaaaaaaaaaaaaaaaaaaa

SEQ ID NO: 35974 - RNA, 1809 nt, Artificial Sequence
  mRNA product Design b-4 (hSL-A100) comprising derived and/or modified sequence from LASV(LP;Clade I)__AAF86701__GPCmut9 (opt5)
aggagagucccgcagucggcguccagcggcucugcuuguucgugugugugucguugcaggccuuauucaagcuuaccaugggccagaucauuaccuucuuucaagaggugccccacgucaucgaagagguuaugaacauugugcugaucgcccucagccugcuugcuauucugaaggggcucuacaauaucgccacaugcggaaucauuggccugguggcguuccuuuuucugugugggaaauccugcucucucacgcugaagggaggcuaugaacugcagacccucgagcugaacauggaaacacuuaauaugaccaugccucugagcuguaccaaaaacuccucucaucacuacaucagagucgggaaugagacaggacucgagcugacacuuaccaacacgagcauuaucaaucauaaguucugcaaccuguccgacgcucacaaaaagaaucucuaugaucaugcccugaugucuauuaucagcaccuuucaccuguccauuccgaacuucaaucaguacgaagccaugagcugugacuuuaacggcggcaagaucucugugcaguauaaucucucccacagcuacgcuggggaugccgcugagcauugcggaacaguugccaacggcgugcugcaaaccuucaugcggauggcguggggagggcgcuauaucgcccuugacucuggcugugggaauugggauugcauuaugacauccuaccaguaccugaucauucagaacaccacgugggaagaccacugucaguuuagcagacccucuccuaucggauaucucggccugcuuucccaacggacacgcgauauuuacaucagcagacggcugcucggcaccuucacauggacccuguccgacucugaggggaacgagacccccggaggcuauugccugacacgcuggaugcucaucgaagcugagcugaaauguuuugggaauacggccgucgcuaagugcaacgaaaaacaugaugaggaguucugcgacaugcuuagacuguuugauuucaauaagcaggccauucggcgccucaaagcggaagcccagaugagcauccagcugauuaacaaggcugugaaugcccuuaucaacgaccaacugauuaugaagaaucaccucagagauaucauguguaucccuuacugcaacuauuccaaauacugguaucugaaucacaccagcucuggacggacaucccugcccaaguguuggcucauuagcaacggcucuuaccugaaugagacccaguucagcgacgacaucgaacagcaagcugauaacaugauuacagagaugcuucagaaagaauacaucgagcgccaggggaagaccccucugggacucguugacauuuuuaucuucuccacgucuuuuuaucugauuagcaucuuccugcaucuuaucaaaauuccgacacacagacauaucgugggcaagcccugcccuaaaccccaccggcucaaucauaugggcgucuguuccugcgggcuguacaagcacccuggagugcccaccaaguggaaacgcugaggacuaguaauaaggaaacuguaugaaugucugugggcaggaagugaagagauccuucuguaaagguuuuuggaauuaugucugcugaauaauaaacuuuuuugaaauaauaaaucugguagaaaaaugagaucucaaaggcucuuuucagagccaccaaaaaaaaaaaaaaaaaaaaaaaaaaaaaaaaaaaaaaaaaaaaaaaaaaaaaaaaaaaaaaaaaaaaaaaaaaaaaaaaaaaaaaaaaaaaaaaaaaaaa

SEQ ID NO: 35975 - RNA, 1809 nt, Artificial Sequence
  mRNA product Design b-4 (hSL-A100) comprising derived and/or modified sequence from LASV(803213;Clade II)__AAF86703__GPCmut9 (opt5)
aggagagucccgcagucggcguccagcggcucugcuuguucgugugugugucguugcaggccuuauucaagcuuaccaugggccagaucauuaccuucuuucaagaggugccccacgucaucgaagagguuaugaacauugugcugaucgcccucagccugcuugcuauucugaaggggaucuacaauguggccacaugcggacucuucggccugaucuccuuucuucugcucugugggagaucuugcagcgucacguauaaaggaguguacgaacugcagacccuggagcucaacauggcgaaucugaacaugacaaugccucuuuccuguaccaagaauaacucucaucacuauauuaugguuggcaaugaaacagggcuggagcucacccugacaaacaccagcaucauuaaucauaaauucugcaaccuuuccgacgcucacaagaaaaaucuguacgaucaugcccucaugucuaucauuagcacguuucaccuguccaucccgaacuucaaucaguaugaggccaugagcugugacuuuaacggaggcaagauuucugugcaguacaaucugucccacagcuucgcugucgaugccgcuaaccauugcggcaccaucgccaacggggugcuccaaacauuuaugcggauggcguggggaggcucuuauaucgcccuggacuccggguguggaaauugggauugcauuaugaccagcuaccaguaccuuaucauucagaacacaaccugggaagaccacugucaguucucucgccccuccccuaucggcuaucuggggcuccugagccaaagaacgcgggauauuuacaucucccgcagacuucugggaacauuuaccuggacacucucugacagcgagggcaaugaagcucccggcggguauugccugacccgguggaugcugaucgaggccgagcucaaguguuucggaaacaccgcuguugccaaaugcaaugaaaagcaugaugaggaauuuugcgacaugcugcgccuuuucgauuucaacaaacaggcgauuaagagacugaaaacagaggcccagauguccauccagcucauuaauaaggcugugaacgcccugaucaaugaccaacuuauuaugaagaaccaucugcgggauaucauguguaucccuuacugcaauuauagccgcuacugguaucucaaccacacggucaccggcaaaacaucucugcccagauguuggcugguguccaaugggagcuaccucaacgaaacccacuuuucugacgacauugagcagcaggcugauaauaugaucacagagaugcugcaaaaggaauacauggaccggcagggaaaaaccccucuuggccugguggaucucuucgucuuuagcacguccuucuaucugauuucuaucuuucugcaccuuguuaagauuccgacacaucgccacaucguggggaaacccugcccuaagccccauagacucaaccacaugggaauuuguagcugcggccuguacaaacacccuggcgugcccgucaaguggaagcggugaggacuaguaauaaggaaacuguaugaaugucugugggcaggaagugaagagauccuucuguaaagguuuuuggaauuaugucugcugaauaauaaacuuuuuugaaauaauaaaucugguagaaaaaugagaucucaaaggcucuuuucagagccaccaaaaaaaaaaaaaaaaaaaaaaaaaaaaaaaaaaaaaaaaaaaaaaaaaaaaaaaaaaaaaaaaaaaaaaaaaaaaaaaaaaaaaaaaaaaaaaaaaaaaa

SEQ ID NO: 35976 - RNA, 1809 nt, Artificial Sequence
  mRNA product Design b-4 (hSL-A100) comprising derived and/or modified sequence from LASV(GA391;Clade III)__CAA36645__GPCmut9 (opt5)
aggagagucccgcagucggcguccagcggcucugcuuguucgugugugugucguugcaggccuuauucaagcuuaccaugggccagaucgugaccuucuuucaagaggucccccacguuauugaagaggugaugaacaucgugcugauugcccucagcauccuggcuauucuuaaggggcuguacaaugucgccacaugcggacucaucggccuggugacguuccuucugcucuccgggagaucuuguagccugaucuauaaaggaaccuacgaacugcagacacucgagcugaacauggaaacccuuaauaugacaaugccucuguccugcaccaagaacaauucucaucacuauauucggguuggcaacgagacagggcucgagcugacccuuacgaauaccagcauccugaaccauaaauuuuguaaucucuccgacgcgcacaagcgcaaccuguacgaucauucucugaugagcauuaucuccacauuccaccucagcauuccgaauuuuaaccaguaugaagcuaugucuugcgacuucaauggaggcaaaaucaccgugcaguacaaccugucccacagcuuugccgucgaugccgcuggccauugugggacacuugccaauggagugcugcaaaccuucaugagaauggcuuggggcgggucuuauauugcccucgacuccggaugcggcaacugggauuguaucaugacgagcuaccaguaccugaucauucagaacacaaccugggacgaucacugccaguuuucucggcccuccccuaucggguaucuuggacugcucagccaacgcacaagagacauuuacaucucccggcgccugcugggcaccuucaccuggacacucucugauagcgagggcaaugaaacgcccgggggauauugucugaccagauggaugcuuauugaggcggagcugaagugcuuuggcaacacagccguugcuaaguguaaugaaaaacaugacgaggaguucugcgauaugcuccggcuguuugacuucaacaagcaggccauccgcagacuuaaaaccgaagcucagauguccauccagcugauuaauaaggccgugaacgcgcucaucaaugaucaacugauuaugaaaaaccaucugcgggacaucaugugcauuccuuacuguaauuauagccgcuacugguaucucaaccacacaucuaccgggaagacgucccugcccagaugcuggcuuaucagcaauggaucuuaccugaacgaaacaaaguucagcgacgauaucgagcagcaggccgacaauaugauuaccgagaugcuccaaaaagaauacaucgaucggcagggcaagaccccucuggggcuggucgaccuuuuuguguucuccacaucuuuuuaucucauuagcaucuuccugcaccuggugaaaauuccgacccaccgccauaucgucggaaagcccuguccuaaaccccacagacucaaccauaugggcauuugcuccuguggccuguacaagcagccugggguucccgugcgguggaaaagaugaggacuaguaauaaggaaacuguaugaaugucugugggcaggaagugaagagauccuucuguaaagguuuuuggaauuaugucugcugaauaauaaacuuuuuugaaauaauaaaucugguagaaaaaugagaucucaaaggcucuuuucagagccaccaaaaaaaaaaaaaaaaaaaaaaaaaaaaaaaaaaaaaaaaaaaaaaaaaaaaaaaaaaaaaaaaaaaaaaaaaaaaaaaaaaaaaaaaaaaaaaaaaaaaa

SEQ ID NO: 35977 - RNA, 1812 nt, Artificial Sequence
  mRNA product Design b-4 (hSL-A100) comprising derived and/or modified sequence from LASV(AV;Clade V)__CCA30314__GPCmut9 (opt5)
aggagagucccgcagucggcguccagcggcucugcuuguucgugugugugucguugcaggccuuauucaagcuuaccaugggccagaucgugaccuucuuucaagaggucccccacguuauugaagaggugaugaacaucgugcugauugcccucagcauccuggcuguccuuaaggggcuguacaauauugccacaugcggacucaucggccugaucacguuccuucugcucugugggagauccugcucuagcaaccuguauaaaggaguguacgaacugcagucccucgaccugaauauggagacccuuaacaugacaaugccucugucuuguaccaagaauaacagccaucacuauauucggguuggcaaugauacagggcucgaacugacccuuacaaacaccuccauccugaaucauaaauuuugcaaccucucugacgcgcacaagaaagaucuguacgaccaugcucugaugagcauuaucuccacguuccaccucagcauuccgaauuuuaaccaguaugaggccaugucuugugauuucaauggaggcaagaucuccgugcaguacaaccugagccacucuuaugccauugacgcugccaaucauugcggcaccgucgcuaacgggauccuucaaacauuuaugcgcauggccuggggaggcuccuacaucgcgcuggauagcggguguggaaacugggacugcauuaugaccucuuaccaguaucucaucauucagaauacaaccugggagaaccacugucaguucuccagacccagcccuaucggcuaccuggggcuucugucccaacggacgcgcgauauuuauaucucuagacggcuccugggaacauuuaccuggacacugagcgacuccgaaggcaaugccacccccggcggguacugccucacccgcuggaugcugaucgaggcugaacuuaaguguuucggaaacacagccguggcuaaaugcaaugagaagcaugaugaggaauuuugcgacaugcugagacucuucgauuuuaacaaacaggccauuagccggcugaagucugaggcgcagauguccauccagcuuauuaauaaagccguuaacgcucugaucaaugaccaacucauuaugaagaaccaucugcgcgacaucauguguaucccuuauugcaauuacagcaaguauugguaccugaaccacacgauuaccggcaaaacaucucuccccaaguguuggcuggugagcaauggguccuaccuuaacgaaacccacuucucugaugacaucgagcagcaggccgauaauaugauuacagaaaugcugcaaaaagaguauauggagagacagggaaagaccccucucggccuggucgaccuguucguguuuagcacguccuucuaccuuaucagcauuuuucuccggcuggugaaaaucccgacacaccgccauauugucgggaagcccugcccuaaaccccacagacugaaccauaugggaaucuguucuugcggccucuauaagcagccuggcguucccgugcgguggaagcgcugaggacuaguaauaaggaaacuguaugaaugucugugggcaggaagugaagagauccuucuguaaagguuuuuggaauuaugucugcugaauaauaaacuuuuuugaaauaauaaaucugguagaaaaaugagaucucaaaggcucuuuucagagccaccaaaaaaaaaaaaaaaaaaaaaaaaaaaaaaaaaaaaaaaaaaaaaaaaaaaaaaaaaaaaaaaaaaaaaaaaaaaaaaaaaaaaaaaaaaaaaaaaaaaaa

SEQ ID NO: 35978 - RNA, 1809 nt, Artificial Sequence
  mRNA product Design b-4 (hSL-A100) comprising derived and/or modified sequence from LASV(Togo/2016/7082;Clade VI)__AMR44577__GPCmut9 (opt5)
aggagagucccgcagucggcguccagcggcucugcuuguucgugugugugucguugcaggccuuauucaagcuuaccaugggccagaucauuaccuucuuucaagaggugccccacgucaucgaagagguuaugaacauugugcugaucgcccucagccugcuugcuauucugaaggggguguacaaugucgccacaugcggaaucaucggccucgugacguuccuguuucuuugugggagauccugcucucugauuuauaaaggaagcuacgaacuccagacccuggagcugaacauggaaacacucaauaugaccaugccucuguccuguacaaagaacucuagccaucacuauauccggguuggcaaugagaccgggcuugagcugacacucaccaacacguccauuaucaaucauaaauucugcaaccugucugacgcgcacaagcgcaaucuuuacgaucaugcucugaugagcauucucuccaccuuucaccugagcaucccgaacuucaaucaguaugaagccaugucuugugacuuuaacggaggcaaaauuuccgugcaguacaaucugagccacgccuaugcugucgaugccgcugagcauugcggcacaguggccaacgggguucuccaaaccuucaugagaauggcguggggaggcucuuacaucgcccuggacuccggguguggaaauugggauugcaucaugacaagcuaccaguaucuuauuauccagaacaccacgugggaagaccacugucaguuuucucggcccuccccuauuggcuaccuggggcuccugagccaacgcacaagagauaucuauauuucccggcgccuucugggaaccuucacauggacccucucugacagcgagggcaacgagacccccggcggguacugccugacaagauggaugcugaucgaagcugagcucaaguguuuuggaaauacggccguggcuaagugcaacgaaaaacaugaugaggaguucugcgacaugcugcggcuuuuugauuucaauaagcaggccauccagcgccugaaauccgaagcgcagaugagcauucaacucaucaacaaggccgucaaugcucugauuaacgaccagcuuaucaugaaaaaucaccugagagauaugauguguauuccuuauugcaacuacucuaaguauugguaccucaaucacaccuccagcggccggacaucucugcccaaguguuggcuggugagcaacggguccuaccucaaugagacccauuucucugacgacaucgaacagcaagccgauaacaugaucacagagaugcugcagaaagaauauauugaccgccagggaaagaccccucuuggccugguggaucucuuugucuucagcacguccuuuuaccugaucagcauuuuccugcaccuuaucaaaauuccgacacauagacacaucguugggaagcccugcccuaaaccccaucggcucaaucacaugggaauuuguucuugcggccuguauaagcagccuggcgugcccacccgcuggaaaagaugaggacuaguaauaaggaaacuguaugaaugucugugggcaggaagugaagagauccuucuguaaagguuuuuggaauuaugucugcugaauaauaaacuuuuuugaaauaauaaaucugguagaaaaaugagaucucaaaggcucuuuucagagccaccaaaaaaaaaaaaaaaaaaaaaaaaaaaaaaaaaaaaaaaaaaaaaaaaaaaaaaaaaaaaaaaaaaaaaaaaaaaaaaaaaaaaaaaaaaaaaaaaaaaaa

SEQ ID NO: 35979 - RNA, 1809 nt, Artificial Sequence
  mRNA product Design b-4 (hSL-A100) comprising derived and/or modified sequence from LASV(KAK-428;Clade n.d. (VII))__ANH09740__GPCmut9 (opt5)
aggagagucccgcagucggcguccagcggcucugcuuguucgugugugugucguugcaggccuuauucaagcuuaccaugggccagaucgugaccuucuuucaagaggucccccacguuauugaagaggugaugaacaucgugcugauugcccucagccugcuugcuauccugaaggggcucuacaauuucgccacaugcggagucauuggccugaucacguuucuucugcucugugggagauccugcucugcgaccuauaaaggacaguacgaacugcagacacuggagcucaacauggaaagccugaauaugaccaugccucuuuccuguacaaagaacaauucucaucacuauauccgggcuggcaacaauaccgggcuggagcucacacugaccaacacgagcauuaucucccauaaauucugcaaucuuucugacgcccacaagaaaaaccuguacgaucauacccucaugagcauuaucacaaccuuucaccuguccauuccgaauuucaaccaguaugaggccaugagcugugacuuuaauggaggcaagaucucuauucaauacaaccugucccacagcuaugcuggcgaugccgcucagcauugcgggacaguggccaauggaguucuccagaccuucaugcgcauggcguggggcgggucuuaccuggcccuugacuccggauguagaggcugggauugcaucaucagcucuuaccaguaucugauuauccaaaacacgacaugggacgaucacugucaguuuucccggcccagcccuauuggguaccucggauucgugucccagaagacccgcgacaucuauauuucuagacggcugcuuggcacauuuaccuggacccugagcgauuccgaaggccaugacaugcccgggggauacugccucacacgcuggaugcugaucgaggcugaucugaaauguuucggcaacacggccgucgcuaagugcaaugaaaaacacgacgaggaguuuugcgauauguggagacucuucgacuucaacaagcaggccauccaacggcugaaagcggaagcccagaugaauauucagcuuaucaacaaggcugugaaugcccugauuaacgaccaacucaugaugaagaaucaucugcgcgauaucauguguauuccuuauugcaacuacagcaaauuuugguaucuuaauaacaccacaaccgggagaacaucucugccccgguguuggcucaucuccaauggaagcuaccugaacgagacccacuucucugacgauaucgaacagcaggcugacaauaugauuacggagaugcugcagaaggaauacauggaucgccaaggcaaaacaccucucgggcugguugaccuuuuuguguucagcaccuccuuuuaucugaucaccauuuuccuccaccuggucaagaucccgacacauagacacauugugggaaaacccugcccuaagccccaucggcugaaccacaugggcaucuguucuugcggccuuuacaaacagccuggggugcccguccgcuggaagagaugaggacuaguaauaaggaaacuguaugaaugucugugggcaggaagugaagagauccuucuguaaagguuuuuggaauuaugucugcugaauaauaaacuuuuuugaaauaauaaaucugguagaaaaaugagaucucaaaggcucuuuucagagccaccaaaaaaaaaaaaaaaaaaaaaaaaaaaaaaaaaaaaaaaaaaaaaaaaaaaaaaaaaaaaaaaaaaaaaaaaaaaaaaaaaaaaaaaaaaaaaaaaaaaaa

SEQ ID NO: 35980 - RNA, 1809 nt, Artificial Sequence; identical to SEQ ID NO: 35974
  mRNA product Design b-4 (hSL-A100) comprising derived and/or modified sequence from LASV(Pinneo-NIG-1969;Clade I)__AIT17836__GPCmut9 (opt5)

SEQ ID NO: 35981 - RNA, 1809 nt, Artificial Sequence
  mRNA product Design b-4 (hSL-A100) comprising derived and/or modified sequence from LASV(ISTH0009-NIG-2011;Clade II)__AIT17404__GPCmut9 (opt5)
aggagagucccgcagucggcguccagcggcucugcuuguucgugugugugucguugcaggccuuauucaagcuuaccaugggccagaucauuaccuucuuucaagaggugccccacgucaucgaagagguuaugaacauugugcugaucgcccucagccugcuugcuauucugaaggggaucuacaauguggccacaugcggacucuucggccuggucuccuuucuucugcucugugggagaucuugcagcacgaccuauaaaggaguguacgaacugcagacacuggagcucgacauggcgucccugaacaugaccaugccucuuucuuguacaaagaauaacagccaucacuauaucaugguuggcaaugaaaccgggcuggagcucacacugaccaacacguccauuaucaaucauaaauucugcaaccuuucugaugcucacaagaaaaaucuguacgaccaugcccucaugagcauuaucuccaccuuucaccugagcauuccgaacuucaaucaguaugaggccaugucuugugauuuuaacggaggcaagaucuccgugcaguacaaucugagccacgcuuaugccgucgacgcugccaaccauugcggcacaauugcgaauggggugcuccaaaccuucaugcggauggccuggggaggcucuuacaucgcucuggauuccggguguggaagcugggacugcaucaugacaucuuaccaguaucuuauuauccagaacaccacgugggaagaucacugucaguuuucccgccccagcccuauuggcuaccuggggcuccugucccaaagaacacgggacaucuauauuucucgcagacuucugggaaccuucacauggacccucagcgauuccgagggcaacgaaacccccggcggguacugccugacacgguggaugcugaucgaggccgagcucaaguguuuuggaaauacggcuguugccaaaugcaacgaaaagcaugacgaggaguucugcgauaugcugcgccuuuuugacuucaauaaacaggcgaucagacggcugaagaccgaagcccagaugagcauucagcucaucaacaaagcugugaaugcccugauuaacgaucaacuuaucaugaagaaucaucugcgcgacauuauguguaucccuuauugcaacuacucuaaguauugguaccucaaucacacagucaccggcaaaacaucccugcccagauguuggcuggugagcaacgggucuuaccucaaugaaacccacuucagcgacgauaucgagcagcaggcugacaacaugauuacggagcugcuucaaaaggaauauauggaucggcagggaaaaacaccucugggccucguggaccuguuugucuucuccaccucuuuuuaccugaucagcauuuuccuucaccucaucaagauuccgacccaucgccacaucacagggaaacccugcccuaagccccauagacugaaucacaugggaauuuguuccugcggccuguauaaacacccuggcguucccgugaaguggaagcggugaggacuaguaauaaggaaacuguaugaaugucugugggcaggaagugaagagauccuucuguaaagguuuuuggaauuaugucugcugaauaauaaacuuuuuugaaauaauaaaucugguagaaaaaugagaucucaaaggcucuuuucagagccaccaaaaaaaaaaaaaaaaaaaaaaaaaaaaaaaaaaaaaaaaaaaaaaaaaaaaaaaaaaaaaaaaaaaaaaaaaaaaaaaaaaaaaaaaaaaaaaaaaaaaa

SEQ ID NO: 35982 - RNA, 1809 nt, Artificial Sequence
  mRNA product Design b-4 (hSL-A100) comprising derived and/or modified sequence from LASV(ISTH2010-NIG-2012;Clade II)__AIT17482__GPCmut9 (opt5)
aggagagucccgcagucggcguccagcggcucugcuuguucgugugugugucguugcaggccuuauucaagcuuaccaugggccagaucauuaccuucuuucaagaggugccccacgucaucgaagagguuaugaacauugugcugaucgcccucagccugcuugcuauucugaaggggaucuacaauguggccacaugcggacucuucggccuggucuccuuucuucugcucugugggagaucuugcagcacgaccuauaaaggaguguacgaacugcagacacuggagcucgacauggcgucccugaacaugaccaugccucuuucuuguacaaagaauaacagccaucacuauaucaugguuggcaaugaaaccgggcuggagcucacacugaccaacacguccauuaucaaucauaaauucugcaaccuuucugaugcucacaagaaaaaucuguacgaccaugcccucaugagcauuaucuccaccuuucaccugagcauuccgaacuucaaucaguaugaggccaugucuugugauuuuaacggaggcaagaucuccgugcaguacaaucugagccacgcuuaugccgucgacgcugccaaccauugcggcacaauugcgaauggggugcuccaaaccuucaugcggauggccuggggaggcucuuacaucgcucuggauuccggguguggaagcugggacugcaucaugacaucuuaccaguaucuuauuauccagaacauuaccugggaagaucacugucaguuuucccgccccagcccuaucggcuaccuggggcuccugucccaaagaacgcgggacauuuauaucucucgcagacuucugggaacauucaccuggacacucagcgauuccgagggcaacgaaacccccggcggguacugccugacccgguggaugcugaucgaggccgagcucaaguguuuuggaaauacagcuguugccaaaugcaacgaaaagcaugacgaggaguucugcgauaugcugcgccuuuuugacuucaauaaacaggcgauuagacggcugaagacggaagcccagaugagcauccagcucauuaacaaagcugugaaugcccugaucaacgaucaacuuauuaugaagaaucaucugcgcgacaucauguguaucccuuauugcaacuacucuaaguauugguaccucaaucacaccgucacaggcaaaaccucccugcccagauguuggcuggugagcaacgggucuuaccucaaugaaacacacuucagcgacgauauugagcagcaggcugacaacaugaucaccgagcugcuucaaaaggaauauauugaucggcagggaaaaacgccucugggccucguggaccuguuugucuucuccacaucuuuuuaccugaucagcauuuuccuucaccucguuaagaucccgacccaucgccacgugguggggaaacccugcccuaagccccauagacugaaucacaugggaauuuguuccugcggccuguauaaacacccuggcguccccgugaaguggaagcggugaggacuaguaauaaggaaacuguaugaaugucugugggcaggaagugaagagauccuucuguaaagguuuuuggaauuaugucugcugaauaauaaacuuuuuugaaauaauaaaucugguagaaaaaugagaucucaaaggcucuuuucagagccaccaaaaaaaaaaaaaaaaaaaaaaaaaaaaaaaaaaaaaaaaaaaaaaaaaaaaaaaaaaaaaaaaaaaaaaaaaaaaaaaaaaaaaaaaaaaaaaaaaaaaa

SEQ ID NO: 35983 - RNA, 1809 nt, Artificial Sequence
  mRNA product Design b-4 (hSL-A100) comprising derived and/or modified sequence from LASV(Lassa virus/H.sapiens-wt/NGA/2015/ISTH_0543;Clade II)__AVO03639__GPCmut9 (opt5)
aggagagucccgcagucggcguccagcggcucugcuuguucgugugugugucguugcaggccuuauucaagcuuaccaugggccagaucauuaccuucuuucaagaggugccccacgucaucgaagagguuaugaacauugugcugaucgcccucagccugcuugcuauucugaaggggaucuacaauguggccacaugcggacucuucggccuggucuccuuucuucugcucugugggagaucuugcagcacgaccuauaaaggaguguacgaacugcagacacuggagcucgacauggcgaaccugaauaugaccaugccucuuuccuguacaaagaacaauucucaucacuauaucaugguuggcaacgaaaccgggcuggagcucacacugaccaauacgagcauuaucaaccauaaauucugcaaucuuuccgaugcucacaagaaaaaccuguacgaccaugcccucaugucuauuaucagcaccuuucaccuguccauuccgaauuucaaccaguaugaggccaugagcugugauuuuaauggaggcaagaucucugugcaguacaaccugucccacacauaugcugucgacgccgcuaaucauugcggcaccauugccaacggggugcuccaaacauucaugcggauggcguggggaggcagcuacaucgcccuggauucuggguguggauccugggacugcaucaugaccagcuaccaguaucuuguuauucagaacacgacaugggaagaucacugucaguuuucucgccccuccccuaucggcuaccuggggcuccugagccaaagaacccgggacauuuauaucucccgcagacuucugggaacauucaccuggacccucucugauagcgagggcaaugaaacacccggcggguacugccugacgcgguggaugcugauugaggcugagcucaaguguuuuggaaacaccgccguggcuaaaugcaaugaaaagcaugacgaggaguucugcgauaugcugcgccuuuuugacuucaacaaacaggccaucagacggcugaagacagaagcgcagauguccauccagcucauuaauaaagccgucaacgcucugaucaaugaucaacuuauuaugaagaaccaucugcgcgacaucauguguauuccuuauugcaauuacagcaaguauugguaccucaaccacaccgugacaggcaaaaccucucugcccagauguuggcugguguccaaugggagcuaccucaacgaaacgcacuucucugacgauaucgagcagcaggccgacaauaugaucacagagcugcuucaaaaggaauauauugaucggcagggaaaaaccccucugggccucgucgaccuguuuguuuucagcaccuccuuuuaccugaucucuauuuuccuucaccucgugaagaucccgacacaucgccacauuaccgggaaacccugcccuaagccccauagacugaaccacaugggaaucuguagcugcggccuguauaaacacccuggcgugcccgucaaguggaagcggugaggacuaguaauaaggaaacuguaugaaugucugugggcaggaagugaagagauccuucuguaaagguuuuuggaauuaugucugcugaauaauaaacuuuuuugaaauaauaaaucugguagaaaaaugagaucucaaaggcucuuuucagagccaccaaaaaaaaaaaaaaaaaaaaaaaaaaaaaaaaaaaaaaaaaaaaaaaaaaaaaaaaaaaaaaaaaaaaaaaaaaaaaaaaaaaaaaaaaaaaaaaaaaaaa

SEQ ID NO: 35984 - RNA, 1809 nt, Artificial Sequence
  mRNA product Design b-4 (hSL-A100) comprising derived and/or modified sequence from LASV(Lassa virus/H.sapiens-wt/NGA/2016/ISTH_0009;Clade II)__AVO03571__GPCmut9 (opt5)
aggagagucccgcagucggcguccagcggcucugcuuguucgugugugugucguugcaggccuuauucaagcuuaccaugggccagaucauuaccuucuuucaagaggugccccacgucaucgaagagguuaugaacauugugcugaucgcccucagccugcuugcuauucugaaggggaucuacaauguggccacaugcggacuccugggccuugucuccuuccugcuccugugugggagaucuugcagcacgaccuauaaaggaguguacgaacugcagacacucgagcuggacauggcgucccuuaacaugaccaugccucugucuuguacaaagaauaacagccaucacuauaucaugguuggcaaugaaaccgggcucgagcugacacuuaccaacacguccauuaucaaucauaaauuuugcaaccugucugaugcucacaagaaaaaucucuacgaccaugcccugaugagcauuaucuccaccuuccaccugagcauuccgaacuuuaaucaguaugaggccaugucuugugauuucaacggaggccggaucuccgugcaguacaaucucagccacucuuaugcugucgacgccgcuaaccauugcggcacaauugccaauggggugcugcaaaccuuuaugcgcauggcguggggaggcuccuacaucgcccuugauagcggguguggaucuugggacugcaucaugacauccuaccaguaucugauuauccagaacaccacgugggaagaucacugucaguucagcagacccuccccuauuggcuaccucgggcugcuuucucaacggacacgcgacaucuauauuagcagacggcugcucggaaccuuuacauggacccuguccgauagcgagggcaacgaaacccccggcggguacugccugacacgcuggaugcucaucgaggcugagcugaaguguuucggaaauacggccguugcuaagugcaacgaaaaacaugacgaggaauuuugcgauaugcuuagacuguucgacuuuaauaagcaggccauccggcgccucaaaaccgaggcgcagaugucuauucagcugaucaacaaggccgugaaugcucuuauuaacgaucaacugaucaugaaaaaucaccucagagacauuauguguaucccuuauugcaacuacuccaaguauugguaccugaaucacacagucaccggcaagacaagccugccccgguguuggcucgugucuaacgggagcuaccugaaugaaacccauuucuccgacgauaucgagcagcaggccgacaacaugauuacggagcuucugcaaaaagaauauaucgaucgccagggaaagacaccucucggccugguggaccuguucgucuuuucuaccagcuucuaccuuauuuccaucuuucuccaccugguuaaaauuccgacccauagacacaucacagggaagcccugcccuaaaccccaucggcugaaucacaugggaauuuguagcugcggccucuauaaccacccuggcgugcccgugaaguggaaacgcugaggacuaguaauaaggaaacuguaugaaugucugugggcaggaagugaagagauccuucuguaaagguuuuuggaauuaugucugcugaauaauaaacuuuuuugaaauaauaaaucugguagaaaaaugagaucucaaaggcucuuuucagagccaccaaaaaaaaaaaaaaaaaaaaaaaaaaaaaaaaaaaaaaaaaaaaaaaaaaaaaaaaaaaaaaaaaaaaaaaaaaaaaaaaaaaaaaaaaaaaaaaaaaaaa

SEQ ID NO: 35985 - RNA, 1809 nt, Artificial Sequence
  mRNA product Design b-4 (hSL-A100) comprising derived and/or modified sequence from LASV(Lassa virus/H.sapiens-wt/NGA/2016/ISTH_0017;Clade II)__AVO03567__GPCmut9 (opt5)
aggagagucccgcagucggcguccagcggcucugcuuguucgugugugugucguugcaggccuuauucaagcuuaccaugggccagaucauuaccuucuuucaagaggugccccacgucaucgaagagguuaugaacauugugcugaucgcccucagccugcuugcuauucugaaggggaucuacaauguggccacaugcggacucuucggccuggucuccuuucuucugcucugugggagaucuugcagcacgaccuauaaaggaguguacgaacugcagacacuggagcucgacauggcgucccugaacaugaccaugccucuuucuuguacaaagaauaacagccaucacuauaucaugguuggcaaugaaaccgggcuggagcucacacugaccaacacguccauuaucaaucauaaauucugcaaccuuucugaugcucacaagaaaaaucuguacgaccaugcccucaugagcauuaucuccaccuuucaccugagcauuccgaacuucaaucaguaugaggccaugucuugugauuuuaacggaggcaagaucuccgugcaguacaaucugagccacacauaugcuauugacgccgcuaaccauugcggcaccaucgccaaugggguccuccaaacauucaugcggauggcguggggaggcucuuacaucgcccuggauuccggguguggaagcugggacugcauuaugaccucuuaccaguaucuuaucauucagaacacgacaugggaagaucacugucaguuuucccgccccagcccuaucggcuaccuggggcuccugucccaaagaacccgggacauuuauaucucucgcagacuucugggaacauucaccuggacccucagcgauuccgagggcaacgaaacacccggcggguacugccugacgcgguggaugcugaucgaggcugagcucaaguguuuuggaaauaccgccguggcuaaaugcaacgaaaagcaugacgaggaguucugcgauaugcugcgccuuuuugacuucaauaaacaggccauuagacggcugaagacagaagcgcagaugagcauccagcucauuaacaaagccguuaaugcucugaucaacgaucaacuuauuaugaagaaucaucugcgcgacaucauguguaucccuuauugcaacuacucuaaguauugguaccucaaucacaccgugacaggcaaaaccucccugcccagauguuggcuggucagcaacgggucuuaccucaaugaaacgcacuucagcgacgauauugagcagcaggccgacaacaugaucacagagcugcuucaaaaggaauauauggaucggcagggaaaaaccccucugggccucguggaccuguuuguguucuccaccucuuuuuaccugauuagcaucuuccuucaccucguccgcauuccgacacauagacacguuaucgggaagcccugcccuaaaccccaucggcugaaucacaugggaauuuguuccugcggccuguauaagcacccuggcgugcccgugaaauggaagcgcugaggacuaguaauaaggaaacuguaugaaugucugugggcaggaagugaagagauccuucuguaaagguuuuuggaauuaugucugcugaauaauaaacuuuuuugaaauaauaaaucugguagaaaaaugagaucucaaaggcucuuuucagagccaccaaaaaaaaaaaaaaaaaaaaaaaaaaaaaaaaaaaaaaaaaaaaaaaaaaaaaaaaaaaaaaaaaaaaaaaaaaaaaaaaaaaaaaaaaaaaaaaaaaaaa

SEQ ID NO: 35986 - RNA, 1809 nt, Artificial Sequence
  mRNA product Design b-4 (hSL-A100) comprising derived and/or modified sequence from LASV(Lassa virus/H.sapiens-wt/NGA/2018/ISTH_0959;Clade II)__AVV65099__GPCmut9 (opt5)
aggagagucccgcagucggcguccagcggcucugcuuguucgugugugugucguugcaggccuuauucaagcuuaccaugggccagaucauuaccuucuuucaagaggugccccacgucaucgaagagguuaugaacauugugcugaucgcccucagccugcuugcuauucugaaggggaucuacaauguggucacaugcggacucuucggccugguguccuuucuucugcucugugggagaucuugcagcacgaccuauaaaggaguuuacgaacugcagacacuggagcucgacauggccucccugaacaugaccaugccucuuucuuguacaaagaauaacagccaucacuauaucauggugggcaaugaaaccgggcuggagcucacacugaccaacacguccauuaucaaucauaaauucugcaaccuuucugaugcgcacaagaaaaaucuguacgaccaugcucucaugagcauuaucuccaccuuucaccugagcauuccgaacuucaaucaguaugaggccaugucuugugauuuuaacggaggcaagaucuccguccaguacaaucugagccacgccuaugcuauugacgccgcuaaccauugcggcacaaucgccaauggggugcuccaaaccuucaugcggauggcguggggaggcucuuacaucgcccuggauuccggguguggaagcugggacugcauuaugacaucuuaccaguaucuuaucauucagaacaccacgugggaagaucacugucaguuuucccgccccagcccuaucggcuaccuggggcuccugucccaaagaacacgggacauuuauaucucucgcagacuucugggaaccuucacauggacccucagcgauuccgagggcaacgaaacccccggcggguacugccugacacgguggaugcugaucgaggcugagcucaaguguuuuggaaauacggccguugcuaaaugcaacgaaaagcaugacgaggaguucugcgauaugcugcgccuuuuugacuucaauaaacaggccauuagacggcugaagaccgaagcgcagaugagcauccagcucauuaacaaagccgugaaugcucugaucaacgaucaacuuauuaugaagaaucaucugcgcgacaucauguguaucccuuauugcaacuacucuaaguauugguaccucaaucacacagucaccggcaaaacaucccugcccagauguuggcuggugagcaacgggucuuaccucaaugaaacccacuucagcgacgauauugagcagcaggccgacaacaugaucacggagcugcuucaaaaggaauauauugaucggcagggaaaaacaccucugggccucguggaccuguuugucuucuccaccucuuuuuaccugaucagcauuuuccuucaccucguuaagaucccgacccaucgccacgugauugggaaacccugcccuaagccccauagacugaaucacaugggaaucuguuccugcggccuguauaaacacccuggcgugcccgucaaguggaagcggugaggacuaguaauaaggaaacuguaugaaugucugugggcaggaagugaagagauccuucuguaaagguuuuuggaauuaugucugcugaauaauaaacuuuuuugaaauaauaaaucugguagaaaaaugagaucucaaaggcucuuuucagagccaccaaaaaaaaaaaaaaaaaaaaaaaaaaaaaaaaaaaaaaaaaaaaaaaaaaaaaaaaaaaaaaaaaaaaaaaaaaaaaaaaaaaaaaaaaaaaaaaaaaaaa

SEQ ID NO: 35987 - RNA, 1809 nt, Artificial Sequence
  mRNA product Design b-4 (hSL-A100) comprising derived and/or modified sequence from LASV(LASV003-NIG-2008;Clade II)__AIT17580__GPCmut9 (opt5)
aggagagucccgcagucggcguccagcggcucugcuuguucgugugugugucguugcaggccuuauucaagcuuaccaugggccagaucauuaccuucuuucaagaggugccccacgucaucgaagagguuaugaacauugugcugaucgcccucagccugcuugcuauucugaaggggaucuacaauguggccacaugcggacucuucggccuggucuccuuucuucugcucugugggagaucuugcagcacgaccuauaaaggaguguacgaacugcagacacuggagcucgacauggcgucccugaacaugaccaugccucuuucuuguacaaagaauaacagccaucacuauaucaugguuggcaaugaaaccgggcuggagcucacacugaccaacacguccauuaucaaucauaaauucugcaaccuuucugaugcucacaagaaaaaucuguacgaccaugcccucaugagcauuaucuccaccuuucaccugagcauuccgaacuucaaucaguaugaggccaugucuugugauuuuaacggaggcaagaucuccgugcaguacaaucugagccacacauaugcugucgacgccgcuaaccauugcggcaccauugccaauggggugcuccaaacauucaugcggauggcguggggaggcucuuacaucgcccuggauuccggguguggaagcugggacugcaucaugaccucuuaccaguaucuuauuauccagaacacgacaugggaagaucacugucaguuuucccgccccagcccuauuggcuaccuggggcuccugucccaaagaacccgggacaucuauauuucucgcagacuucugggaacauucaccuggacccucagcgauuccgagagcaacgaaacacccggcggcuacugccugacgcgguggaugcugaucgaggcugagcucaaguguuuugggaauaccgccguugcuaaaugcaacgaaaagcaugacgaggaguucugcgauaugcugcgccuuuuugacuucaauaaacaggccaucagacggcugaaggcggaagcccagaugucuauucagcucaucaacaaagcugugaaugcccugauuaacgaucaacuuaucaugaagaaucaucugcgcgacauuauguguaucccuuauugcaacuacuccaaguauugguaccucaaucacacagucaccggaagaacaagccugccccgguguuggcuggugucuaacggcagcuaccucaaugaaacccacuucuccgacgauaucgagcagcaggcugacaacaugauuacggagcugcuucaaaaagaauauauggaucgccaggggaagacaccucugggacucguggaccuguuugucuucucuaccagcuuuuaccugaucuccauuuuccuucaccucguuaaaaucccgacccauagacacgugauuggcaagcccugcccuaaaccccaucggcugaaucacauggggaucuguagcugcggacuguauaagcacccuggcgugcccgucaaauggaagcgcugaggacuaguaauaaggaaacuguaugaaugucugugggcaggaagugaagagauccuucuguaaagguuuuuggaauuaugucugcugaauaauaaacuuuuuugaaauaauaaaucugguagaaaaaugagaucucaaaggcucuuuucagagccaccaaaaaaaaaaaaaaaaaaaaaaaaaaaaaaaaaaaaaaaaaaaaaaaaaaaaaaaaaaaaaaaaaaaaaaaaaaaaaaaaaaaaaaaaaaaaaaaaaaaaa

SEQ ID NO: 35988 - RNA, 1809 nt, Artificial Sequence
  mRNA product Design b-4 (hSL-A100) comprising derived and/or modified sequence from LASV(LASV035-NIG-2009;Clade II)__AIT17588__GPCmut9 (opt5)
aggagagucccgcagucggcguccagcggcucugcuuguucgugugugugucguugcaggccuuauucaagcuuaccaugggccagaucauuaccuucuuucaagaggugccccacgucaucgaagagguuaugaacauugugcugaucgcccucagccugcuugcuauucugaaggggaucuacaauguggccacaugcggacucuucggccuggucuccuuucuucugcucugugggagaucuugcagcacgaccuauaaaggaguguacgaacugcagacacuggagcucgacauggcgucccugaacaugaccaugccucuuucuuguacaaagaauaacagccaucacuauaucaugguuggcaaugaaaccgggcuggagcucacacugaccaacacguccauuaucaaucauaaauucugcaaccuuucugaugcucacaagaaaaaucuguacgaccaugcccucaugagcauuaucuccaccuuucaccugagcauuccgaacuucaaucaguaugaggccaugucuugugauuuuaacggaggcaagaucuccgugcaguacaaucugagccacgcuuaugccgucgacgcugccaaccauugcggcacaauugcgaauggggugcuccaaaccuucaugcggauggccuggggaggcucuuacaucgcucuggauuccggguguggaagcugggacugcaucaugacaucuuaccaguaucuuauuauccagaacaccacgugggaagaucacugucaguuuucccgccccagcccuauuggcuaccuggggcuccugucccaaagaacacgggacaucuauauuucucgcagacuucugggaaccuucacauggacccucagcgauuccgagggcaacgaaacccccggcggguacugccugacacgguggaugcugaucgaggccgagcucaaguguuuuggaaauacggcuguugccaaaugcaacgaaaagcaugacgaggaguucugcgauaugcugcgccuuuuugacuucaauaaacaggcgaucagacggcugaaggccgaagcucagaugagcauucagcucaucaacaaagccgugaaugcucugauuaacgaucaacuuaucaugaagaaucaucugcgcgacauuauguguaucccuuauugcaacuacucuaaguauugguaccucaaucacaccgucacaggcaaaaccucccugcccagauguuggcuggugagcaacgggucuuaccucaaugaaacacacuucagcgacgauaucgagcagcaggccgacaacaugauuaccgagcugcuucaaaaggaauauaucgaucggcagggaaaaacgccucugggccucguggaccuguuugucuucuccacaucuuuuuaccugauuagcaucuuccuucaccucguuaagauuccgacccaucgccacgugaucgggaaacccugcccuaagccccauagacugaaucacaugggaauuuguuccugcggccuguauaaacacccuggcgugcccgucaaguggaagcggugaggacuaguaauaaggaaacuguaugaaugucugugggcaggaagugaagagauccuucuguaaagguuuuuggaauuaugucugcugaauaauaaacuuuuuugaaauaauaaaucugguagaaaaaugagaucucaaaggcucuuuucagagccaccaaaaaaaaaaaaaaaaaaaaaaaaaaaaaaaaaaaaaaaaaaaaaaaaaaaaaaaaaaaaaaaaaaaaaaaaaaaaaaaaaaaaaaaaaaaaaaaaaaaaa

SEQ ID NO: 35989 - RNA, 1809 nt, Artificial Sequence
  mRNA product Design b-4 (hSL-A100) comprising derived and/or modified sequence from LASV(LASV1000-NIG-2009;Clade II)__AIT17782__GPCmut9 (opt5)
aggagagucccgcagucggcguccagcggcucugcuuguucgugugugugucguugcaggccuuauucaagcuuaccaugggccagaucauuaccuucuuucaagaggugccccacgucaucgaagagguuaugaacauugugcugaucgcccucagccugcuugcuauucugaaggggaucuacaauguggccacaugcggacucuucggccuggucuccuuucuucugcucugugggagaucuugcagcacgaccuauaaaggaguguacgaacugcagacacuggagcucgacauggcgucccugaacaugaccaugccucuuucuuguacaaagaauaacagccaucacuauaucaugguuggcaaugaaaccgggcuggagcucacacugaccaacacguccauuaucaaucauaaauucugcaaccuuucugaugcucacaagaaaaaucuguacgaccaugcccucaugagcauuaucuccaccuuucaccugagcauuccgaacuucaaucaguaugaggccaugucuugugauuuuaacggaggcaagaucuccgugcaguacaaucugagccacacauaugcugucgacgccgcuaaccauugcggcaccauugccaauggggugcuccaaacauucaugcggauggcguggggaggcucuuacaucgcccuggauuccggguguggaagcugggacugcaucaugaccucuuaccaguaucuuauuauccagaacacgacaugggaagaucacugucaguuuucccgccccagcccuauuggcuaccuggggcuccugucccaaagaacccgggacaucuauauuucucgcagacuucugggaacauucaccuggacccucagcgauuccgagggcaacgaaacacccggcggguacugccugacgcgguggaugcugaucgaggcugagcucaaguguuuuggaaauaccgccguugcuaaaugcaacgaaaagcaugacgaggaguucugcgauaugcugcgccuuuuugacuucaauaaacaggccaucaagagacugaaaacagaagcgcagaugagcauucagcucaucaacaaggccgugaaugcucugauuaacgaucaacuuaucaugaagaaucaucugcgggacauuauguguaucccuuauugcaacuacucuaaauauugguaccucaaucacaccgucacaggcaagaccucccugccccgcuguuggcuggugagcaacgggucuuaccucaaugaaacgcacuucagcgacgauaucgagcagcaggccgacaacaugauuacagagcugcuucaaaaagaauauaucgauagacagggaaagaccccucugggccucguggaccuguuugucuucuccaccucuuuuuaccugauuagcaucuuccuucaccucguuaaaauuccgacacaucggcacgugguggggaagcccugcccuaaaccccaucgccugaaucacaugggaaucuguuccugcggccuguauaagcacccuggcguccccgugaaguggaaaagaugaggacuaguaauaaggaaacuguaugaaugucugugggcaggaagugaagagauccuucuguaaagguuuuuggaauuaugucugcugaauaauaaacuuuuuugaaauaauaaaucugguagaaaaaugagaucucaaaggcucuuuucagagccaccaaaaaaaaaaaaaaaaaaaaaaaaaaaaaaaaaaaaaaaaaaaaaaaaaaaaaaaaaaaaaaaaaaaaaaaaaaaaaaaaaaaaaaaaaaaaaaaaaaaaa

SEQ ID NO: 35990 - RNA, 1809 nt, Artificial Sequence
  mRNA product Design b-4 (hSL-A100) comprising derived and/or modified sequence from LASV(LASV221-NIG-2010;Clade II)__AIT17624__GPCmut9 (opt5)
aggagagucccgcagucggcguccagcggcucugcuuguucgugugugugucguugcaggccuuauucaagcuuaccaugggccagaucauuaccuucuuucaagaggugccccacgucaucgaagagguuaugaacauugugcugaucgcccucagccugcuugcuauucugaaggggaucuacaauguggccacaugcggacucuucggccuggucuccuuucuucugcucugugggagaucuugcagcacgaccuauaaaggaguguacgaacugcagacacuggagcucgacauggcgucccugaacaugaccaugccucuuucuuguacaaagaauaacagccaucacuauaucaugguuggcaaugaaaccgggcuggagcucacacugaccaacacguccauuaucaaucauaaauucugcaaccuuucugaugcucacaagaaaaaucuguacgaccaugcccucaugagcauuaucuccaccuuucaccugagcauuccgaacuucaaucaguaugaggccaugucuugugauuuuaacggaggcaagaucuccgugcaguacaaucugagccacacauaugcuauugacgccgcuaaccauugcggcaccaucgccaaugggguccuccaaacauucaugcggauggcguggggaggcucuuacaucgcccuggauuccggguguggaagcugggacugcauuaugaccucuuaccaguaucuuaucauucagaacacgacaugggaagaucacugucaguuuucccgccccagcccuaucggcuaccuggggcuccugucccaaagaacccgggacauuuauaucucucgcagacuucugggaacauucaccuggacccucagcgauuccgagggcaacgaaacacccggcggguacugccugacgcgguggaugcugaucgaggcugagcucaaguguuuuggaaauaccgccguggcuaaaugcaacgaaaagcaugacgaggaguucugcgauaugcugcgccuuuuugacuucaauaaacaggccauuagacggcugaagacagaagcgcagaugagcauccagcucauuaacaaagccguuaaugcucugaucaacgaucaacuuauuaugaagaaucaucugcgcgacaucauguguaucccuuauugcaacuacucuaaguauugguaccucaaucacaccgugacaggcaaaaccucccugcccagauguuggcuggucagcaacgggucuuaccucaaugaaacgcacuucagcgacgauauugagcagcaggccgacaacaugaucacagagaugcugcaaaaggaauauauggaucggcagggaaaaaccccucuuggccugguggaccucuuuguguucuccaccucuuuuuaccugauuagcaucuuccugcaccuugucaagauuccgacacaucgccacguuaucgggaaacccugcccuaagccccauagacucaaucacaugggaauuuguuccugcggccuguauaaacacccuggcgugcccgugaaguggaagcggugaggacuaguaauaaggaaacuguaugaaugucugugggcaggaagugaagagauccuucuguaaagguuuuuggaauuaugucugcugaauaauaaacuuuuuugaaauaauaaaucugguagaaaaaugagaucucaaaggcucuuuucagagccaccaaaaaaaaaaaaaaaaaaaaaaaaaaaaaaaaaaaaaaaaaaaaaaaaaaaaaaaaaaaaaaaaaaaaaaaaaaaaaaaaaaaaaaaaaaaaaaaaaaaaa

SEQ ID NO: 35991 - RNA, 1809 nt, Artificial Sequence
  mRNA product Design b-4 (hSL-A100) comprising derived and/or modified sequence from LASV(LASV237-NIG-2010;Clade II)__AIT17638__GPCmut9 (opt5)
aggagagucccgcagucggcguccagcggcucugcuuguucgugugugugucguugcaggccuuauucaagcuuaccaugggccagaucauuaccuucuuucaagaggugccccacgucaucgaagagguuaugaacauugugcugaucgcccucagccugcuugcuauucugaaggggaucuacaauguggccacaugcggacucuucggccuggucuccuuucuucugcucugugggagaucuugcagcacgaccuauaaaggaguguacgaacugcagacacuggagcucgacauggcgucccugaacaugaccaugccucuuucuuguacaaagaauaacagccaucacuauaucaugguuggcaaugaaaccgggcuggagcucacacugaccaacacguccauuaucaaucauaaauucugcaaccuuucugaugcucacaagaaagaccuguacgaucaugcccucaugagcauuaucuccaccuuucaccugagcauuccgaauuucaaccaguaugaggccaugucuugugacuuuaauggaggcaagaucuccgugcaguacaaccugagccacacauaugcugucgaugccgcuaaucauugcggcaccauugccaacggggugcuccaaacauucaugcggauggcguggggaggcucuuacaucgcccuggacuccggguguggaagcugggauugcaucaugaccucuuaccaguaucuuauuauccagaauacgacaugggaagaccacugucaguuuucccgccccagcccuauuggcuaccuggggcuccugucccaaagaacccgggauaucuauauuucucgcagacuucugggaacauucaccuggacccucagcgacuccgagggcaacgaaacacccggcggguacugccugacgcgguggaugcugaucgaggcugagcucaaguguuuuggaaacaccgccguugcuaaaugcaaugaaaagcaugaugaggaguucugcgacaugcugcgccuuuuugauuucaacaaacaggccaucagacggcugaagacagaagcgcagaugagcauucagcucaucaauaaagccgugaacgcucugauuaaugaccaacuuaucaugaagaaccaucugcgcgacauuauguguaucccuuauugcaauuacucuaaguauugguaccucaaccacaccgucacaggcaaaaccucccugcccagauguuggcuggugagcaaugggucuuaccucaacgaaacgcacuucagcgaugacaucgagcagcaggccgauaauaugauuacagagcugcuucaaaaggaauauauggaccggcagggaaaaaccccucugggccucguggaucuguuugucuucuccaccucuuuuuaccugaucagcauuuuccuucaccucaucaagauuccgacacaucgccacaucaccgggaaacccugcccuaagccccauagacugaaccacaugggaauuuguuccugcggccuguauaaacacccuggcguucccgugaaguggaagcggugaggacuaguaauaaggaaacuguaugaaugucugugggcaggaagugaagagauccuucuguaaagguuuuuggaauuaugucugcugaauaauaaacuuuuuugaaauaauaaaucugguagaaaaaugagaucucaaaggcucuuuucagagccaccaaaaaaaaaaaaaaaaaaaaaaaaaaaaaaaaaaaaaaaaaaaaaaaaaaaaaaaaaaaaaaaaaaaaaaaaaaaaaaaaaaaaaaaaaaaaaaaaaaaaa

SEQ ID NO: 35992 - RNA, 1809 nt, Artificial Sequence
  mRNA product Design b-4 (hSL-A100) comprising derived and/or modified sequence from LASV(LASV253-NIG-2011;Clade II)__AIT17670__GPCmut9 (opt5)
aggagagucccgcagucggcguccagcggcucugcuuguucgugugugugucguugcaggccuuauucaagcuuaccaugggccagaucauuaccuucuuucaagaggugccccacgucaucgaagagguuaugaacauugugcugaucgcccucagccugcuugcuauucugaaggggaucuacaauguggccacaugcggacucuucggccuggucuccuuucuucugcucugugggagaucuugcagcacgaccuauaaaggaguguacgaacugcagacacuggagcucgacauggcgucccugaacaugaccaugccucuuucuuguacaaagaauaacagccaucacuauaucaugguuggcaaugaaaccgggcuggagcucacacugaccaacacguccauuaucaaucauaaauucugcaaccuuucugaugcucacaagaaaaaucuguacgaccaugcccucaugagcauuaucuccaccuuucaccugagcauuccgaacuucaaucaguaugaggccaugucuugugauuuuaacggaggcaagaucuccgugcaguacaaucugagccacacauaugcugucgacgccgcuaaccauugcggcaccauugccaauggggugcuccaaacauucaugcggauggcguggggaggcucuuacaucgcccuggauuccggguguggaagcugggacugcaucaugaccucuuaccaguaucuuauuauccagaacacgacaugggaagaucacugucaguuuucccgccccagcccuauuggcuaccuggggcuccugucccaaagaacccgggacaucuauauuucucgcagacuucugggaacauucaccuggacccucagcgauuccgagggcaacgaaacacccggcggguacugccugacgcgguggaugcugaucgaggcugagcucaaguguuuuggaaauaccgccguugcuaaaugcaacgaaaagcaugacgaggaguucugcgauaugcugcgccuuuuugacuucaauaaacaggccaucagacggcugaaggcggaagcccagaugagcauucagcucaucaacaaagcugugaaugcccugauuaacgaucaacuuaucaugaagaaucaucugcgcgacauuauguguaucccuuauugcaacuacucuaaguauugguaccucaaucacacagucaccggcagaacaucccugccccgguguuggcuggugagcaacgggucuuaccucaaugaaacccacuucagcgacgauaucgagcagcaggcugacaacaugauuacggagcugcuucaaaaagaauauaucgaucgccagggaaagacaccucugggccucguggaccuguuugucuucuccaccucuuuuuaccugauuagcaucuuccuucaccucguuaaaauuccgacccauagacacaucauugggaagcccugcccuaaaccccaucggcugaaucacaugggaaucuguuccugcggccuguauaagcacccuggcgugcccgugaaauggaagcgcugaggacuaguaauaaggaaacuguaugaaugucugugggcaggaagugaagagauccuucuguaaagguuuuuggaauuaugucugcugaauaauaaacuuuuuugaaauaauaaaucugguagaaaaaugagaucucaaaggcucuuuucagagccaccaaaaaaaaaaaaaaaaaaaaaaaaaaaaaaaaaaaaaaaaaaaaaaaaaaaaaaaaaaaaaaaaaaaaaaaaaaaaaaaaaaaaaaaaaaaaaaaaaaaaa

SEQ ID NO: 35993 - RNA, 1809 nt, Artificial Sequence
  mRNA product Design b-4 (hSL-A100) comprising derived and/or modified sequence from LASV(LASV254-NIG-2011;Clade II)__AIT17674__GPCmut9 (opt5)
aggagagucccgcagucggcguccagcggcucugcuuguucgugugugugucguugcaggccuuauucaagcuuaccaugggccagaucauuaccuucuuucaagaggugccccacgucaucgaagagguuaugaacauugugcugaucgcccucagccugcuugcuauucugaaggggaucuacaauguggccacaugcggacucuucggccuggucuccuuucuucugcucugugggagaucuugcagcacgaccuauaaaggaguguacgaacugcagacacuggagcucgacaugaccaaccugaauaugacaaugccucuuuccuguaccaagaacaauucucaucacuauaucaugguuggcaacgaaacagggcuggagcucacccugacgaauaccagcauuaucaaccauaaauucugcaaucuuuccgaugcgcacaagaaaaaccuguacaaucaugcucucaugucuauuaucagcacauuucaccuguccauuccgaacuucaaucaguaugaggccaugagcugugacuuuaacggaggcaagaucucugugcaguacaaucugucccacagcuaugccgucgaugcugccaaccauugcggcaccauugcuaacggggugcuccaaacauucaugcggauggccuggggaggcucuuacaucgcgcuggacuccggguguggaaauugggauugcaucaugaccagcuaccaguaucuuauuauccagaacacgacaugggaagaccacugucaguuuucucgccccuccccuauuggcuaccuggggcuccugagccaaagaacccgggauaucuauauuucccgcagacuucugggaacauucaccuggacccucucugacagcgagggcaaugaaacacccggcggguacugccugacgcgguggaugcugaucgaggccgagcucaaguguuuuggaaacaccgcuguugccaaaugcaaugaaaagcaugaugaggaguucugcgacaugcugcgccuuuuugauuucaacaaacaggcuaucagacggcugaagacagaagcccaggcgaauauucagcucaucaacaaagccgugaaugcucugauuaacgaccaacuuaucaugaagaaucaucugcgcgauauuauguguaucccuuauugcaacuacuccaaguauugguaccucaaucacaccgucacaggcaaaaccagccugcccagauguuggcuggugucuaacggguccuaccucaaugaaacgcacuucagcgacgacaucgagcagcaggccgauaacaugauuacagagcugcuucaaaaggaauauauggaccggcagggaaaaaccccucugggccucguggaucuguuugucuucucuaccagcuuuuaccugaucuccauuuuccuucaccucguuaagaucccgacacaucgccacgugauugggaaacccugcccuaagccccauagacugaaccacaugggaaucuguucuugcggccuguauaaacacccuggcgugcccgucaaguggaagcggugaggacuaguaauaaggaaacuguaugaaugucugugggcaggaagugaagagauccuucuguaaagguuuuuggaauuaugucugcugaauaauaaacuuuuuugaaauaauaaaucugguagaaaaaugagaucucaaaggcucuuuucagagccaccaaaaaaaaaaaaaaaaaaaaaaaaaaaaaaaaaaaaaaaaaaaaaaaaaaaaaaaaaaaaaaaaaaaaaaaaaaaaaaaaaaaaaaaaaaaaaaaaaaaaa

SEQ ID NO: 35994 - RNA, 1809 nt, Artificial Sequence
  mRNA product Design b-4 (hSL-A100) comprising derived and/or modified sequence from LASV(Nig08-A19;Clade III)__ADU56618__GPCmut9 (opt5)
aggagagucccgcagucggcguccagcggcucugcuuguucgugugugugucguugcaggccuuauucaagcuuaccaugggccagaucgugaccuucuuucaagaggucccccacguuauugaagaggugaugaacaucgugcugauugcccucagcauccuggcuauucuuaaggggcuguacaauaucgccacaugcggacucaucggccuggucacguuccuucugcucuccgggagaucuuguagcaugaccuauaaaggaguguacgaacugcagacacuggagcucaacaugaauacccugaacaugacaaugccucuuuccugcaccaagaauaacucucaucacuauauuaugguuggcaaugaaacagggcuggagcucacccugacgaacaccagccuucugcaucacaaauuuuguaaucucuccgacgcgcauaagaaaaaccuguacgaucacacacugaugucuaucauuagcaccuuccaccucuccaucccgaauuuuaaccaguaugaggcuaugagcugcgacuucaauggaggcaagauuacagugcaguacaaccugucucauuccuaugccaucgaugccgcuaaucacuguggcaccgucgccaacggggugcuucaaacguuuaugcggauggcuuggggaggcagcuacauugcccuggacucugggugcggaaagugggauuguaucaugacauccuaccaguaucucaucauucagaacaccacaugggaagaccauugccaguucagccgccccucuccuaucggcuaccuggggcuucugucccaaagaacccgggauauuuauaucagccgcagacuccugggaaccuuuacauggacgcuguccgacucugagggcaaugaaacccccggcggguacugucucacacgguggaugcugauugaggcggagcuuaaaugcuucggaaacaccgccguugcuaaguguaaugaaaaacacgaugaggaauuuugcgacaugcugcgccucuucgauuuuaacaagcaggccaucagacggcugaaagcugaggcccagaugagcauccagcuuauuaauaaggcggugaacgcccugaucaaugaccaacucauuaugaagaaccaucugcgcgauaucaugugcauuccuuauuguaauuacuccaaauauugguaccugaaccacacaagcaccggcagaacgucucucccccggugcuggcuggucuccaaugggagcuaccuuaacgaaacacacuucucugacgacaucgagcagcaggcugauaauaugaucaccgagaugcugcaaaaggaauaucucgaccgccagggaaaaaccccucugggccugguggaucuuuucguguuuagcacauccuucuaccucauuucuaucuuucugcaucuggucaagauuccgacccacagacauaucguugggaaacccuguccuaagccccaccggcucaaccacaugggaauuugcagcuguggccuguauaaacagccuggcgugcccgugcgcuggaagagaugaggacuaguaauaaggaaacuguaugaaugucugugggcaggaagugaagagauccuucuguaaagguuuuuggaauuaugucugcugaauaauaaacuuuuuugaaauaauaaaucugguagaaaaaugagaucucaaaggcucuuuucagagccaccaaaaaaaaaaaaaaaaaaaaaaaaaaaaaaaaaaaaaaaaaaaaaaaaaaaaaaaaaaaaaaaaaaaaaaaaaaaaaaaaaaaaaaaaaaaaaaaaaaaaa

SEQ ID NO: 35995 - RNA, 1812 nt, Artificial Sequence
  mRNA product Design b-4 (hSL-A100) comprising derived and/or modified sequence from LASV(G1180-SLE-2010;Clade IV)__AIT17168__GPCmut9 (opt5)
aggagagucccgcagucggcguccagcggcucugcuuguucgugugugugucguugcaggccuuauucaagcuuaccaugggccagaucgugaccuucuuucaagaggucccccacguuauugaagaggugaugaacaucgugcugauugcccucagcauccuggcuguccuuaaggggcuguacaauuucgccacaugcggacucgugggccugcuuacguuucugcuccugugugggagauccugcaccgcgucucgguauaaaggaguuuacgaacugcagacacucgagcugaacauggaaacccuuaauaugacaaugccucugagcuguaccaagaacaauucccaucacuauauuauggugggcaacgagacagggcucgagcugacccuuacgaauaccucuaucaucaaccauaaauucugcaaucugagcgacgcucacaagaaaaaccucuacgaucaugcccugauguccauuaucucuacauuucaccugagcauuccgaauuucaaccaguaugaagccauguccugugacuuuaauggaggcaagaucagcguccaguacaaccucucucacuccuaugcuggcgaugccgcuaaucauugcgggaccguggccaacggaguucugcaaacauucaugcgcauggcguggggcgggagcuacauugcccuugacucuggauguggcuccugggauugcaucaugaccagcuaccaguaucugauuauccagaacacgacaugggaggaccacugucaguuuucuagacccuccccuaucggguaccucggacugcuuagccaacggacccgcgauauuuauaucuccagacggcugcucggcacauucaccuggacccugucugacagcgaaggcaaggauacacccgggggauacugccugacgcgcuggaugcucauugaggcugagcugaaauguuuuggcaauaccgccguggcuaagugcaacgaaaaacaugacgaggaguucugcgauaugcuuagacuguuugacuucaauaagcaggccauccagcggcucaaagcggaagcccagauguccauucaacugaucaacaaggcugucaaugcccuuaucaacgaucagcugauuaugaagaaucaccuccgcgacaucauguguauuccuuauugcaacuacagcaaauauugguaccugaaucacacaaccacagggaagaccucucugcccaaauguuggcucguguccaacggaagcuaccugaaugaaacgcauuucucugacgauaucgagcagcaagcugacaacaugauuacagagaugcuucagaaggaauauauggagagacagggcaaaaccccucuggggcucguggaucuguuugucuucagcaccuccuuuuaccugaucucuaucuuccuucaccucguuaagauuccgacacaucggcacaucgugggaaaaagcugccccaagccucaucgccugaaucacaugggcauuuguuccugcggccuguauaagcagcccggggugccugucaaauggaagagaugaggacuaguaauaaggaaacuguaugaaugucugugggcaggaagugaagagauccuucuguaaagguuuuuggaauuaugucugcugaauaauaaacuuuuuugaaauaauaaaucugguagaaaaaugagaucucaaaggcucuuuucagagccaccaaaaaaaaaaaaaaaaaaaaaaaaaaaaaaaaaaaaaaaaaaaaaaaaaaaaaaaaaaaaaaaaaaaaaaaaaaaaaaaaaaaaaaaaaaaaaaaaaaaaa

SEQ ID NO: 35996 - RNA, 1812 nt, Artificial Sequence
  mRNA product Design b-4 (hSL-A100) comprising derived and/or modified sequence from LASV(G1442-SLE-2011;Clade IV)__AIT17180__GPCmut9 (opt5)
aggagagucccgcagucggcguccagcggcucugcuuguucgugugugugucguugcaggccuuauucaagcuuaccaugggccagaucgugaccuucuuucaagaggucccccacguuauugaagaggugaugaacaucgugcugauugcccucagcauccuggcuguccuuaaggggcuguacaauguggccacaugcggacucauuggccugguuacguuccuucugcucugugggagauccugcaccacaacccuguauaaaggaguguacgaacugcagacacucgagcugaacauggaaacccuuaauaugacaaugccucugucuuguaccaagaacaauagccaucacuauauccgggucggcaacgagacggggcucgagcugacccuuacaaauaccuccaucauuaaccauaaauuuugcaaucugucugacgcgcacaagaaaaaccucuacgaucaugcucugaugagcaucauuuccacauuccaccugucuaucccgaauuuuaaccaguaugaagccaugagcugugacuucaauggaggcaagauuuccgugcaguacaaccucagccacucuuaugccggcgaugcugccaaucauugcgggaccguugcuaacggagugcugcaaacguuuaugcgcauggccuggggcggguccuacaucgcgcuugacagcggauguggcaacugggauugcauuaugacaucuuaccaguaucugaucauccagaauaccacaugggacgaucacugucaguucuccagacccagcccuauuggguaccucggacugcuuucucaacggacccgcgacgucuauaucuccagacggcugcucggcaccuuuacauggacgcugagcgauuccgagggcaaggacacccccgggggauacugccugacacgcuggaugcucauugaagccgagcugaaauguuucggcaacaccgcuguggccaagugcaaugagaaacaugaugaagaguuuugcgacaugcuuagacuguucgauuuuaacaagcaggcuauccagcggcucaaagccgaagcgcagaugucuauucaacugaucaauaaggccgugaacgcucuuaucaaugaccagcugauuaugaagaaccaccuccgcgacaucauguguauuccuuauugcaauuacagcaaauauugguaccugaacaauacagccaccgggaagacgucccugcccaaauguuggcucaucagcaacggaucuuaccugaaugagacacacuucuccgaugacauugaacaggaggcugauaacaugaucaccgagaugcuucaaaaggaauauauggagagacagggcaaaaccccucuggggcucgucgaccuguucguuuuuagcacaucuuucuaccugaucagcauuuuucuucaucucgugaagaucccgacccaccggcauauugugggaaaauccugccccaagccucaccgccugaaucauaugggcaucuguucuugcggccuguauaagcagcccggggucccugugagauggaaacggugaggacuaguaauaaggaaacuguaugaaugucugugggcaggaagugaagagauccuucuguaaagguuuuuggaauuaugucugcugaauaauaaacuuuuuugaaauaauaaaucugguagaaaaaugagaucucaaaggcucuuuucagagccaccaaaaaaaaaaaaaaaaaaaaaaaaaaaaaaaaaaaaaaaaaaaaaaaaaaaaaaaaaaaaaaaaaaaaaaaaaaaaaaaaaaaaaaaaaaaaaaaaaaaaa

SEQ ID NO: 35997 - RNA, 1812 nt, Artificial Sequence
  mRNA product Design b-4 (hSL-A100) comprising derived and/or modified sequence from LASV(G3010-SLE-2013;Clade IV)__AIT17344__GPCmut9 (opt5)
aggagagucccgcagucggcguccagcggcucugcuuguucgugugugugucguugcaggccuuauucaagcuuaccaugggccagaucgugaccuucuuucaagaggucccccacguuauugaagaggugaugaacaucgugcugauugcccucagcauccuggcuguccuuaaggggcuguacaauuucgccacaugcggacucgugggccugguuacguuucuucugcucugugggagauccugcaccacaucucuguauaaaggaguguacgaacugcagacccucgagcugaacauggaaacacuuaauaugaccaugccucugagcuguacaaagaacaauucccaucacuauauuauggucggcaacgagaccgggcucgagcugacgcuuaccaauacaucuaucaucaaccauaaauucugcaaucugagcgacgcgcacaagaaaaaccucuacaaucaugcucugauguccauuaucucuaccuuucaccugagcauuccgaacuucaaucaguaugaagccauguccugugauuuuaacggaggcaagaucagcgugcaguacaaucucucucacuccuaugccggcgacgcugccagccauugcgggacaguugcuaacggagugcugcaaaccuucaugcggauggccuggggcgggucuuacauugcgcuugauuccggauguggcaagugggacugcaucaugacgagcuaccaguaucugauuauccagaacacaaccugggaggaucacugucaguuuucucgccccuccccuaucggguaccucggacugcuuagccaaagaacacgggacauuuauaucucccgcagacugcucggcaccuucaccuggacacugucugauagcgaaggcaaagacacgcccgggggauacugccugacccgguggaugcucauugaggccgagcugaaguguuuuggcaauacagcugucgccaaaugcaacgaaaagcaugaugaggaguucugcgacaugcuucgccuguuugauuucaauaaacaggcuauccagagacucaagaccgaagcccagauguccauucaacugaucaacaaggcggugaaugcccuuaucaacgaccagcugauuaugaaaaaucaccuccgggauaucauguguauuccuuauugcaacuacagcaaguauugguaccugaaucacacaaccacggggaaaacaucucugcccaaguguuggcucguguccaacggaagcuaccugaaugaaacccauuucucugacgacaucgagcagcaagcugauaacaugauuaccgagaugcuucagaaagaauauauggagcgccagggcaagacaccucuggggcucgucgaccuguuuguuuucagcaccuccuuuuaccugaucucuaucuuccuucaccucgugaaaauuccgacacauagacacaucgugggaaagagcugccccaagccucaucggcugaaucacaugggcauuuguuccugcggccuguauaaacagcccggggucccugugcgcuggaagagaugaggacuaguaauaaggaaacuguaugaaugucugugggcaggaagugaagagauccuucuguaaagguuuuuggaauuaugucugcugaauaauaaacuuuuuugaaauaauaaaucugguagaaaaaugagaucucaaaggcucuuuucagagccaccaaaaaaaaaaaaaaaaaaaaaaaaaaaaaaaaaaaaaaaaaaaaaaaaaaaaaaaaaaaaaaaaaaaaaaaaaaaaaaaaaaaaaaaaaaaaaaaaaaaaa

SEQ ID NO: 35998 - RNA, 1812 nt, Artificial Sequence
  mRNA product Design b-4 (hSL-A100) comprising derived and/or modified sequence from LASV(G502-SLE-2009;Clade IV)__AIT17126__GPCmut9 (opt5)
aggagagucccgcagucggcguccagcggcucugcuuguucgugugugugucguugcaggccuuauucaagcuuaccaugggccagaucgugaccuucuuucaagaggucccccacguuauugaagaggugaugaacaucgugcugauugcccucagcauccuggcuguccuuaaggggcuguacaauuucgccacaugcggacucgugggccugcuuacguuucugcuccugugugggagauccugcaccacaggacuguauaaaggcguuuacgaacuccagacccuggagcuuaacauggaaacacugaauaugaccaugccucucucuuguacaaagaacaauagccaucacuauauuaugguggggaacgagaccggacuggagcuuacgcugaccaauacauccaucaucaaccauaaauucugcaaucucucugacgcgcacaagaaaaaccuguacgaucaugcucugaugagcauuaucuccaccuuucaccucucuauuccgaauuucaaccaguaugaagccaugagcugugacuuuaauggcggcaagaucuccguccaguacaaccugagccacucuuaugccggggaugcugccgaccauugcggaacaguggcuaauggcguucuucaaaccuucaugcggauggccuggggaggguccuacauugcgcuggauagcggcugugggcgcugggacugcaucaugacgucuuaccaguaucucauuauccagaacacaaccugggaggaucacugucaguuuuccagacccagcccuaucggauaccugggccuucugucucaacggacacgcgacauuuauaucuccagacggcuccugggcaccuucaccuggacacugagcgauuccgaagggaaggacacgcccggaggcuacugccucacccgcuggaugcugauugaggccgagcuuaaauguuuugggaacacagcuguggccaagugcaaugaaaaacaugaugaggaguucugcgacaugcugagacucuuugauuucaacaagcaggcuauccagcggcugaaagccgaagcgcagaugucuauucaacuuaucaauaaggccgucaacgcucugaucaaugaccagcucgugaugaagaaccaucugcgcgacauuauguguaucccuuauugcaauuacagcagauauugguaccugaaccacaccacaaccggacggacgucccuccccaaauguuggcuggugagcaauggcucuuaccuuaacgaaacacacuucuccgaugacauugagcagcaagccgauaauaugaucaccgagaugcugcagaaggaauauauggagcgccaggggaaaaccccucucggacuggucgaccuguuuguuuucagcacaucuuuuuaccuuauuagcaucuuccuccaccuggugaagaucccgacccauagacacauugugggcaaauccugccccaagccucaucggcugaaccacaugggcaucuguucuugcgggcucuauaaacagcccggagucccugugaaguggaagcgcugaggacuaguaauaaggaaacuguaugaaugucugugggcaggaagugaagagauccuucuguaaagguuuuuggaauuaugucugcugaauaauaaacuuuuuugaaauaauaaaucugguagaaaaaugagaucucaaaggcucuuuucagagccaccaaaaaaaaaaaaaaaaaaaaaaaaaaaaaaaaaaaaaaaaaaaaaaaaaaaaaaaaaaaaaaaaaaaaaaaaaaaaaaaaaaaaaaaaaaaaaaaaaaaaa

SEQ ID NO: 35999 - RNA, 1812 nt, Artificial Sequence
  mRNA product Design b-4 (hSL-A100) comprising derived and/or modified sequence from LASV(G733-SLE-2010;Clade IV)__AIT17154__GPCmut9 (opt5)
aggagagucccgcagucggcguccagcggcucugcuuguucgugugugugucguugcaggccuuauucaagcuuaccaugggccagaucgugaccuucuuucaagaggucccccacguuauugaagaggugaugaacaucgugcugauugcccucagcauccuggcuguccuuaaggggcuguacaauuucgccacaugcggaauugugggccucguuuccuuucugcuucugugugggagaucuugcacgaccagccucuauaaaggaguguacgaacugcagacacuggagcucaacauggaaacccugaauaugacaaugccucuuuccuguaccaagaacaauucucaucacuauaucauggucggcaacgagacagggcuggagcucacccugacgaauaccagcaucauuaaccauaaauucugcaaucuuuccgacgcgcacaagaaaaaccuguacgaucaugcucucaugucuaucauuagcacauuucaccuguccaucccgaauuucaaccaguaugaagccaugagcugugacuuuaauggaggcaagauuucugugcaguacaaccugucccacagcuaugccggcgaugcugccaaucauugcgggaccaucgcuaacggaguucuccaaacauucaugcggauggccuggggcgggucuuacauugcgcuggacuccggaugugaucgcugggacugcaucaugaccagcuaccaguaucuuaucauucagaacacgacaugggaggaucacugucaguuuucuagacccuccccuaucggcuaccuggggcuccugagccaacggacccgcgacauuuauaucuccagacggcuucugggaacauucaccuggacccucucugauagcgaaggcaaggacacacccggcggguacugccugacgcgcuggaugcugauugaggccgagcucaaauguuuuggaaauaccgcuguggccaagugcaacgaaaaacaugaugaggaguucugcgacaugcugagacuuuuugauuucaauaagcaggcuauccagcggcugaaagccgaagcgcagauguccauccaacucauuaacaaggccgucaaugcucugaucaacgaccagcuuauuaugaagaaucaucugcgcgacaucauguguauuccuuauugcaacuacagcaaauauugguaccucaaucacacaaccacaggcaagaccucucugcccaaauguuggcugguguccaacgggagcuaccucaaugaaacgcacuucucugaugacaucgagcagcaagccgauaacaugaucacagagaugcugcagaaggaauauauggagagacagggaaaaaccccucuuggccugguggaccucuuugucuucagcaccuccuuuuaccugauuucuaucuuccugcaccuuguuaagauuccgacacaucggcacgugguggggaaaagcugccccaagccucaucgccucaaucacaugggaaucuguuccugcggccuguauggccagcccggggucccugugaaguggaaaagaugaggacuaguaauaaggaaacuguaugaaugucugugggcaggaagugaagagauccuucuguaaagguuuuuggaauuaugucugcugaauaauaaacuuuuuugaaauaauaaaucugguagaaaaaugagaucucaaaggcucuuuucagagccaccaaaaaaaaaaaaaaaaaaaaaaaaaaaaaaaaaaaaaaaaaaaaaaaaaaaaaaaaaaaaaaaaaaaaaaaaaaaaaaaaaaaaaaaaaaaaaaaaaaaaa

SEQ ID NO: 36000 - RNA, 1812 nt, Artificial Sequence
  mRNA product Design b-4 (hSL-A100) comprising derived and/or modified sequence from MOPV/LASV reassortant(IGS-1;Clade IV)__AFY05576__GPCmut9 (opt5)
aggagagucccgcagucggcguccagcggcucugcuuguucgugugugugucguugcaggccuuauucaagcuuaccaugggccagaucgugaccuucuuucaagaggucccccacguuauugaagaggugaugaacaucgugcugauugcccucagcguccuggcugugcuuaaggggcuguacaauuucgccacaugcggacucguuggccuggugacguuucuucugcucugugggagauccugcaccacaucucuguauaaaggagucuacgaacugcagacccucgagcugaacauggaaacacuuaauaugaccaugccucugagcuguacaaagaacaauucccaucacuauaucauggugggcaacgagaccgggcucgagcugacgcuuaccaauacaucuauuaucaaccauaaauucugcaaucugagcgacgcgcacaagaaaaaccucuacgaucaugcucugauguccaucauuucuaccuuucaccugagcaucccgaauuucaaccaguaugaagccauguccugugacuuuaauggaggcaagauuagcguucaguacaaccucucucacuccuaugccggcgaugcugccaaucauugcgggacaguggcuaacggaguccugcaaaccuucaugcggauggccuggggcgggagcuacaucgcgcuugacucuggauguggcaacugggauugcauuaugacguccuaccaguaucugaucauucagaauacaaccugggaggaccacugucaguuuagccgccccucuccuaucggguaccucggacugcuuucccaaagaacacgggauaucuauauuagccgcagacugcucggcaccuucaccuggacacuguccgacucugaaggcgaggauacgcccgggggauacugccugacccgguggaugcucaucgaggccgaacugaaguguuuuggcaacacagcuguggccaaaugcaaugagaagcaugacgaagaguucugcgauaugcuucgccuguuugacuucaacaaacaggcuauucagagacucaaggccgaagcgcagaugagcauccaacugauuaauaaagccgugaacgcucuuaucaaugaucagcugaucaugaagaaccaccuccgggacauuauguguaucccuuauugcaauuacuccaaguauugguaccugaaccacaccacaaccgggcgcacgagccugcccaaauguuggcucgucucuaauggauccuaccugaacgagacacauuucagcgacgauauugagcagcaagccgacaauaugaucaccgaaaugcuucagaaggaguauauggaaagacagggcaaaaccccucuggggcucguugaucuguuuguguucucuaccagcuuuuaccugauuuccaucuuccuucaccucgugaagaucccgacacaucggcacauugucggaaaaucuugccccaagccucaucgccugaaccacaugggcaucuguagcugcggccuguauaaacagcccggggugccuguuaaguggaagagaugaggacuaguaauaaggaaacuguaugaaugucugugggcaggaagugaagagauccuucuguaaagguuuuuggaauuaugucugcugaauaauaaacuuuuuugaaauaauaaaucugguagaaaaaugagaucucaaaggcucuuuucagagccaccaaaaaaaaaaaaaaaaaaaaaaaaaaaaaaaaaaaaaaaaaaaaaaaaaaaaaaaaaaaaaaaaaaaaaaaaaaaaaaaaaaaaaaaaaaaaaaaaaaaaa

SEQ ID NO: 36001 - RNA, 1812 nt, Artificial Sequence
  mRNA product Design b-4 (hSL-A100) comprising derived and/or modified sequence from LASV(LM765-SLE-2012;Clade IV)__AIT17814__GPCmut9 (opt5)
aggagagucccgcagucggcguccagcggcucugcuuguucgugugugugucguugcaggccuuauucaagcuuaccaugggccagaucgugaccuucuuucaagaggucccccacguuauugaagaggugaugaacaucgugcugauugcccucagcauccuggcuguccuuaaggggcuguacaauuucgccacaugcggacucgugggccugguuacguuucuucugcucugugggagauccugcaccacaucucuguauaaaggaguguacgaacugcagacccucgagcugaacauggaaacacuuaauaugaccaugccucugagcuguacaaagaacaauucccaucacuauauuauggucggcaacgagaccgggcucgagcugacgcuuaccaauacaucuaucaucgaccauaaauucugcaaccugagcgaugcgcaccggaagaaucucuacgaccaugcucugauguccauuaucucuaccuuucaccugagcauuccgaacuucaaucaguaugaagccauguccugugauuuuaacggaggcaaaaucagcgugcaguacaaucucucucacuccuaugccaaggacgcugccgaucauugcggcacaguugcuaacggggugcugcaaaccuucaugcgcauggccuggggaggcagcuacauugcgcuugacucuggguguggaagaugggauugcaucaugacguccuaccaguaucugauuauccagaauacaaccugggaggaccacugucaguuuagccggcccucuccuaucggcuaccucgggcugcuuucccaacgcacaagagauauuuauaucagccggcgccugcucggaaccuucaccuggacacuguccgacucugaaggcaaggauacgcccggcggguacugccugaccagauggaugcucauugaggccgagcugaaauguuuuggaaacacagcugucgccaagugcaacgaaaaacaugacgaggaguucugcgauaugcuucggcuguuugacuucaauaagcaggcuauccagcgccucaaagccgaagcgcagaugagcauucaacugaucaacaaggccgugaaugcucuuaucaacgaccagcugauuaugaagaaucaccucagagauaucauguguauuccuuauugcaacuacuccaaauauugguaccugaaucacaccacaaccggcaagacgagccugcccaaauguuggcucgugucuaacggguccuaccugaaugaaacacauuucagcgacgauaucgagcagcaagccgacaacaugauuaccgagaugcuucagaaggaauauauggagcggcagggaaaaaccccucugggccucgucgaucuguuuguuuucucuaccagcuuuuaccugaucuccaucuuccuucaccucgugaagauuccgacacaucgccacaucguggggaaacccugcccuaagccccauagacugaaucacaugggaauuuguucuugcggccuguauaagcagccuggcguccccgugaaauggaagcggugaggacuaguaauaaggaaacuguaugaaugucugugggcaggaagugaagagauccuucuguaaagguuuuuggaauuaugucugcugaauaauaaacuuuuuugaaauaauaaaucugguagaaaaaugagaucucaaaggcucuuuucagagccaccaaaaaaaaaaaaaaaaaaaaaaaaaaaaaaaaaaaaaaaaaaaaaaaaaaaaaaaaaaaaaaaaaaaaaaaaaaaaaaaaaaaaaaaaaaaaaaaaaaaaa

SEQ ID NO: 36002 - RNA, 1812 nt, Artificial Sequence
  mRNA product Design b-4 (hSL-A100) comprising derived and/or modified sequence from LASV(LM776-SLE-2012;Clade IV)__AIT17824__GPCmut9 (opt5)
aggagagucccgcagucggcguccagcggcucugcuuguucgugugugugucguugcaggccuuauucaagcuuaccaugggccagaucgugaccuucuuucaagaggucccccacguuauugaagaggugaugaacaucgugcugauugcccucagcauccuggcuguccuuaaggggcuguacaauuucgccacaugcggacucgugggccugguuacguuucuucugcucugugggagauccugcaccacaucuguguauaaaggagucuacgaacugcagacccuggagcucaacauggaaacacugaauaugaccaugccucuuagcuguacaaagaacaauucccaucacuauauuauggugggcaacgagaccgggcuggagcucacgcugaccaauacaucuaucaucaaccauaaauucugcaaucuuagcgacgcgcacaagaaaaaccuguacgaucaugcucucauguccauuaucucuaccuuucaccugagcauuccgaauuucaaccaguaugaagccauguccugugacuuuaauggaggcaagaucagcguucaguacaaccugucucacuccuaugccggcgaugcugccaaucauugcgggacaguggcuaacggaguccuccaaaccuucaugcggauggccuggggcgggagcuacauugcgcuggacucuggauguggcaagugggauugcaucaugacguccuaccaguaucuuauuauccagaacacaaccugggaggaccacugucaguuuagccgccccucuccuaucggguaccugggacuccugucccaaagaacacgggauauuuauaucagccgcagacuucugggcaccuucaccuggacacucuccgacucugaaggcaaagauacgcccgggggauacugccugacccgguggaugcugauugaggccgagcucaaguguuuuggcaauacagcuguggccaaaugcaacgaaaagcaugacgaggaguucugcgauaugcugcgccuuuuugacuucaauaaacaggcuauccagagacugaaggccgaagcgcagaugagcauucaacucaucaacaaggccgugaaugcucugaucaacgaucagcuuauuaugaaaaaucaucugcgggacaucauguguauuccuuauugcaacuacuccaaguauugguaccucaaucacaccacaaccgggaaaacgagccugcccaaguguuggcuggucucuaacggauccuaccucaaugaaacacacuucagcgacgauaucgagcagcaagccgacaacaugauuaccgagaugcugcagaaagaauauauggagcgccagggcaagaccccucuugggcugguugaucucuuuguguucucuaccagcuuuuaccugaucuccaucuuccugcaccuugugaaaauuccgacacauagacacaucgucggaaagucuugccccaagccucaucggcucaaucacaugggcauuuguagcugcggccuguauaaacagcccggggugccuguucgcuggaagagaugaggacuaguaauaaggaaacuguaugaaugucugugggcaggaagugaagagauccuucuguaaagguuuuuggaauuaugucugcugaauaauaaacuuuuuugaaauaauaaaucugguagaaaaaugagaucucaaaggcucuuuucagagccaccaaaaaaaaaaaaaaaaaaaaaaaaaaaaaaaaaaaaaaaaaaaaaaaaaaaaaaaaaaaaaaaaaaaaaaaaaaaaaaaaaaaaaaaaaaaaaaaaaaaaa

SEQ ID NO: 36003 - RNA, 1812 nt, Artificial Sequence
  mRNA product Design b-4 (hSL-A100) comprising derived and/or modified sequence from LASV(Mad39;Clade IV)__ANH09722__GPCmut9 (opt5)
aggagagucccgcagucggcguccagcggcucugcuuguucgugugugugucguugcaggccuuauucaagcuuaccaugggccagaucgugaccuucuuucaagaggucccccacguuauugaagaggugaugaacaucgugcugauugcccucagcauccuggcuguccuuaaggggcuguacaauguggccacaugcggacucauuggccugguuacguuccuucugcucugugggagauccugcaccacaacccuguauaaaggaguguacgaacugcaggcgcucgagcugaacauggaaacacuuaauaugaccaugccucugucuuguacaaagaacaauagccaucacuauauccgggucggcaacgagaccgggcucgagcugacgcuuaccaauacaucccugaucaaccauaaauuuugcaaucucucugacgcucacaagaaaaaccuguacgaucaugcccugaugagcauuaucuccaccuuccaccucucuauuccgaauuuuaaccaguaugaagccaugagcugugacuucaaugauggaaagaucuccgugcaguacaaccugagccacacauaugcuggcgacaccgccaaucauugcggcacgguugcuaacggggugcuucaaacauuuaugcgcauggccuggggaggcucuuacauugcgcuggauuccggguguggaggcugggacugcaucaugaccagcuaccaguaucucauuauccagaacacaaccugggaggaucacugucaguucucuagacccuccccuaucggguaccugggacuucugagccaacggacccgcgacauuuauaucucuagacggcuccugggcacauuuacguggacccuguccgauagcgaaggcaaggacacacccgggggauacugccucacccgcuggaugcugauugaggccgagcuuaaauguuucggcaauacagcugucgccaagugcaacgaaaaacaugaugaggaauuuugcgacaugcugagacucuucgauuuuaauaagcaggcuauccagcggcugaaagccgaggcgcagauguccauucaacuuaucaacaaggccgugaaugcucugaucaacgaccagcucauuaugaagaaucaucugcgcgacaucauguguauuccuuauugcaacuacucuaaauauugguaccugaaucacaccgugacggggaagacaagccuccccaaauguuggcuggucuccaacggaagcuaccuuaaugaaacccacuucucugaugacaucgagcagcaagccgauaacaugauuaccgagaugcugcagaaggaauauauggagagacagggcaaaacaccucucgggcugguugaccuguucguguuuuccaccagcuucuaccuuaucucuaucuuucuccaccuggugaagauuccgacacaucggcacgucgugggaaaacccugcccuaagccccaucgccugaaucacaugggcaucuguagcugcggcuucuauaagcagccugggguucccgugagauggaaacggugaggacuaguaauaaggaaacuguaugaaugucugugggcaggaagugaagagauccuucuguaaagguuuuuggaauuaugucugcugaauaauaaacuuuuuugaaauaauaaaucugguagaaaaaugagaucucaaaggcucuuuucagagccaccaaaaaaaaaaaaaaaaaaaaaaaaaaaaaaaaaaaaaaaaaaaaaaaaaaaaaaaaaaaaaaaaaaaaaaaaaaaaaaaaaaaaaaaaaaaaaaaaaaaaa

SEQ ID NO: 36004 - RNA, 1812 nt, Artificial Sequence
  mRNA product Design b-4 (hSL-A100) comprising derived and/or modified sequence from LASV(Z0947-SLE-2011;Clade IV)__AIT17840__GPCmut9 (opt5)
aggagagucccgcagucggcguccagcggcucugcuuguucgugugugugucguugcaggccuuauucaagcuuaccaugggccagaucgugaccuucuuucaagaggucccccacguuauugaagaggugaugaacaucgugcugauugcccucagcauccuggcuguccuuaaggggcuguacaauuucgccacaugcggacucgugggccugguuacguuucuucugcucugugggagauccugcaccauuucucuguauaaaggaguguacgaacugcagacacucgagcugaacauggaaacccuuaauaugacaaugccucugagcuguaccaagaacaauucccaucacuauaucauggucggcaacgagacagggcucgagcugacccuuacgaauaccucuaucauuaaccauaaauucugcaaucugagcgacgcgcacaagaaaaaccucuacgaucaugcucugauguccaucauuucuacauuucaccugagcaucccgaauuucaaccaguaugaagccauguccugugacuuuaauggaggcaagauuagcgugcaguacaaccucucucacuccuaugccggcgaugcugccaaucauugcgggaccguugcuaacggagugcugcaaacauucaugcggauggccuggggcgggagcuacaucgcgcuugacucuggaugugaucgcugggacugcauuaugaccuccuaccaguaucugaucauccagaacacgacaugggaggaucacugucaguuuagcagacccucuccuauuggcuaccucgggcugcuuucccaacggacccgcgacaucuauauuagcagacggcugcucggaacauucaccuggacccuguccgauucugaaggcaaggacacacccggcggguacugccugacgcgcuggaugcucaucgaggccgagcugaaauguuuuggaaauaccgcugucgccaagugcaacgaaaaacaugaugaggaguucugcgacaugcuuagacuguuugauuucaauaagcaggcuauucagcggcucaaagccgaagcgcagaugagcauccaacugaucaacaaggccgugaaugcucuuauuaacgaccagcugaucaugaagaaucaccuccgcgacauuauguguaucccuuauugcaacuacuccaaauauugguaccugaaucacacaaccacaggcaagaccagccugcccaaauguuggcucgugucuaacggguccuaccugaaugaaacgcauuucagcgaugacauugagcagcaagccgauaacaugaucacagagaugcuucagaaggaauauauggagagacagggaaaaaccccucugggccucgucgaccuguuuguuuucucuaccagcuuuuaccugaucuccauuuuccuucaccucgugaagaucccgacacaucggcacauuguggggaaacccugcccuaagccccaucgccugaaucacaugggaaucuguucuugcggccuguauaagcagccuggcguccccgugaaauggaagagaugaggacuaguaauaaggaaacuguaugaaugucugugggcaggaagugaagagauccuucuguaaagguuuuuggaauuaugucugcugaauaauaaacuuuuuugaaauaauaaaucugguagaaaaaugagaucucaaaggcucuuuucagagccaccaaaaaaaaaaaaaaaaaaaaaaaaaaaaaaaaaaaaaaaaaaaaaaaaaaaaaaaaaaaaaaaaaaaaaaaaaaaaaaaaaaaaaaaaaaaaaaaaaaaaa

SEQ ID NO: 36005 - RNA, 1788 nt, Artificial Sequence
  mRNA product Design b-4 (A100) comprising derived and/or modified sequence from LASV(Josiah;Clade IV)__NP_694870__GPCmut9 (opt1)
aggagagucccgcagucggcguccagcggcucugcuuguucgugugugugucguugcaggccuuauucaagcuuaccaugggccagaucgugaccuucuuccaggaggucccccacgugaucgaggaggugaugaacaucguccugaucgcccucagcgugcuggccgugcugaaggggcucuacaacuucgcgaccugcggccuggucgggcuggugacguuccuccugcugugcggccgcuccugcaccaccagccucuacaaggggguguacgagcugcagacccuggagcucaacauggagacgcugaacaugaccaugccgcuguccugcaccaagaacaacagccaccacuacaucauggucggcaacgagaccggccucgagcugacgcugaccaacaccuccaucaucaaccacaaguucugcaaccucagcgacgcccacaagaagaaccuguacgaccacgcccugauguccaucaucagcaccuuccaccucuccauccccaacuucaaccaguacgaggccaugagcugcgacuucaacgggggcaagaucuccgugcaguacaaccugagccacuccuacgccggggacgcggccaaccacugcggcacgguggccaacgggguccugcagaccuucaugcggauggccuggggcggcagcuacaucgcgcucgacuccgggugcggcaacugggacugcaucaugaccagcuaccaguaccugaucauccagaacaccacgugggaggaccacugccaguucucccggcccagccccaucggguaccugggccuccugucccagcgcacccgggacaucuacaucagccgccggcugcucggcaccuucaccuggacgcugagcgacuccgaggggaaggacaccccgggcggguacugccugacccgcuggaugcucaucgaggccgagcugaagugcuucggcaacaccgccguggccaagugcaacgagaagcacgacgaggaguucugcgacaugcugcggcuguucgacuucaacaagcaggccauccagcgccugaaggcggaggcccagaugagcauccagcugaucaacaaggccgugaacgcccucaucaacgaccagcugaucaugaagaaccaccuccgggacaucaugugcauccccuacugcaacuacuccaaguacugguaccucaaccacacgaccaccggccgcaccagccugcccaagugcuggcuggucuccaacggcagcuaccucaacgagacgcacuucuccgacgacaucgagcagcaggccgacaacaugaucaccgagaugcugcagaaggaguacauggagcggcaggggaagacgccccugggccucguggaccuguucguguucagcaccuccuucuaccugaucagcaucuuccugcaccucgucaagaucccgacccaccgccacaucguggggaaguccugccccaagccccaccggcugaaccacaugggcaucugcagcugcgggcuguacaagcagcccggcgugccggucaaguggaagcgcugaggacuaguaauaaggaaacuguaugaaugucugugggcaggaagugaagagauccuucuguaaagguuuuuggaauuaugucugcugaauaauaaacuuuuuugaaauaauaaaucugguagaaaaaugagaucuaaaaaaaaaaaaaaaaaaaaaaaaaaaaaaaaaaaaaaaaaaaaaaaaaaaaaaaaaaaaaaaaaaaaaaaaaaaaaaaaaaaaaaaaaaaaaaaaaaaa

SEQ ID NO: 36006 - RNA, 1785 nt, Artificial Sequence
  mRNA product Design b-4 (A100) comprising derived and/or modified sequence from LASV(LP;Clade I)__AAF86701__GPCmut9 (opt1)
aggagagucccgcagucggcguccagcggcucugcuuguucgugugugugucguugcaggccuuauucaagcuuaccaugggccagaucaucaccuucuuccaggaggugccccacgucaucgaggaggugaugaacaucgugcugaucgcccucagccugcuggccauccucaaggggcuguacaacaucgcgaccugcggcaucaucgggcuggucgccuuccucuuccugugcggcaaguccugcagccugacgcucaagggcggguacgagcugcagacccuggagcucaacauggagacccugaacaugaccaugccgcuguccugcacgaagaacagcucccaccacuacauccgcgugggcaacgagaccgggcucgagcugacccugaccaacacgagcaucaucaaccacaaguucugcaaccucuccgacgcccacaagaagaaccuguacgaccacgcccugaugagcaucaucuccaccuuccaccucagcauccccaacuucaaccaguacgaggccauguccugcgacuucaacggcgggaagaucagcgugcaguacaaccugucccacagcuacgcgggcgacgccgccgagcacugcgggaccgucgccaacggcgugcugcagaccuucaugcggauggcguggggcgggcgcuacaucgcccucgacuccggcugcgggaacugggacugcaucaugacgagcuaccaguaccugaucauccagaacaccaccugggaggaccacugccaguucucccggcccagccccaucggcuaccugggccuccugucccagcgcacccgggacaucuacaucagccgccggcugcucgggacguucaccuggacccugagcgacuccgagggcaacgagacccccgggggcuacugccugacgcgcuggaugcucaucgaggccgagcugaagugcuucgggaacaccgccguggccaagugcaacgagaagcacgacgaggaguucugcgacaugcugcggcuguucgacuucaacaagcaggcgauccgccggcugaaggccgaggcccagaugagcauccagcugaucaacaaggccgucaacgcccucaucaacgaccagcugaucaugaagaaccaccuccgcgacaucaugugcauccccuacugcaacuacuccaaguacugguaccucaaccacaccagcuccggccggaccagccugcccaagugcuggcugaucuccaacgggagcuaccucaacgagacgcaguucuccgacgacaucgagcagcaggcggacaacaugaucaccgagaugcugcagaaggaguacaucgagcgccagggcaagaccccgcuggggcucguggacaucuucaucuucagcaccuccuucuaccugaucagcaucuuccugcaccugaucaagaucccgacgcaccggcacaucgugggcaagcccugccccaagccccaccgccucaaccacaugggggucugcuccugcggccuguacaagcacccgggcgugcccaccaaguggaagcggugaggacuaguaauaaggaaacuguaugaaugucugugggcaggaagugaagagauccuucuguaaagguuuuuggaauuaugucugcugaauaauaaacuuuuuugaaauaauaaaucugguagaaaaaugagaucuaaaaaaaaaaaaaaaaaaaaaaaaaaaaaaaaaaaaaaaaaaaaaaaaaaaaaaaaaaaaaaaaaaaaaaaaaaaaaaaaaaaaaaaaaaaaaaaaaaaa

SEQ ID NO: 36007 - RNA, 1785 nt, Artificial Sequence
  mRNA product Design b-4 (A100) comprising derived and/or modified sequence from LASV(803213;Clade II)__AAF86703__GPCmut9 (opt1)
aggagagucccgcagucggcguccagcggcucugcuuguucgugugugugucguugcaggccuuauucaagcuuaccaugggccagaucaucaccuucuuccaggaggugccccacgucaucgaggaggugaugaacaucgugcugaucgcccucagccugcuggccauccucaaggggaucuacaacgucgcgaccugcggccuguucgggcugaucuccuuccuccugcugugcggccgcagcugcuccgugacguacaaggggguguacgagcuccagacccuggagcugaacauggccaaccucaacaugaccaugccgcugagcugcaccaagaacaacucccaccacuacaucauggucggcaacgagacgggccuggagcucacccugaccaacaccagcaucaucaaccacaaguucugcaaccuguccgacgcccacaagaagaaccucuacgaccacgcccugaugagcaucaucuccacguuccaccugagcauccccaacuucaaccaguacgaggccauguccugcgacuucaacgggggcaagaucagcgugcaguacaaccucucccacagcuucgcgguggacgccgccaaccacugcgggaccaucgccaacggcguccugcagaccuucaugcggauggcguggggcggguccuacaucgcccuggacagcggcugcgggaacugggacugcaucaugaccuccuaccaguaccucaucauccagaacacgaccugggaggaccacugccaguucagccgccccucccccaucggcuaccuggggcugcucagccagcggacccgcgacaucuacaucagccggcgccugcugggcaccuucacguggacccucuccgacagcgagggcaacgaggcccccgggggcuacugccugacccgguggaugcugaucgaggccgagcucaagugcuucgggaacaccgccguggcgaagugcaacgagaagcacgacgaggaguucugcgacaugcugcgccuguucgacuucaacaagcaggccaucaagcggcucaagacggaggcccagauguccauccagcugaucaacaaggccgugaacgcccugaucaacgaccagcucaucaugaagaaccaccuccgcgacaucaugugcauccccuacugcaacuacagccgguacugguaccugaaccacaccgucaccgggaagaccucccugccccgcugcuggcuggugagcaacggcuccuaccugaacgagacgcacuucagcgacgacaucgagcagcaggcggacaacaugaucaccgagaugcuccagaaggaguacauggaccggcagggcaagaccccgcuggggcugguggaccucuucgucuucuccaccagcuucuaccugaucuccaucuuccugcaccuggugaagaucccgacgcaccgccacaucgugggcaagcccugccccaagccccaccggcucaaccacauggggaucugcagcugcggccuguacaagcacccggggguccccgugaaguggaagcgcugaggacuaguaauaaggaaacuguaugaaugucugugggcaggaagugaagagauccuucuguaaagguuuuuggaauuaugucugcugaauaauaaacuuuuuugaaauaauaaaucugguagaaaaaugagaucuaaaaaaaaaaaaaaaaaaaaaaaaaaaaaaaaaaaaaaaaaaaaaaaaaaaaaaaaaaaaaaaaaaaaaaaaaaaaaaaaaaaaaaaaaaaaaaaaaaaa

SEQ ID NO: 36008 - RNA, 1785 nt, Artificial Sequence
  mRNA product Design b-4 (A100) comprising derived and/or modified sequence from LASV(GA391;Clade III)__CAA36645__GPCmut9 (opt1)
aggagagucccgcagucggcguccagcggcucugcuuguucgugugugugucguugcaggccuuauucaagcuuaccaugggccagaucgugaccuucuuccaggaggucccccacgugaucgaggaggugaugaacaucguccugaucgcccucagcauccuggccauccugaaggggcucuacaacguggcgaccugcggccugaucgggcuggugacguuccuccugcuguccggccgcagcugcucccucaucuacaaggggaccuacgagcugcagacccuggagcucaacauggagacccugaacaugacgaugccgcugagcugcaccaagaacaacucccaccacuacauccgggucggcaacgagaccggccucgagcugacccugacgaacaccagcauccucaaccacaaguucugcaaccuguccgacgcccacaagcgcaaccuguacgaccacagccucauguccaucaucagcaccuuccaccuguccauccccaacuucaaccaguacgaggccaugagcugcgacuucaacgggggcaagaucaccgugcaguacaaccugucccacagcuucgccguggacgccgcggggcacugcggcacgcucgccaacgggguccugcagaccuucaugcggauggccuggggcggcuccuacaucgcccuggacagcgggugcggcaacugggacugcaucaugaccuccuaccaguaccucaucauccagaacaccacgugggacgaccacugccaguucagccggcccucccccaucggguaccugggccugcucagccagcgcacccgggacaucuacaucagccgccggcugcugggcaccuucaccuggacgcucuccgacagcgaggggaacgagaccccgggcggguacugccugacccgcuggaugcugaucgaggcggagcucaagugcuucggcaacaccgccguggccaagugcaacgagaagcacgacgaggaguucugcgacaugcugcggcuguucgacuucaacaagcaggccauccgccggcucaagacggaggcccagauguccauccagcugaucaacaaggcggugaacgcccugaucaacgaccagcucaucaugaagaaccaccuccgcgacaucaugugcauccccuacugcaacuacagccgguacugguaccugaaccacaccuccaccggcaagaccagccugccccgcugcuggcugaucuccaacggcagcuaccugaacgagacgaaguucuccgacgacaucgagcagcaggccgacaacaugaucaccgagaugcuccagaaggaguacaucgaccggcaggggaagacgccccugggccuggucgaccuguucguguucagcaccuccuucuaccucaucagcaucuuccugcaccuggugaagaucccgacccaccgccacaucgucgggaagcccugccccaagccccaccggcucaaccacaugggcaucugcuccugcgggcuguacaagcagccgggcgugcccgugcgcuggaagcggugaggacuaguaauaaggaaacuguaugaaugucugugggcaggaagugaagagauccuucuguaaagguuuuuggaauuaugucugcugaauaauaaacuuuuuugaaauaauaaaucugguagaaaaaugagaucuaaaaaaaaaaaaaaaaaaaaaaaaaaaaaaaaaaaaaaaaaaaaaaaaaaaaaaaaaaaaaaaaaaaaaaaaaaaaaaaaaaaaaaaaaaaaaaaaaaaa

SEQ ID NO: 36009 - RNA, 1788 nt, Artificial Sequence
  mRNA product Design b-4 (A100) comprising derived and/or modified sequence from LASV(AV;Clade V)__CCA30314__GPCmut9 (opt1)
aggagagucccgcagucggcguccagcggcucugcuuguucgugugugugucguugcaggccuuauucaagcuuaccaugggccagaucgugaccuucuuccaggaggucccccacgugaucgaggaggugaugaacaucguccugaucgcccucagcauccuggccgugcugaaggggcucuacaacaucgcgaccugcggccugaucgggcugaucacguuccuccugcugugcggccgcuccugcagcuccaaccucuacaaggggguguacgagcugcagagccuggaccucaacauggagacccugaacaugaccaugccgcuguccugcaccaagaacaacagccaccacuacauccgggucggcaacgacacgggccucgagcugacccugaccaacaccuccauccucaaccacaaguucugcaaccugagcgacgcccacaagaaggaccuguacgaccacgcccucauguccaucaucagcacguuccaccuguccauccccaacuucaaccaguacgaggccaugagcugcgacuucaacgggggcaagaucuccgugcaguacaaccugagccacuccuacgccaucgacgcggccaaccacugcgggaccguggccaacggcauccuccagaccuucaugcgcauggccuggggcgggagcuacaucgcgcuggacuccggcugcgggaacugggacugcaucaugaccagcuaccaguaccugaucauccagaacacgaccugggagaaccacugccaguucucccgccccagccccaucggcuaccucgggcugcugagccagcggacccgcgacaucuacaucucccggcgccuccugggcaccuucacguggacccugagcgacuccgagggcaacgccacccccgggggcuacugccucacccgguggaugcugaucgaggccgagcugaagugcuucgggaacacggccgucgccaagugcaacgagaagcacgacgaggaguucugcgacaugcuccgccuguucgacuucaacaagcaggcgaucagccggcugaaguccgaggcccagaugagcauccagcucaucaacaaggccgugaacgcccugaucaacgaccagcugaucaugaagaaccaccuccgcgacaucaugugcauccccuacugcaacuacuccaaguacugguaccugaaccacaccaucaccgggaagaccagccugcccaagugcuggcucguguccaacggcagcuaccugaacgagacgcacuucuccgacgacaucgagcagcaggccgacaacaugaucaccgagaugcugcagaaggaguacauggagcggcagggcaagaccccgcucgggcuggucgaccuguucguguucagcaccuccuucuaccugaucagcaucuuccuccgccuggugaagaucccgacgcaccggcacaucgucggcaagcccugccccaagccccaccgccugaaccacauggggaucugcuccugcggccucuacaagcagccgggggugcccgugcgguggaagcgcugaggacuaguaauaaggaaacuguaugaaugucugugggcaggaagugaagagauccuucuguaaagguuuuuggaauuaugucugcugaauaauaaacuuuuuugaaauaauaaaucugguagaaaaaugagaucuaaaaaaaaaaaaaaaaaaaaaaaaaaaaaaaaaaaaaaaaaaaaaaaaaaaaaaaaaaaaaaaaaaaaaaaaaaaaaaaaaaaaaaaaaaaaaaaaaaaa

SEQ ID NO: 36010 - RNA, 1785 nt, Artificial Sequence
  mRNA product Design b-4 (A100) comprising derived and/or modified sequence from LASV(Togo/2016/7082;Clade VI)__AMR44577__GPCmut9 (opt1)
aggagagucccgcagucggcguccagcggcucugcuuguucgugugugugucguugcaggccuuauucaagcuuaccaugggccagaucaucaccuucuuccaggaggugccccacgucaucgaggaggugaugaacaucgugcugaucgcccucagccugcuggccauccucaagggggucuacaacguggcgaccugcggcaucaucgggcuggugacguuccuguuccucugcggccgcuccugcagccugaucuacaagggguccuacgagcugcagacccucgagcugaacauggagacccugaacaugaccaugccgcucagcugcacgaagaacuccagccaccacuacauccgggucggcaacgagaccggccuggagcugacccucaccaacacguccaucaucaaccacaaguucugcaaccugagcgacgcccacaagcgcaaccuguacgaccacgcccucauguccauccugagcaccuuccaccuguccauccccaacuucaaccaguacgaggccaugagcugcgacuucaacgggggcaagaucuccgugcaguacaaccucagccacgccuacgcgguggacgccgccgagcacugcgggaccgucgccaacggcgugcugcagaccuucaugcggauggcguggggcggguccuacaucgcccuggacagcggcugcgggaacugggacugcaucaugacguccuaccaguaccucaucauccagaacaccaccugggaggaccacugccaguucagccggcccucccccaucggcuaccuggggcugcucagccagcgcacccgggacaucuacaucagccgccggcugcugggcacguucaccuggacccucuccgacagcgagggcaacgagacccccgggggcuacugccugacgcgcuggaugcugaucgaggccgagcucaagugcuucgggaacaccgccguggccaagugcaacgagaagcacgacgaggaguucugcgacaugcugcggcuguucgacuucaacaagcaggcgauccagcgccucaaguccgaggcccagaugagcauccagcugaucaacaaggccgucaacgcccugaucaacgaccagcucaucaugaagaaccaccuccgggacaugaugugcauccccuacugcaacuacuccaaguacugguaccugaaccacaccagcuccgggcgcaccagccugcccaagugcuggcugguguccaacggcagcuaccugaacgagacgcacuucuccgacgacaucgagcagcaggccgacaacaugaucaccgagaugcuccagaaggaguacaucgaccggcagggcaagaccccgcuggggcugguggaccucuucgucuucagcaccuccuucuaccugaucagcaucuuccugcaccugaucaagaucccgacgcaccgccacaucgugggcaagcccugccccaagccccaccggcucaaccacauggggaucugcuccugcggccuguacaagcagccgggggugcccacccgcuggaagcggugaggacuaguaauaaggaaacuguaugaaugucugugggcaggaagugaagagauccuucuguaaagguuuuuggaauuaugucugcugaauaauaaacuuuuuugaaauaauaaaucugguagaaaaaugagaucuaaaaaaaaaaaaaaaaaaaaaaaaaaaaaaaaaaaaaaaaaaaaaaaaaaaaaaaaaaaaaaaaaaaaaaaaaaaaaaaaaaaaaaaaaaaaaaaaaaaa

SEQ ID NO: 36011 - RNA, 1785 nt, Artificial Sequence
  mRNA product Design b-4 (A100) comprising derived and/or modified sequence from LASV(KAK-428;Clade n.d. (VII))__ANH09740__GPCmut9 (opt1)
aggagagucccgcagucggcguccagcggcucugcuuguucgugugugugucguugcaggccuuauucaagcuuaccaugggccagaucgugaccuucuuccaggaggucccccacgugaucgaggaggugaugaacaucguccugaucgcccucagccugcuggccauccucaaggggcuguacaacuucgcgaccugcggcgugaucgggcugaucacguuccuccugcugugcggccgcuccugcagcgccaccuacaaggggcaguacgagcuccagacccuggagcugaacauggagucccucaacaugaccaugccgcugagcugcacgaagaacaacucccaccacuacauccgggccggcaacaacaccggccuggagcucacccugaccaacacgagcaucaucucccacaaguucugcaaccugagcgacgcccacaagaagaaccucuacgaccacacccugauguccaucaucaccaccuuccaccugagcauccccaacuucaaccaguacgaggccauguccugcgacuucaacgggggcaagaucagcauccaguacaaccucucccacagcuacgcgggggacgccgcccagcacugcggcacgguggccaacgggguccugcagaccuucaugcgcauggcguggggcggcuccuaccuggcccucgacagcgggugccgcggcugggacugcaucaucuccagcuaccaguaccugaucauccagaacaccaccugggacgaccacugccaguucucccggcccagccccaucggguaccugggcuucgugagccagaagacgcgcgacaucuacaucucccggcgccuccugggcaccuucaccuggacccugagcgacuccgaggggcacgacaugccgggcggguacugccucacgcgguggaugcugaucgaggccgaccugaagugcuucggcaacaccgccguggccaagugcaacgagaagcacgacgaggaguucugcgacauguggcgccucuucgacuucaacaagcaggcgauccagcggcugaaggccgaggcccagaugaacauccagcugaucaacaaggccgucaacgcccucaucaacgaccagcugaugaugaagaaccaccuccgcgacaucaugugcauccccuacugcaacuacagcaaguucugguaccugaacaacaccaccacgggccggaccucccugccccgcugcuggcugaucagcaacggcuccuaccucaacgagacccacuucagcgacgacaucgagcagcaggcggacaacaugaucaccgagaugcugcagaaggaguacauggaccggcaggggaagacgccccugggccucguggaccuguucguguucuccaccagcuucuaccugaucaccaucuuccuccaccuggucaagaucccgacccaccgccacaucguggggaagcccugccccaagccccaccggcugaaccacaugggcaucugcuccugcgggcuguacaagcagccgggcgugcccguccgcuggaagcggugaggacuaguaauaaggaaacuguaugaaugucugugggcaggaagugaagagauccuucuguaaagguuuuuggaauuaugucugcugaauaauaaacuuuuuugaaauaauaaaucugguagaaaaaugagaucuaaaaaaaaaaaaaaaaaaaaaaaaaaaaaaaaaaaaaaaaaaaaaaaaaaaaaaaaaaaaaaaaaaaaaaaaaaaaaaaaaaaaaaaaaaaaaaaaaaaa

SEQ ID NO: 36012 - RNA, 1785 nt, Artificial Sequence; identical to SEQ ID NO: 36006
  mRNA product Design b-4 (A100) comprising derived and/or modified sequence from LASV(Pinneo-NIG-1969;Clade I)__AIT17836__GPCmut9 (opt1)

SEQ ID NO: 36013 - RNA, 1785 nt, Artificial Sequence
  mRNA product Design b-4 (A100) comprising derived and/or modified sequence from LASV(ISTH0009-NIG-2011;Clade II)__AIT17404__GPCmut9 (opt1)
aggagagucccgcagucggcguccagcggcucugcuuguucgugugugugucguugcaggccuuauucaagcuuaccaugggccagaucaucaccuucuuccaggaggugccccacgucaucgaggaggugaugaacaucgugcugaucgcccucagccugcuggccauccucaaggggaucuacaacgucgcgaccugcggccuguucgggcugguguccuuccuccugcugugcggccgcagcugcuccacgaccuacaaggggguguacgagcuccagacccuggagcuggacauggccagccucaacaugaccaugccgcuguccugcacgaagaacaacagccaccacuacaucauggucggcaacgagaccggccuggagcucacccugaccaacacguccaucaucaaccacaaguucugcaaccugagcgacgcccacaagaagaaccucuacgaccacgcccugauguccaucaucagcaccuuccaccuguccauccccaacuucaaccaguacgaggccaugagcugcgacuucaacgggggcaagaucuccgugcaguacaaccucagccacgcguacgccguggacgccgccaaccacugcgggaccaucgcgaacggcguccugcagaccuucaugcggauggccuggggcggguccuacaucgcccuggacagcggcugcggguccugggacugcaucaugacgagcuaccaguaccucaucauccagaacaccaccugggaggaccacugccaguucucccgccccagccccaucggcuaccuggggcugcucagccagcggacccgcgacaucuacaucucccggcgccugcugggcacguucaccuggacccucagcgacuccgagggcaacgagacccccgggggcuacugccugacgcgguggaugcugaucgaggccgagcucaagugcuucgggaacaccgccguggcgaagugcaacgagaagcacgacgaggaguucugcgacaugcugcgccuguucgacuucaacaagcaggccauccggcgccucaagaccgaggcccagaugagcauccagcugaucaacaaggccgugaacgcccugaucaacgaccagcucaucaugaagaaccaccuccgggacaucaugugcaucccguacugcaacuacuccaaguacugguaccugaaccacaccgucacggggaagaccagccugccccgcugcuggcugguguccaacggcagcuaccugaacgagacccacuucuccgacgacaucgagcagcaggcggacaacaugaucaccgagcuccugcagaaggaguacauggaccggcagggcaagacgccccuggggcucguggaccuguucgucuucagcaccuccuucuaccugaucagcaucuuccugcaccucaucaagaucccgacccaccgccacaucaccggcaagcccugccccaagccccaccggcugaaccacauggggaucugcuccugcggccuguacaagcacccgggggugcccgugaaguggaagcgcugaggacuaguaauaaggaaacuguaugaaugucugugggcaggaagugaagagauccuucuguaaagguuuuuggaauuaugucugcugaauaauaaacuuuuuugaaauaauaaaucugguagaaaaaugagaucuaaaaaaaaaaaaaaaaaaaaaaaaaaaaaaaaaaaaaaaaaaaaaaaaaaaaaaaaaaaaaaaaaaaaaaaaaaaaaaaaaaaaaaaaaaaaaaaaaaaa

SEQ ID NO: 36014 - RNA, 1785 nt, Artificial Sequence
  mRNA product Design b-4 (A100) comprising derived and/or modified sequence from LASV(ISTH2010-NIG-2012;Clade II)__AIT17482__GPCmut9 (opt1)
aggagagucccgcagucggcguccagcggcucugcuuguucgugugugugucguugcaggccuuauucaagcuuaccaugggccagaucaucaccuucuuccaggaggugccccacgucaucgaggaggugaugaacaucgugcugaucgcccucagccugcuggccauccucaaggggaucuacaacgucgcgaccugcggccuguucgggcugguguccuuccuccugcugugcggccgcagcugcuccacgaccuacaaggggguguacgagcuccagacccuggagcuggacauggccagccucaacaugaccaugccgcuguccugcacgaagaacaacagccaccacuacaucauggucggcaacgagaccggccuggagcucacccugaccaacacguccaucaucaaccacaaguucugcaaccugagcgacgcccacaagaagaaccucuacgaccacgcccugauguccaucaucagcaccuuccaccuguccauccccaacuucaaccaguacgaggccaugagcugcgacuucaacgggggcaagaucuccgugcaguacaaccucagccacgcguacgccguggacgccgccaaccacugcgggaccaucgcgaacggcguccugcagaccuucaugcggauggccuggggcggguccuacaucgcccuggacagcggcugcggguccugggacugcaucaugacgagcuaccaguaccucaucauccagaacaucaccugggaggaccacugccaguucucccgccccagccccaucggcuaccuggggcugcucagccagcggacccgcgacaucuacaucucccggcgccugcugggcaccuucacguggacccucagcgacuccgagggcaacgagacccccgggggcuacugccugacccgguggaugcugaucgaggccgagcucaagugcuucgggaacacggccguggcgaagugcaacgagaagcacgacgaggaguucugcgacaugcugcgccuguucgacuucaacaagcaggccauccggcgccucaagaccgaggcccagaugagcauccagcugaucaacaaggccgugaacgcccugaucaacgaccagcucaucaugaagaaccaccuccgggacaucaugugcauccccuacugcaacuacuccaaguacugguaccugaaccacaccgucaccgggaagacgagccugccccgcugcuggcugguguccaacggcagcuaccugaacgagacccacuucuccgacgacaucgagcagcaggcggacaacaugaucaccgagcuccugcagaaggaguacaucgaccggcagggcaagaccccgcuggggcucguggaccuguucgucuucagcacguccuucuaccugaucagcaucuuccugcaccucgugaagaucccgacccaccgccacguggucggcaagcccugccccaagccccaccggcugaaccacauggggaucugcuccugcggccuguacaagcacccgggggugcccgugaaguggaagcgcugaggacuaguaauaaggaaacuguaugaaugucugugggcaggaagugaagagauccuucuguaaagguuuuuggaauuaugucugcugaauaauaaacuuuuuugaaauaauaaaucugguagaaaaaugagaucuaaaaaaaaaaaaaaaaaaaaaaaaaaaaaaaaaaaaaaaaaaaaaaaaaaaaaaaaaaaaaaaaaaaaaaaaaaaaaaaaaaaaaaaaaaaaaaaaaaaa

SEQ ID NO: 36015 - RNA, 1785 nt, Artificial Sequence
  mRNA product Design b-4 (A100) comprising derived and/or modified sequence from LASV(Lassa virus/H.sapiens-wt/NGA/2015/ISTH_0543;Clade II)__AVO03639__GPCmut9 (opt1)
aggagagucccgcagucggcguccagcggcucugcuuguucgugugugugucguugcaggccuuauucaagcuuaccaugggccagaucaucaccuucuuccaggaggugccccacgucaucgaggaggugaugaacaucgugcugaucgcccucagccugcuggccauccucaaggggaucuacaacgucgcgaccugcggccuguucgggcugguguccuuccuccugcugugcggccgcagcugcuccacgaccuacaaggggguguacgagcuccagacccuggagcuggacauggccaaccucaacaugaccaugccgcugagcugcacgaagaacaacucccaccacuacaucauggucggcaacgagaccggccuggagcucacccugaccaacacgagcaucaucaaccacaaguucugcaaccuguccgacgcccacaagaagaaccucuacgaccacgcccugaugagcaucaucuccaccuuccaccugagcauccccaacuucaaccaguacgaggccauguccugcgacuucaacgggggcaagaucagcgugcaguacaaccucucccacaccuacgcgguggacgccgccaaccacugcgggaccaucgccaacggcguccugcagacguucaugcggauggcguggggcgggagcuacaucgcccuggacuccggcugcgggagcugggacugcaucaugaccuccuaccaguaccucgugauccagaacaccaccugggaggaccacugccaguucagccgccccucccccaucggcuaccuggggcugcucagccagcggacgcgcgacaucuacaucagccggcgccugcugggcaccuucaccuggacccucuccgacagcgagggcaacgagacgcccgggggcuacugccugacccgguggaugcugaucgaggccgagcucaagugcuucgggaacaccgccguggccaagugcaacgagaagcacgacgaggaguucugcgacaugcugcgccuguucgacuucaacaagcaggcgauccggcgccucaagaccgaggcccagauguccauccagcugaucaacaaggccgucaacgcccugaucaacgaccagcucaucaugaagaaccaccuccgggacaucaugugcauccccuacugcaacuacagcaaguacugguaccugaaccacacggugaccgggaagaccucccugccccgcugcuggcuggugagcaacggcuccuaccugaacgagacccacuucagcgacgacaucgagcagcaggccgacaacaugaucacggagcuccugcagaaggaguacaucgaccggcagggcaagaccccgcuggggcucgucgaccuguucguguucuccaccagcuucuaccugaucuccaucuuccugcaccucgugaagaucccgacccaccgccacaucacgggcaagcccugccccaagccccaccggcugaaccacauggggaucugcagcugcggccuguacaagcacccggggguccccgugaaguggaagcgcugaggacuaguaauaaggaaacuguaugaaugucugugggcaggaagugaagagauccuucuguaaagguuuuuggaauuaugucugcugaauaauaaacuuuuuugaaauaauaaaucugguagaaaaaugagaucuaaaaaaaaaaaaaaaaaaaaaaaaaaaaaaaaaaaaaaaaaaaaaaaaaaaaaaaaaaaaaaaaaaaaaaaaaaaaaaaaaaaaaaaaaaaaaaaaaaaa

SEQ ID NO: 36016 - RNA, 1785 nt, Artificial Sequence
  mRNA product Design b-4 (A100) comprising derived and/or modified sequence from LASV(Lassa virus/H.sapiens-wt/NGA/2016/ISTH_0009;Clade II)__AVO03571__GPCmut9 (opt1)
aggagagucccgcagucggcguccagcggcucugcuuguucgugugugugucguugcaggccuuauucaagcuuaccaugggccagaucaucaccuucuuccaggaggugccccacgucaucgaggaggugaugaacaucgugcugaucgcccucagccugcuggccauccucaaggggaucuacaacgucgcgaccugcggccugcuggggcucguguccuuccugcugcucugcggccgcagcugcuccacgaccuacaaggggguguacgagcugcagacccuggagcucgacauggccagccugaacaugaccaugccgcuguccugcacgaagaacaacagccaccacuacaucauggucggcaacgagaccggccucgagcugacccugaccaacacguccaucaucaaccacaaguucugcaaccucagcgacgcccacaagaagaaccuguacgaccacgcccugauguccaucaucagcaccuuccaccucuccauccccaacuucaaccaguacgaggccaugagcugcgacuucaacgggggccggaucuccgugcaguacaaccugagccacuccuacgcgguggacgccgccaaccacugcgggaccaucgccaacggcguccugcagaccuucaugcgcauggcguggggcgggagcuacaucgcccucgacuccggcugcgggagcugggacugcaucaugacguccuaccaguaccugaucauccagaacaccaccugggaggaccacugccaguucagccggcccagccccaucggcuaccuggggcuccugucccagcgcacccgggacaucuacaucagccgccggcugcucggcacguucaccuggacccuguccgacagcgagggcaacgagacccccgggggcuacugccugacgcgcuggaugcucaucgaggccgagcugaagugcuucgggaacaccgccguggccaagugcaacgagaagcacgacgaggaguucugcgacaugcugcggcuguucgacuucaacaagcaggcgauccgccggcugaagaccgaggcccagauguccauccagcugaucaacaaggccgugaacgcccucaucaacgaccagcugaucaugaagaaccaccuccgcgacaucaugugcaucccguacugcaacuacagcaaguacugguaccucaaccacaccgucacggggaagaccucccugccccggugcuggcuggugagcaacggcuccuaccucaacgagacccacuucagcgacgacaucgagcagcaggccgacaacaugaucaccgagcugcugcagaaggaguacaucgaccgccagggcaagacgccccucgggcugguggaccuguucgucuucuccaccagcuucuaccugaucuccaucuuccuccaccuggugaagaucccgacccaccggcacaucaccggcaagcccugccccaagccccaccgccugaaccacauggggaucugcagcugcggccucuacaaccacccgggggugcccgucaaguggaagcggugaggacuaguaauaaggaaacuguaugaaugucugugggcaggaagugaagagauccuucuguaaagguuuuuggaauuaugucugcugaauaauaaacuuuuuugaaauaauaaaucugguagaaaaaugagaucuaaaaaaaaaaaaaaaaaaaaaaaaaaaaaaaaaaaaaaaaaaaaaaaaaaaaaaaaaaaaaaaaaaaaaaaaaaaaaaaaaaaaaaaaaaaaaaaaaaaa

SEQ ID NO: 36017 - RNA, 1785 nt, Artificial Sequence
  mRNA product Design b-4 (A100) comprising derived and/or modified sequence from LASV(Lassa virus/H.sapiens-wt/NGA/2016/ISTH_0017;Clade II)__AVO03567__GPCmut9 (opt1)
aggagagucccgcagucggcguccagcggcucugcuuguucgugugugugucguugcaggccuuauucaagcuuaccaugggccagaucaucaccuucuuccaggaggugccccacgucaucgaggaggugaugaacaucgugcugaucgcccucagccugcuggccauccucaaggggaucuacaacgucgcgaccugcggccuguucgggcugguguccuuccuccugcugugcggccgcagcugcuccacgaccuacaaggggguguacgagcuccagacccuggagcuggacauggccagccucaacaugaccaugccgcuguccugcacgaagaacaacagccaccacuacaucauggucggcaacgagaccggccuggagcucacccugaccaacacguccaucaucaaccacaaguucugcaaccugagcgacgcccacaagaagaaccucuacgaccacgcccugauguccaucaucagcaccuuccaccuguccauccccaacuucaaccaguacgaggccaugagcugcgacuucaacgggggcaagaucuccgugcaguacaaccucagccacaccuacgcgaucgacgccgccaaccacugcgggaccaucgccaacggcgugcugcagacguucaugcggauggcguggggcggguccuacaucgcccuggacagcggcugcggguccugggacugcaucaugaccagcuaccaguaccucaucauccagaacaccaccugggaggaccacugccaguucucccgccccagccccaucggcuaccuggggcugcucagccagcggacgcgcgacaucuacaucucccggcgccugcugggcaccuucaccuggacccucagcgacuccgagggcaacgagacgcccgggggcuacugccugacccgguggaugcugaucgaggccgagcucaagugcuucgggaacaccgccgucgccaagugcaacgagaagcacgacgaggaguucugcgacaugcugcgccuguucgacuucaacaagcaggcgauccggcgccucaagaccgaggcccagaugagcauccagcugaucaacaaggccgugaacgcccugaucaacgaccagcucaucaugaagaaccaccuccgggacaucaugugcauccccuacugcaacuacuccaaguacugguaccugaaccacacggugaccgggaagaccagccugccccgcugcuggcuggucuccaacggcagcuaccugaacgagacccacuucuccgacgacaucgagcagcaggccgacaacaugaucacggagcuccugcagaaggaguacauggaccggcagggcaagaccccgcuggggcucguggaccuguucguguucagcaccuccuucuaccugaucagcaucuuccugcaccucguccgcaucccgacccaccggcacgugaucggcaagcccugccccaagccccaccgccugaaccacauggggaucugcuccugcggccuguacaagcacccgggggugcccgucaaguggaagcggugaggacuaguaauaaggaaacuguaugaaugucugugggcaggaagugaagagauccuucuguaaagguuuuuggaauuaugucugcugaauaauaaacuuuuuugaaauaauaaaucugguagaaaaaugagaucuaaaaaaaaaaaaaaaaaaaaaaaaaaaaaaaaaaaaaaaaaaaaaaaaaaaaaaaaaaaaaaaaaaaaaaaaaaaaaaaaaaaaaaaaaaaaaaaaaaaa

SEQ ID NO: 36018 - RNA, 1785 nt, Artificial Sequence
  mRNA product Design b-4 (A100) comprising derived and/or modified sequence from LASV(Lassa virus/H.sapiens-wt/NGA/2018/ISTH_0959;Clade II)__AVV65099__GPCmut9 (opt1)
aggagagucccgcagucggcguccagcggcucugcuuguucgugugugugucguugcaggccuuauucaagcuuaccaugggccagaucaucaccuucuuccaggaggugccccacgucaucgaggaggugaugaacaucgugcugaucgcccucagccugcuggccauccucaaggggaucuacaacgucgugaccugcggccuguucgggcugguguccuuccuccugcugugcggccgcagcugcuccacgaccuacaagggggucuacgagcuccagacccuggagcuggacauggcgagccucaacaugaccaugccgcuguccugcacgaagaacaacagccaccacuacaucauggugggcaacgagaccggccuggagcucacccugaccaacacguccaucaucaaccacaaguucugcaaccugagcgacgcccacaagaagaaccucuacgaccacgcccugauguccaucaucagcaccuuccaccuguccauccccaacuucaaccaguacgaggccaugagcugcgacuucaacgggggcaagaucuccgugcaguacaaccucagccacgccuacgcgaucgacgccgccaaccacugcgggaccaucgccaacggcguccugcagaccuucaugcggauggcguggggcggguccuacaucgcccuggacagcggcugcggguccugggacugcaucaugacgagcuaccaguaccucaucauccagaacaccaccugggaggaccacugccaguucucccgccccagccccaucggcuaccuggggcugcucagccagcggacccgcgacaucuacaucucccggcgccugcugggcacguucaccuggacccucagcgacuccgagggcaacgagacccccgggggcuacugccugacgcgguggaugcugaucgaggccgagcucaagugcuucgggaacaccgccguggccaagugcaacgagaagcacgacgaggaguucugcgacaugcugcgccuguucgacuucaacaagcaggcgauccggcgccucaagaccgaggcccagaugagcauccagcugaucaacaaggccgugaacgcccugaucaacgaccagcucaucaugaagaaccaccuccgggacaucaugugcaucccguacugcaacuacuccaaguacugguaccugaaccacaccgucacggggaagaccagccugccccgcugcuggcugguguccaacggcagcuaccugaacgagacccacuucuccgacgacaucgagcagcaggccgacaacaugaucaccgagcuccugcagaaggaguacaucgaccggcagggcaagacgccccuggggcucguggaccuguucgucuucagcaccuccuucuaccugaucagcaucuuccugcaccucgugaagaucccgacccaccgccacgugaucggcaagcccugccccaagccccaccggcugaaccacauggggaucugcuccugcggccuguacaagcacccggggguccccgugaaguggaagcgcugaggacuaguaauaaggaaacuguaugaaugucugugggcaggaagugaagagauccuucuguaaagguuuuuggaauuaugucugcugaauaauaaacuuuuuugaaauaauaaaucugguagaaaaaugagaucuaaaaaaaaaaaaaaaaaaaaaaaaaaaaaaaaaaaaaaaaaaaaaaaaaaaaaaaaaaaaaaaaaaaaaaaaaaaaaaaaaaaaaaaaaaaaaaaaaaaa

SEQ ID NO: 36019 - RNA, 1785 nt, Artificial Sequence
  mRNA product Design b-4 (A100) comprising derived and/or modified sequence from LASV(LASV003-NIG-2008;Clade II)__AIT17580__GPCmut9 (opt1)
aggagagucccgcagucggcguccagcggcucugcuuguucgugugugugucguugcaggccuuauucaagcuuaccaugggccagaucaucaccuucuuccaggaggugccccacgucaucgaggaggugaugaacaucgugcugaucgcccucagccugcuggccauccucaaggggaucuacaacgucgcgaccugcggccuguucgggcugguguccuuccuccugcugugcggccgcagcugcuccacgaccuacaaggggguguacgagcuccagacccuggagcuggacauggccagccucaacaugaccaugccgcuguccugcacgaagaacaacagccaccacuacaucauggucggcaacgagaccggccuggagcucacccugaccaacacguccaucaucaaccacaaguucugcaaccugagcgacgcccacaagaagaaccucuacgaccacgcccugauguccaucaucagcaccuuccaccuguccauccccaacuucaaccaguacgaggccaugagcugcgacuucaacgggggcaagaucuccgugcaguacaaccucagccacaccuacgcgguggacgccgccaaccacugcgggaccaucgccaacggcguccugcagacguucaugcggauggcguggggcggguccuacaucgcccuggacagcggcugcggguccugggacugcaucaugaccagcuaccaguaccucaucauccagaacaccaccugggaggaccacugccaguucucccgccccagccccaucggcuaccuggggcugcucagccagcggacgcgcgacaucuacaucucccggcgccugcugggcaccuucaccuggacccucagcgacuccgagagcaacgagacgccgggcggguacugccugacccgguggaugcugaucgaggccgagcucaagugcuucggcaacaccgccguggccaagugcaacgagaagcacgacgaggaguucugcgacaugcugcgccuguucgacuucaacaagcaggcgauccggcgccucaaggccgaggcccagauguccauccagcugaucaacaaggccgugaacgcccugaucaacgaccagcucaucaugaagaaccaccuccgggacaucaugugcauccccuacugcaacuacagcaaguacugguaccugaaccacaccgucacgggccgcaccucccugccccggugcuggcuggugagcaacggguccuaccugaacgagacccacuucagcgacgacaucgagcagcaggcggacaacaugaucaccgagcuccugcagaaggaguacauggaccgccagggcaagacgccccugggccucguggaccuguucgucuucuccaccagcuucuaccugaucuccaucuuccugcaccucgugaagaucccgacccaccggcacgugaucgggaagcccugccccaagccccaccgccugaaccacaugggcaucugcagcugcgggcuguacaagcacccgggcguccccgugaaguggaagcggugaggacuaguaauaaggaaacuguaugaaugucugugggcaggaagugaagagauccuucuguaaagguuuuuggaauuaugucugcugaauaauaaacuuuuuugaaauaauaaaucugguagaaaaaugagaucuaaaaaaaaaaaaaaaaaaaaaaaaaaaaaaaaaaaaaaaaaaaaaaaaaaaaaaaaaaaaaaaaaaaaaaaaaaaaaaaaaaaaaaaaaaaaaaaaaaaa

SEQ ID NO: 36020 - RNA, 1785 nt, Artificial Sequence
  mRNA product Design b-4 (A100) comprising derived and/or modified sequence from LASV(LASV035-NIG-2009;Clade II)__AIT17588__GPCmut9 (opt1)
aggagagucccgcagucggcguccagcggcucugcuuguucgugugugugucguugcaggccuuauucaagcuuaccaugggccagaucaucaccuucuuccaggaggugccccacgucaucgaggaggugaugaacaucgugcugaucgcccucagccugcuggccauccucaaggggaucuacaacgucgcgaccugcggccuguucgggcugguguccuuccuccugcugugcggccgcagcugcuccacgaccuacaaggggguguacgagcuccagacccuggagcuggacauggccagccucaacaugaccaugccgcuguccugcacgaagaacaacagccaccacuacaucauggucggcaacgagaccggccuggagcucacccugaccaacacguccaucaucaaccacaaguucugcaaccugagcgacgcccacaagaagaaccucuacgaccacgcccugauguccaucaucagcaccuuccaccuguccauccccaacuucaaccaguacgaggccaugagcugcgacuucaacgggggcaagaucuccgugcaguacaaccucagccacgcguacgccguggacgccgccaaccacugcgggaccaucgcgaacggcguccugcagaccuucaugcggauggccuggggcggguccuacaucgcccuggacagcggcugcggguccugggacugcaucaugacgagcuaccaguaccucaucauccagaacaccaccugggaggaccacugccaguucucccgccccagccccaucggcuaccuggggcugcucagccagcggacccgcgacaucuacaucucccggcgccugcugggcacguucaccuggacccucagcgacuccgagggcaacgagacccccgggggcuacugccugacgcgguggaugcugaucgaggccgagcucaagugcuucgggaacaccgccguggcgaagugcaacgagaagcacgacgaggaguucugcgacaugcugcgccuguucgacuucaacaagcaggccauccggcgccucaaggccgaggcccagaugagcauccagcugaucaacaaggccgugaacgcgcugaucaacgaccagcucaucaugaagaaccaccuccgggacaucaugugcauccccuacugcaacuacuccaaguacugguaccugaaccacaccgucaccgggaagacgagccugccccgcugcuggcugguguccaacggcagcuaccugaacgagacccacuucuccgacgacaucgagcagcaggccgacaacaugaucaccgagcuccugcagaaggaguacaucgaccggcagggcaagaccccgcuggggcucguggaccuguucgucuucagcacguccuucuaccugaucagcaucuuccugcaccucgugaagaucccgacccaccgccacgugaucggcaagcccugccccaagccccaccggcugaaccacauggggaucugcuccugcggccuguacaagcacccggggguccccgugaaguggaagcgcugaggacuaguaauaaggaaacuguaugaaugucugugggcaggaagugaagagauccuucuguaaagguuuuuggaauuaugucugcugaauaauaaacuuuuuugaaauaauaaaucugguagaaaaaugagaucuaaaaaaaaaaaaaaaaaaaaaaaaaaaaaaaaaaaaaaaaaaaaaaaaaaaaaaaaaaaaaaaaaaaaaaaaaaaaaaaaaaaaaaaaaaaaaaaaaaaa

SEQ ID NO: 36021 - RNA, 1785 nt, Artificial Sequence
  mRNA product Design b-4 (A100) comprising derived and/or modified sequence from LASV(LASV1000-NIG-2009;Clade II)__AIT17782__GPCmut9 (opt1)
aggagagucccgcagucggcguccagcggcucugcuuguucgugugugugucguugcaggccuuauucaagcuuaccaugggccagaucaucaccuucuuccaggaggugccccacgucaucgaggaggugaugaacaucgugcugaucgcccucagccugcuggccauccucaaggggaucuacaacgucgcgaccugcggccuguucgggcugguguccuuccuccugcugugcggccgcagcugcuccacgaccuacaaggggguguacgagcuccagacccuggagcuggacauggccagccucaacaugaccaugccgcuguccugcacgaagaacaacagccaccacuacaucauggucggcaacgagaccggccuggagcucacccugaccaacacguccaucaucaaccacaaguucugcaaccugagcgacgcccacaagaagaaccucuacgaccacgcccugauguccaucaucagcaccuuccaccuguccauccccaacuucaaccaguacgaggccaugagcugcgacuucaacgggggcaagaucuccgugcaguacaaccucagccacaccuacgcgguggacgccgccaaccacugcgggaccaucgccaacggcguccugcagacguucaugcggauggcguggggcggguccuacaucgcccuggacagcggcugcggguccugggacugcaucaugaccagcuaccaguaccucaucauccagaacaccaccugggaggaccacugccaguucucccgccccagccccaucggcuaccuggggcugcucagccagcggacgcgcgacaucuacaucucccggcgccugcugggcaccuucaccuggacccucagcgacuccgagggcaacgagacgcccgggggcuacugccugacccgguggaugcugaucgaggccgagcucaagugcuucgggaacaccgccguggccaagugcaacgagaagcacgacgaggaguucugcgacaugcugcgccuguucgacuucaacaagcaggcgaucaagcggcucaagaccgaggcccagaugagcauccagcugaucaacaaggccgugaacgcccugaucaacgaccagcucaucaugaagaaccaccuccgcgacaucaugugcauccccuacugcaacuacuccaaguacugguaccugaaccacacggucaccgggaagaccagccugccccggugcuggcugguguccaacggcagcuaccugaacgagacccacuucuccgacgacaucgagcagcaggccgacaacaugaucacggagcuccugcagaaggaguacaucgaccgccagggcaagaccccgcuggggcucguggaccuguucgucuucagcaccuccuucuaccugaucagcaucuuccugcaccucgugaagaucccgacccaccggcacguggucggcaagcccugccccaagccccaccgccugaaccacauggggaucugcuccugcggccuguacaagcacccgggggugcccgugaaguggaagcggugaggacuaguaauaaggaaacuguaugaaugucugugggcaggaagugaagagauccuucuguaaagguuuuuggaauuaugucugcugaauaauaaacuuuuuugaaauaauaaaucugguagaaaaaugagaucuaaaaaaaaaaaaaaaaaaaaaaaaaaaaaaaaaaaaaaaaaaaaaaaaaaaaaaaaaaaaaaaaaaaaaaaaaaaaaaaaaaaaaaaaaaaaaaaaaaaa

SEQ ID NO: 36022 - RNA, 1785 nt, Artificial Sequence
  mRNA product Design b-4 (A100) comprising derived and/or modified sequence from LASV(LASV221-NIG-2010;Clade II)__AIT17624__GPCmut9 (opt1)
aggagagucccgcagucggcguccagcggcucugcuuguucgugugugugucguugcaggccuuauucaagcuuaccaugggccagaucaucaccuucuuccaggaggugccccacgucaucgaggaggugaugaacaucgugcugaucgcccucagccugcuggccauccucaaggggaucuacaacgucgcgaccugcggccuguucgggcugguguccuuccuccugcugugcggccgcagcugcuccacgaccuacaaggggguguacgagcuccagacccuggagcuggacauggccagccucaacaugaccaugccgcuguccugcacgaagaacaacagccaccacuacaucauggucggcaacgagaccggccuggagcucacccugaccaacacguccaucaucaaccacaaguucugcaaccugagcgacgcccacaagaagaaccucuacgaccacgcccugauguccaucaucagcaccuuccaccuguccauccccaacuucaaccaguacgaggccaugagcugcgacuucaacgggggcaagaucuccgugcaguacaaccucagccacaccuacgcgaucgacgccgccaaccacugcgggaccaucgccaacggcgugcugcagacguucaugcggauggcguggggcggguccuacaucgcccuggacagcggcugcggguccugggacugcaucaugaccagcuaccaguaccucaucauccagaacaccaccugggaggaccacugccaguucucccgccccagccccaucggcuaccuggggcugcucagccagcggacgcgcgacaucuacaucucccggcgccugcugggcaccuucaccuggacccucagcgacuccgagggcaacgagacgcccgggggcuacugccugacccgguggaugcugaucgaggccgagcucaagugcuucgggaacaccgccgucgccaagugcaacgagaagcacgacgaggaguucugcgacaugcugcgccuguucgacuucaacaagcaggcgauccggcgccucaagaccgaggcccagaugagcauccagcugaucaacaaggccgugaacgcccugaucaacgaccagcucaucaugaagaaccaccuccgggacaucaugugcauccccuacugcaacuacuccaaguacugguaccugaaccacacggugaccgggaagaccagccugccccgcugcuggcuggucuccaacggcagcuaccugaacgagacccacuucuccgacgacaucgagcagcaggccgacaacaugaucacggagaugcuccagaaggaguacauggaccggcagggcaagaccccgcuggggcugguggaccucuucguguucagcaccuccuucuaccugaucagcaucuuccugcaccuggucaagaucccgacccaccgccacgugaucggcaagcccugccccaagccccaccggcucaaccacauggggaucugcuccugcggccuguacaagcacccgggggugcccgucaaguggaagcgcugaggacuaguaauaaggaaacuguaugaaugucugugggcaggaagugaagagauccuucuguaaagguuuuuggaauuaugucugcugaauaauaaacuuuuuugaaauaauaaaucugguagaaaaaugagaucuaaaaaaaaaaaaaaaaaaaaaaaaaaaaaaaaaaaaaaaaaaaaaaaaaaaaaaaaaaaaaaaaaaaaaaaaaaaaaaaaaaaaaaaaaaaaaaaaaaaa

SEQ ID NO: 36023 - RNA, 1785 nt, Artificial Sequence
  mRNA product Design b-4 (A100) comprising derived and/or modified sequence from LASV(LASV237-NIG-2010;Clade II)__AIT17638__GPCmut9 (opt1)
aggagagucccgcagucggcguccagcggcucugcuuguucgugugugugucguugcaggccuuauucaagcuuaccaugggccagaucaucaccuucuuccaggaggugccccacgucaucgaggaggugaugaacaucgugcugaucgcccucagccugcuggccauccucaaggggaucuacaacgucgcgaccugcggccuguucgggcugguguccuuccuccugcugugcggccgcagcugcuccacgaccuacaaggggguguacgagcuccagacccuggagcuggacauggccagccucaacaugaccaugccgcuguccugcacgaagaacaacagccaccacuacaucauggucggcaacgagaccggccuggagcucacccugaccaacacguccaucaucaaccacaaguucugcaaccugagcgacgcccacaagaaggaccucuacgaccacgcccugauguccaucaucagcaccuuccaccuguccauccccaacuucaaccaguacgaggccaugagcugcgacuucaacgggggcaagaucuccgugcaguacaaccucagccacaccuacgcgguggacgccgccaaccacugcgggaccaucgccaacggcguccugcagacguucaugcggauggcguggggcggguccuacaucgcccuggacagcggcugcggguccugggacugcaucaugaccagcuaccaguaccucaucauccagaacaccaccugggaggaccacugccaguucucccgccccagccccaucggcuaccuggggcugcucagccagcggacgcgcgacaucuacaucucccggcgccugcugggcaccuucaccuggacccucagcgacuccgagggcaacgagacgcccgggggcuacugccugacccgguggaugcugaucgaggccgagcucaagugcuucgggaacaccgccguggccaagugcaacgagaagcacgacgaggaguucugcgacaugcugcgccuguucgacuucaacaagcaggcgauccggcgccucaagaccgaggcccagaugagcauccagcugaucaacaaggccgugaacgcccugaucaacgaccagcucaucaugaagaaccaccuccgggacaucaugugcauccccuacugcaacuacuccaaguacugguaccugaaccacacggucaccgggaagaccagccugccccgcugcuggcugguguccaacggcagcuaccugaacgagacccacuucuccgacgacaucgagcagcaggccgacaacaugaucacggagcuccugcagaaggaguacauggaccggcagggcaagaccccgcuggggcucguggaccuguucgucuucagcaccuccuucuaccugaucagcaucuuccugcaccucaucaagaucccgacccaccgccacaucacgggcaagcccugccccaagccccaccggcugaaccacauggggaucugcuccugcggccuguacaagcacccgggggugcccgugaaguggaagcgcugaggacuaguaauaaggaaacuguaugaaugucugugggcaggaagugaagagauccuucuguaaagguuuuuggaauuaugucugcugaauaauaaacuuuuuugaaauaauaaaucugguagaaaaaugagaucuaaaaaaaaaaaaaaaaaaaaaaaaaaaaaaaaaaaaaaaaaaaaaaaaaaaaaaaaaaaaaaaaaaaaaaaaaaaaaaaaaaaaaaaaaaaaaaaaaaaa

SEQ ID NO: 36024 - RNA, 1785 nt, Artificial Sequence
  mRNA product Design b-4 (A100) comprising derived and/or modified sequence from LASV(LASV253-NIG-2011;Clade II)__AIT17670__GPCmut9 (opt1)
aggagagucccgcagucggcguccagcggcucugcuuguucgugugugugucguugcaggccuuauucaagcuuaccaugggccagaucaucaccuucuuccaggaggugccccacgucaucgaggaggugaugaacaucgugcugaucgcccucagccugcuggccauccucaaggggaucuacaacgucgcgaccugcggccuguucgggcugguguccuuccuccugcugugcggccgcagcugcuccacgaccuacaaggggguguacgagcuccagacccuggagcuggacauggccagccucaacaugaccaugccgcuguccugcacgaagaacaacagccaccacuacaucauggucggcaacgagaccggccuggagcucacccugaccaacacguccaucaucaaccacaaguucugcaaccugagcgacgcccacaagaagaaccucuacgaccacgcccugauguccaucaucagcaccuuccaccuguccauccccaacuucaaccaguacgaggccaugagcugcgacuucaacgggggcaagaucuccgugcaguacaaccucagccacaccuacgcgguggacgccgccaaccacugcgggaccaucgccaacggcguccugcagacguucaugcggauggcguggggcggguccuacaucgcccuggacagcggcugcggguccugggacugcaucaugaccagcuaccaguaccucaucauccagaacaccaccugggaggaccacugccaguucucccgccccagccccaucggcuaccuggggcugcucagccagcggacgcgcgacaucuacaucucccggcgccugcugggcaccuucaccuggacccucagcgacuccgagggcaacgagacgcccgggggcuacugccugacccgguggaugcugaucgaggccgagcucaagugcuucgggaacaccgccguggccaagugcaacgagaagcacgacgaggaguucugcgacaugcugcgccuguucgacuucaacaagcaggcgauccggcgccucaaggccgaggcccagaugagcauccagcugaucaacaaggccgugaacgcccugaucaacgaccagcucaucaugaagaaccaccuccgggacaucaugugcaucccguacugcaacuacuccaaguacugguaccugaaccacaccgucacggggcgcaccagccugccccggugcuggcugguguccaacggcagcuaccugaacgagacccacuucuccgacgacaucgagcagcaggcggacaacaugaucaccgagcuccugcagaaggaguacaucgaccgccagggcaagacgccccuggggcucguggaccuguucgucuucagcaccuccuucuaccugaucagcaucuuccugcaccucgugaagaucccgacccaccggcacaucaucggcaagcccugccccaagccccaccgccugaaccacauggggaucugcuccugcggccuguacaagcacccgggggugcccgucaaguggaagcggugaggacuaguaauaaggaaacuguaugaaugucugugggcaggaagugaagagauccuucuguaaagguuuuuggaauuaugucugcugaauaauaaacuuuuuugaaauaauaaaucugguagaaaaaugagaucuaaaaaaaaaaaaaaaaaaaaaaaaaaaaaaaaaaaaaaaaaaaaaaaaaaaaaaaaaaaaaaaaaaaaaaaaaaaaaaaaaaaaaaaaaaaaaaaaaaaa

SEQ ID NO: 36025 - RNA, 1785 nt, Artificial Sequence
  mRNA product Design b-4 (A100) comprising derived and/or modified sequence from LASV(LASV254-NIG-2011;Clade II)__AIT17674__GPCmut9 (opt1)
aggagagucccgcagucggcguccagcggcucugcuuguucgugugugugucguugcaggccuuauucaagcuuaccaugggccagaucaucaccuucuuccaggaggugccccacgucaucgaggaggugaugaacaucgugcugaucgcccucagccugcuggccauccucaaggggaucuacaacgucgcgaccugcggccuguucgggcugguguccuuccuccugcugugcggccgcagcugcuccacgaccuacaaggggguguacgagcuccagacccuggagcuggacaugaccaaccucaacaugacgaugccgcugagcugcaccaagaacaacucccaccacuacaucauggucggcaacgagaccggccuggagcucacccugacgaacaccagcaucaucaaccacaaguucugcaaccuguccgacgcccacaagaagaaccucuacaaccacgcccugaugagcaucaucuccaccuuccaccugagcauccccaacuucaaccaguacgaggccauguccugcgacuucaacgggggcaagaucagcgugcaguacaaccucucccacagcuacgccguggacgcggccaaccacugcgggaccaucgccaacggcguccugcagacguucaugcggauggccuggggcggguccuacaucgcgcuggacagcggcugcgggaacugggacugcaucaugaccuccuaccaguaccucaucauccagaacaccaccugggaggaccacugccaguucagccgccccucccccaucggcuaccuggggcugcucagccagcggacgcgcgacaucuacaucagccggcgccugcugggcaccuucaccuggacccucuccgacagcgagggcaacgagacgcccgggggcuacugccugacccgguggaugcugaucgaggccgagcucaagugcuucgggaacaccgccguggccaagugcaacgagaagcacgacgaggaguucugcgacaugcugcgccuguucgacuucaacaagcaggccauccggcgccucaagaccgaggcgcaggccaacauccagcugaucaacaaggccgugaacgcccugaucaacgaccagcucaucaugaagaaccaccuccgggacaucaugugcauccccuacugcaacuacuccaaguacugguaccugaaccacacggucaccgggaagaccagccugccccgcugcuggcugguguccaacggcagcuaccugaacgagacccacuucuccgacgacaucgagcagcaggccgacaacaugaucacggagcuccugcagaaggaguacauggaccggcagggcaagaccccgcuggggcucguggaccuguucgucuucagcaccuccuucuaccugaucagcaucuuccugcaccucgugaagaucccgacccaccgccacgugaucggcaagcccugccccaagccccaccggcugaaccacauggggaucugcuccugcggccuguacaagcacccggggguccccgugaaguggaagcgcugaggacuaguaauaaggaaacuguaugaaugucugugggcaggaagugaagagauccuucuguaaagguuuuuggaauuaugucugcugaauaauaaacuuuuuugaaauaauaaaucugguagaaaaaugagaucuaaaaaaaaaaaaaaaaaaaaaaaaaaaaaaaaaaaaaaaaaaaaaaaaaaaaaaaaaaaaaaaaaaaaaaaaaaaaaaaaaaaaaaaaaaaaaaaaaaaa

SEQ ID NO: 36026 - RNA, 1785 nt, Artificial Sequence
  mRNA product Design b-4 (A100) comprising derived and/or modified sequence from LASV(Nig08-A19;Clade III)__ADU56618__GPCmut9 (opt1)
aggagagucccgcagucggcguccagcggcucugcuuguucgugugugugucguugcaggccuuauucaagcuuaccaugggccagaucgugaccuucuuccaggaggucccccacgugaucgaggaggugaugaacaucguccugaucgcccucagcauccuggccauccugaaggggcucuacaacaucgcgaccugcggccugaucgggcuggugacguuccuccugcuguccggccgcagcugcuccaugaccuacaaggggguguacgagcuccagacccuggagcugaacaugaacacccucaacaugacgaugccgcugagcugcaccaagaacaacucccaccacuacaucauggucggcaacgagaccggccuggagcucacccugacgaacaccagccugcuccaccacaaguucugcaaccuguccgacgcccacaagaagaaccuguacgaccacacccucaugagcaucaucuccaccuuccaccugagcauccccaacuucaaccaguacgaggccauguccugcgacuucaacgggggcaagaucacggugcaguacaaccugagccacuccuacgccaucgacgccgcgaaccacugcgggaccguggccaacggcguccuccagaccuucaugcggauggccuggggcgggagcuacaucgcccuggacuccggcugcgggaagugggacugcaucaugaccagcuaccaguaccugaucauccagaacacgaccugggaggaccacugccaguucucccggcccagccccaucggcuaccucgggcugcugucccagcgcacccgggacaucuacaucagccgccggcuccugggcaccuucacguggacccugagcgacuccgagggcaacgagacccccgggggcuacugccucacccgcuggaugcugaucgaggcggagcugaagugcuucgggaacacggccguggccaagugcaacgagaagcacgacgaggaguucugcgacaugcuccggcuguucgacuucaacaagcaggccauccgccggcugaaggccgaggcgcagaugagcauccagcucaucaacaaggccgugaacgcccugaucaacgaccagcugaucaugaagaaccaccuccgcgacaucaugugcauccccuacugcaacuacuccaaguacugguaccugaaccacaccagcaccgggcggaccucccugccccgcugcuggcucgucagcaacggcuccuaccugaacgagacgcacuucagcgacgacaucgagcagcaggccgacaacaugaucaccgagaugcugcagaaggaguaccucgaccggcagggcaagaccccgcuggggcugguggaccuguucguguucuccaccagcuucuaccucaucuccaucuuccugcaccuggucaagaucccgacgcaccgccacaucgugggcaagcccugccccaagccccaccggcucaaccacauggggaucugcagcugcggccuguacaagcagccgggggugcccguccgcuggaagcggugaggacuaguaauaaggaaacuguaugaaugucugugggcaggaagugaagagauccuucuguaaagguuuuuggaauuaugucugcugaauaauaaacuuuuuugaaauaauaaaucugguagaaaaaugagaucuaaaaaaaaaaaaaaaaaaaaaaaaaaaaaaaaaaaaaaaaaaaaaaaaaaaaaaaaaaaaaaaaaaaaaaaaaaaaaaaaaaaaaaaaaaaaaaaaaaaa

SEQ ID NO: 36027 - RNA, 1788 nt, Artificial Sequence
  mRNA product Design b-4 (A100) comprising derived and/or modified sequence from LASV(G1180-SLE-2010;Clade IV)__AIT17168__GPCmut9 (opt1)
aggagagucccgcagucggcguccagcggcucugcuuguucgugugugugucguugcaggccuuauucaagcuuaccaugggccagaucgugaccuucuuccaggaggucccccacgugaucgaggaggugaugaacaucguccugaucgcccucagcauccuggccgugcugaaggggcucuacaacuucgcgaccugcggccugguggggcugcucaccuuccugcugcucugcggccgcuccugcaccgccagccgguacaagggggucuacgagcugcagacccuggagcucaacauggagacccugaacaugacgaugccgcuguccugcaccaagaacaacagccaccacuacaucauggugggcaacgagaccggccucgagcugacccugacgaacaccuccaucaucaaccacaaguucugcaaccucagcgacgcccacaagaagaaccuguacgaccacgcccugauguccaucaucagcaccuuccaccucuccauccccaacuucaaccaguacgaggccaugagcugcgacuucaacgggggcaagaucuccgugcaguacaaccugagccacuccuacgcgggggacgccgccaaccacugcggcaccgucgccaacggggugcugcagacguucaugcgcauggcguggggcggcagcuacaucgcccucgacuccgggugcggcagcugggacugcaucaugaccuccuaccaguaccugaucauccagaacaccaccugggaggaccacugccaguucagccggcccucccccaucggguaccugggccuccugagccagcgcacgcgggacaucuacaucagccgccggcugcucggcaccuucaccuggacccuguccgacagcgaggggaaggacacgccgggcggguacugccugacccgcuggaugcucaucgaggccgagcugaagugcuucggcaacaccgccguggccaagugcaacgagaagcacgacgaggaguucugcgacaugcugcggcuguucgacuucaacaagcaggcgauccagcgccugaaggccgaggcccagauguccauccagcugaucaacaaggccgucaacgcccucaucaacgaccagcugaucaugaagaaccaccuccgggacaucaugugcauccccuacugcaacuacagcaaguacugguaccucaaccacaccacgaccggcaagaccucccugcccaagugcuggcuggugagcaacggcuccuaccucaacgagacccacuucagcgacgacaucgagcagcaggcggacaacaugaucacggagaugcugcagaaggaguacauggagcgccaggggaagacgccccugggccucguggaccuguucgucuucuccaccagcuucuaccugaucuccaucuuccugcaccucgugaagaucccgacccaccggcacaucgugggcaagagcugccccaagccccaccgccugaaccacauggggaucugcuccugcgggcuguacaagcagcccggcgucccggugaaguggaagcggugaggacuaguaauaaggaaacuguaugaaugucugugggcaggaagugaagagauccuucuguaaagguuuuuggaauuaugucugcugaauaauaaacuuuuuugaaauaauaaaucugguagaaaaaugagaucuaaaaaaaaaaaaaaaaaaaaaaaaaaaaaaaaaaaaaaaaaaaaaaaaaaaaaaaaaaaaaaaaaaaaaaaaaaaaaaaaaaaaaaaaaaaaaaaaaaaa

SEQ ID NO: 36028 - RNA, 1788 nt, Artificial Sequence
  mRNA product Design b-4 (A100) comprising derived and/or modified sequence from LASV(G1442-SLE-2011;Clade IV)__AIT17180__GPCmut9 (opt1)
aggagagucccgcagucggcguccagcggcucugcuuguucgugugugugucguugcaggccuuauucaagcuuaccaugggccagaucgugaccuucuuccaggaggucccccacgugaucgaggaggugaugaacaucguccugaucgcccucagcauccuggccgugcugaaggggcucuacaacguggcgaccugcggccugaucgggcuggucacguuccuccugcugugcggccgcuccugcaccaccacccucuacaaggggguguacgagcugcagacgcuggagcucaacauggagacccugaacaugaccaugccgcugagcugcaccaagaacaacucccaccacuacauccgggugggcaacgagacgggccucgagcugacccugaccaacaccagcaucaucaaccacaaguucugcaaccucuccgacgcccacaagaagaaccuguacgaccacgcccugaugagcaucaucuccacguuccaccucagcauccccaacuucaaccaguacgaggccauguccugcgacuucaacgggggcaagaucagcguccaguacaaccugucccacagcuacgccggggacgcggccaaccacugcggcaccguggccaacggggugcugcagaccuucaugcgcauggccuggggcggcuccuacaucgcgcucgacagcgggugcggcaacugggacugcaucaugaccuccuaccaguaccugaucauccagaacacgaccugggacgaccacugccaguucagccgccccucccccaucggguaccugggccuccugagccagcggacccgcgacgucuacaucucccggcgccugcucggcaccuucacguggacccugagcgacagcgaggggaaggacaccccgggcggguacugccugacccgguggaugcucaucgaggccgagcugaagugcuucggcaacacggccguggccaagugcaacgagaagcacgacgaggaguucugcgacaugcugcgccucuucgacuucaacaagcaggccauccagcggcugaaggcggaggcccagauguccauccagcugaucaacaaggccgugaacgcccucaucaacgaccagcugaucaugaagaaccaccuccgcgacaucaugugcauccccuacugcaacuacagcaaguacugguaccugaacaacaccgccaccggcaagaccucccugcccaagugcuggcugaucagcaacggcuccuaccucaacgagacgcacuucagcgacgacaucgagcaggaggcggacaacaugaucaccgagaugcugcagaaggaguacauggagcggcaggggaagacgccccugggccucgucgaccuguucguguucuccaccagcuucuaccugaucuccaucuuccugcaccucgugaagaucccgacccaccgccacaucgucggcaagagcugccccaagccccaccggcugaaccacauggggaucugcuccugcgggcuguacaagcagcccggcgugccggugcgcuggaagcggugaggacuaguaauaaggaaacuguaugaaugucugugggcaggaagugaagagauccuucuguaaagguuuuuggaauuaugucugcugaauaauaaacuuuuuugaaauaauaaaucugguagaaaaaugagaucuaaaaaaaaaaaaaaaaaaaaaaaaaaaaaaaaaaaaaaaaaaaaaaaaaaaaaaaaaaaaaaaaaaaaaaaaaaaaaaaaaaaaaaaaaaaaaaaaaaaa

SEQ ID NO: 36029 - RNA, 1788 nt, Artificial Sequence
  mRNA product Design b-4 (A100) comprising derived and/or modified sequence from LASV(G3010-SLE-2013;Clade IV)__AIT17344__GPCmut9 (opt1)
aggagagucccgcagucggcguccagcggcucugcuuguucgugugugugucguugcaggccuuauucaagcuuaccaugggccagaucgugaccuucuuccaggaggucccccacgugaucgaggaggugaugaacaucguccugaucgcccucagcauccuggccgugcugaaggggcucuacaacuucgcgaccugcggccugguggggcuggucacguuccuccugcugugcggccgcuccugcaccaccagccucuacaaggggguguacgagcugcagacccuggagcucaacauggagacgcugaacaugaccaugccgcuguccugcaccaagaacaacagccaccacuacaucauggugggcaacgagaccggccucgagcugacgcugaccaacaccuccaucaucaaccacaaguucugcaaccucagcgacgcccacaagaagaaccuguacaaccacgcccugauguccaucaucagcaccuuccaccucuccauccccaacuucaaccaguacgaggccaugagcugcgacuucaacgggggcaagaucuccguccaguacaaccugagccacuccuacgccggggacgcggccagccacugcggcacgguggccaacggggugcugcagaccuucaugcggauggccuggggcggcuccuacaucgcgcucgacagcgggugcggcaagugggacugcaucaugaccuccuaccaguaccugaucauccagaacaccacgugggaggaccacugccaguucagccgccccucccccaucggguaccugggccuccugagccagcggacccgcgacaucuacaucagccggcgccugcucggcaccuucaccuggacgcuguccgacagcgaggggaaggacaccccgggcggguacugccugacccgguggaugcucaucgaggccgagcugaagugcuucggcaacaccgccgucgccaagugcaacgagaagcacgacgaggaguucugcgacaugcugcgccucuucgacuucaacaagcaggccauccagcggcugaagacggaggcgcagauguccauccagcugaucaacaaggccgugaacgcccucaucaacgaccagcugaucaugaagaaccaccuccgcgacaucaugugcauccccuacugcaacuacagcaaguacugguaccugaaccacaccaccaccggcaagacgucccugcccaagugcuggcuggugagcaacggcuccuaccucaacgagacccacuucagcgacgacaucgagcagcaggccgacaacaugaucaccgagaugcugcagaaggaguacauggagcggcaggggaagacgccccugggccucgucgaccuguucguguucuccaccagcuucuaccugaucuccaucuuccugcaccucgugaagaucccgacccaccgccacaucgucggcaagagcugccccaagccccaccggcugaaccacauggggaucugcuccugcgggcuguacaagcagcccggcgugccggugcgcuggaagcggugaggacuaguaauaaggaaacuguaugaaugucugugggcaggaagugaagagauccuucuguaaagguuuuuggaauuaugucugcugaauaauaaacuuuuuugaaauaauaaaucugguagaaaaaugagaucuaaaaaaaaaaaaaaaaaaaaaaaaaaaaaaaaaaaaaaaaaaaaaaaaaaaaaaaaaaaaaaaaaaaaaaaaaaaaaaaaaaaaaaaaaaaaaaaaaaaa

SEQ ID NO: 36030 - RNA, 1788 nt, Artificial Sequence
  mRNA product Design b-4 (A100) comprising derived and/or modified sequence from LASV(G502-SLE-2009;Clade IV)__AIT17126__GPCmut9 (opt1)
aggagagucccgcagucggcguccagcggcucugcuuguucgugugugugucguugcaggccuuauucaagcuuaccaugggccagaucgugaccuucuuccaggaggucccccacgugaucgaggaggugaugaacaucguccugaucgcccucagcauccuggccgugcugaaggggcucuacaacuucgcgaccugcggccugguggggcugcucacguuccugcugcucugcggccgcuccugcaccaccgggcuguacaagggcgucuacgagcugcagacccucgagcugaacauggagacgcugaacaugaccaugccgcucagcugcaccaagaacaacucccaccacuacaucauggugggcaacgagaccgggcuggagcugacgcucaccaacaccagcaucaucaaccacaaguucugcaaccuguccgacgcccacaagaagaaccuguacgaccacgcccucaugagcaucaucuccaccuuccaccugagcauccccaacuucaaccaguacgaggccauguccugcgacuucaacggcgggaagaucagcgugcaguacaaccugucccacagcuacgccggcgacgcggccgaccacugcgggacggucgccaacggcgugcuccagaccuucaugcggauggccuggggcggguccuacaucgcgcuggacagcggcugcgggcggugggacugcaucaugaccuccuaccaguaccugaucauccagaacaccacgugggaggaccacugccaguucagccgccccucccccaucggcuaccucggccugcugagccagcggacccgcgacaucuacaucucccggcgccuccuggggaccuucaccuggacgcugagcgacagcgagggcaaggacacccccgggggcuacugccucacccgguggaugcugaucgaggccgagcugaagugcuucgggaacaccgccguggccaagugcaacgagaagcacgacgaggaguucugcgacaugcuccgccuguucgacuucaacaagcaggccauccagcggcugaaggcggaggcccagauguccauccagcucaucaacaaggccgucaacgcccugaucaacgaccagcuggugaugaagaaccaccuccgcgacaucaugugcauccccuacugcaacuacagccgguacugguaccugaaccacacgaccaccggccgcaccucccugcccaagugcuggcucgugagcaacggguccuaccugaacgagacgcacuucagcgacgacaucgagcagcaggccgacaacaugaucaccgagaugcugcagaaggaguacauggagcggcagggcaagaccccgcucgggcuggucgaccuguucguguucuccaccagcuucuaccugaucuccaucuuccuccaccuggugaagaucccgacgcaccgccacaucgucggcaagagcugccccaagccccaccggcugaaccacauggggaucugcuccugcggccucuacaagcagcccggcgugccggugaaguggaagcgcugaggacuaguaauaaggaaacuguaugaaugucugugggcaggaagugaagagauccuucuguaaagguuuuuggaauuaugucugcugaauaauaaacuuuuuugaaauaauaaaucugguagaaaaaugagaucuaaaaaaaaaaaaaaaaaaaaaaaaaaaaaaaaaaaaaaaaaaaaaaaaaaaaaaaaaaaaaaaaaaaaaaaaaaaaaaaaaaaaaaaaaaaaaaaaaaaa

SEQ ID NO: 36031 - RNA, 1788 nt, Artificial Sequence
  mRNA product Design b-4 (A100) comprising derived and/or modified sequence from LASV(G733-SLE-2010;Clade IV)__AIT17154__GPCmut9 (opt1)
aggagagucccgcagucggcguccagcggcucugcuuguucgugugugugucguugcaggccuuauucaagcuuaccaugggccagaucgugaccuucuuccaggaggucccccacgugaucgaggaggugaugaacaucguccugaucgcccucagcauccuggccgugcugaaggggcucuacaacuucgcgaccugcggcaucguggggcuggucuccuuccugcuccugugcggccgcagcugcacgaccucccuguacaaggggguguacgagcuccagacccuggagcugaacauggagacccucaacaugacgaugccgcugagcugcaccaagaacaacucccaccacuacaucauggugggcaacgagaccggccuggagcucacccugacgaacaccagcaucaucaaccacaaguucugcaaccuguccgacgcccacaagaagaaccucuacgaccacgcccugaugagcaucaucuccaccuuccaccugagcauccccaacuucaaccaguacgaggccauguccugcgacuucaacgggggcaagaucagcguccaguacaaccucucccacagcuacgccggggacgcggccaaccacugcggcaccaucgccaacggggugcugcagacguucaugcggauggccuggggcggcuccuacaucgcgcuggacagcgggugcgaccggugggacugcaucaugaccuccuaccaguaccucaucauccagaacaccaccugggaggaccacugccaguucagccgccccucccccaucggcuaccuggggcugcucagccagcggacgcgcgacaucuacaucagccggcgccugcugggcaccuucaccuggacccucuccgacagcgagggcaaggacacgcccgggggcuacugccugacccgguggaugcugaucgaggccgagcucaagugcuucgggaacaccgccguggccaagugcaacgagaagcacgacgaggaguucugcgacaugcugcgccuguucgacuucaacaagcaggccauccagcggcucaaggcggaggcccagauguccauccagcugaucaacaaggccgucaacgcccugaucaacgaccagcucaucaugaagaaccaccuccgcgacaucaugugcauccccuacugcaacuacagcaaguacugguaccugaaccacaccacgaccgggaagaccucccugcccaagugcuggcuggugagcaacggcuccuaccugaacgagacccacuucagcgacgacaucgagcagcaggccgacaacaugaucacggagaugcuccagaaggaguacauggagcggcagggcaagaccccgcuggggcugguggaccucuucgucuucuccaccagcuucuaccugaucuccaucuuccugcaccuggugaagaucccgacccaccgccacguggucggcaagagcugccccaagccccaccggcucaaccacauggggaucugcuccugcggccuguacgggcagcccggcgugccggugaaguggaagcgcugaggacuaguaauaaggaaacuguaugaaugucugugggcaggaagugaagagauccuucuguaaagguuuuuggaauuaugucugcugaauaauaaacuuuuuugaaauaauaaaucugguagaaaaaugagaucuaaaaaaaaaaaaaaaaaaaaaaaaaaaaaaaaaaaaaaaaaaaaaaaaaaaaaaaaaaaaaaaaaaaaaaaaaaaaaaaaaaaaaaaaaaaaaaaaaaaa

SEQ ID NO: 36032 - RNA, 1788 nt, Artificial Sequence
  mRNA product Design b-4 (A100) comprising derived and/or modified sequence from MOPV/LASV reassortant(IGS-1;Clade IV)__AFY05576__GPCmut9 (opt1)
aggagagucccgcagucggcguccagcggcucugcuuguucgugugugugucguugcaggccuuauucaagcuuaccaugggccagaucgugaccuucuuccaggaggucccccacgugaucgaggaggugaugaacaucguccugaucgcccucagcgugcuggccgugcugaaggggcucuacaacuucgcgaccugcggccuggucgggcuggugacguuccuccugcugugcggccgcuccugcaccaccagccucuacaaggggguguacgagcugcagacccuggagcucaacauggagacgcugaacaugaccaugccgcuguccugcaccaagaacaacagccaccacuacaucauggucggcaacgagaccggccucgagcugacgcugaccaacaccuccaucaucaaccacaaguucugcaaccucagcgacgcccacaagaagaaccuguacgaccacgcccugauguccaucaucagcaccuuccaccucuccauccccaacuucaaccaguacgaggccaugagcugcgacuucaacgggggcaagaucuccgugcaguacaaccugagccacuccuacgccggggacgcggccaaccacugcggcacgguggccaacgggguccugcagaccuucaugcggauggccuggggcggcagcuacaucgcgcucgacuccgggugcggcaacugggacugcaucaugaccagcuaccaguaccugaucauccagaacaccacgugggaggaccacugccaguucucccggcccagccccaucggguaccugggccuccugucccagcgcacccgggacaucuacaucagccgccggcugcucggcaccuucaccuggacgcugagcgacuccgagggggaggacaccccgggcggguacugccugacccgcuggaugcucaucgaggccgagcugaagugcuucggcaacaccgccguggccaagugcaacgagaagcacgacgaggaguucugcgacaugcugcggcuguucgacuucaacaagcaggccauccagcgccugaaggcggaggcccagaugagcauccagcugaucaacaaggccgugaacgcccucaucaacgaccagcugaucaugaagaaccaccuccgggacaucaugugcauccccuacugcaacuacuccaaguacugguaccucaaccacacgaccaccggccgcaccagccugcccaagugcuggcuggucuccaacggcagcuaccucaacgagacgcacuucuccgacgacaucgagcagcaggccgacaacaugaucaccgagaugcugcagaaggaguacauggagcggcaggggaagacgccccugggccucguggaccuguucguguucagcaccuccuucuaccugaucagcaucuuccugcaccucgucaagaucccgacccaccgccacaucguggggaaguccugccccaagccccaccggcugaaccacaugggcaucugcagcugcgggcuguacaagcagcccggcgugccggucaaguggaagcgcugaggacuaguaauaaggaaacuguaugaaugucugugggcaggaagugaagagauccuucuguaaagguuuuuggaauuaugucugcugaauaauaaacuuuuuugaaauaauaaaucugguagaaaaaugagaucuaaaaaaaaaaaaaaaaaaaaaaaaaaaaaaaaaaaaaaaaaaaaaaaaaaaaaaaaaaaaaaaaaaaaaaaaaaaaaaaaaaaaaaaaaaaaaaaaaaaa

SEQ ID NO: 36033 - RNA, 1788 nt, Artificial Sequence
  mRNA product Design b-4 (A100) comprising derived and/or modified sequence from LASV(LM765-SLE-2012;Clade IV)__AIT17814__GPCmut9 (opt1)
aggagagucccgcagucggcguccagcggcucugcuuguucgugugugugucguugcaggccuuauucaagcuuaccaugggccagaucgugaccuucuuccaggaggucccccacgugaucgaggaggugaugaacaucguccugaucgcccucagcauccuggccgugcugaaggggcucuacaacuucgcgaccugcggccugguggggcuggucacguuccuccugcugugcggccgcuccugcaccaccagccucuacaaggggguguacgagcugcagacccuggagcucaacauggagacgcugaacaugaccaugccgcuguccugcaccaagaacaacagccaccacuacaucauggugggcaacgagaccggccucgagcugacgcugaccaacaccuccaucaucgaccacaaguucugcaaccucagcgacgcccaccggaagaaccuguacgaccacgcccugauguccaucaucagcaccuuccaccucuccauccccaacuucaaccaguacgaggccaugagcugcgacuucaacgggggcaagaucuccguccaguacaaccugagccacuccuacgccaaggacgcggccgaccacugcgggacgguggccaacggcgugcugcagaccuucaugcgcauggccuggggcgggagcuacaucgcgcucgacuccggcugcgggcgcugggacugcaucaugaccagcuaccaguaccugaucauccagaacaccacgugggaggaccacugccaguucucccggcccagccccaucggcuaccuggggcuccugucccagcgcacccgggacaucuacaucagccgccggcugcucggcaccuucaccuggacgcugagcgacuccgagggcaaggacacccccgggggcuacugccugacccgcuggaugcucaucgaggccgagcugaagugcuucgggaacaccgccgucgccaagugcaacgagaagcacgacgaggaguucugcgacaugcugcggcuguucgacuucaacaagcaggccauccagcgccugaaggcggaggcccagaugagcauccagcugaucaacaaggccgugaacgcccucaucaacgaccagcugaucaugaagaaccaccuccgggacaucaugugcauccccuacugcaacuacuccaaguacugguaccucaaccacacgaccaccgggaagaccagccugcccaagugcuggcugguguccaacggcagcuaccucaacgagacgcacuucuccgacgacaucgagcagcaggccgacaacaugaucaccgagaugcugcagaaggaguacauggagcgccagggcaagaccccgcuggggcucgucgaccuguucguguucagcaccuccuucuaccugaucagcaucuuccugcaccucgugaagaucccgacgcaccggcacaucgucggcaagcccugccccaagccccaccgccugaaccacauggggaucugcuccugcggccuguacaagcagccgggggugcccgugaaguggaagcggugaggacuaguaauaaggaaacuguaugaaugucugugggcaggaagugaagagauccuucuguaaagguuuuuggaauuaugucugcugaauaauaaacuuuuuugaaauaauaaaucugguagaaaaaugagaucuaaaaaaaaaaaaaaaaaaaaaaaaaaaaaaaaaaaaaaaaaaaaaaaaaaaaaaaaaaaaaaaaaaaaaaaaaaaaaaaaaaaaaaaaaaaaaaaaaaaa

SEQ ID NO: 36034 - RNA, 1788 nt, Artificial Sequence
  mRNA product Design b-4 (A100) comprising derived and/or modified sequence from LASV(LM776-SLE-2012;Clade IV)__AIT17824__GPCmut9 (opt1)
aggagagucccgcagucggcguccagcggcucugcuuguucgugugugugucguugcaggccuuauucaagcuuaccaugggccagaucgugaccuucuuccaggaggucccccacgugaucgaggaggugaugaacaucguccugaucgcccucagcauccuggccgugcugaaggggcucuacaacuucgcgaccugcggccugguggggcuggucacguuccuccugcugugcggccgcuccugcaccaccagcguguacaaggggguguacgagcuccagacccuggagcugaacauggagacgcucaacaugaccaugccgcuguccugcaccaagaacaacagccaccacuacaucauggucggcaacgagaccggccuggagcucacgcugaccaacaccuccaucaucaaccacaaguucugcaaccugagcgacgcccacaagaagaaccucuacgaccacgcccugauguccaucaucagcaccuuccaccuguccauccccaacuucaaccaguacgaggccaugagcugcgacuucaacgggggcaagaucuccgugcaguacaaccucagccacuccuacgccggggacgcggccaaccacugcggcacgguggccaacgggguccugcagaccuucaugcggauggccuggggcggcagcuacaucgcgcuggacuccgggugcggcaagugggacugcaucaugaccagcuaccaguaccucaucauccagaacaccacgugggaggaccacugccaguucucccgccccagccccaucggguaccugggccugcucucccagcggacccgcgacaucuacaucagccggcgccugcugggcaccuucaccuggacgcucagcgacuccgaggggaaggacaccccgggcggguacugccugacccgguggaugcugaucgaggccgagcucaagugcuucggcaacaccgccguggccaagugcaacgagaagcacgacgaggaguucugcgacaugcugcgccuguucgacuucaacaagcaggccauccagcggcucaaggcggaggcccagaugagcauccagcugaucaacaaggccgugaacgcccugaucaacgaccagcucaucaugaagaaccaccuccgcgacaucaugugcauccccuacugcaacuacuccaaguacugguaccugaaccacacgaccaccggcaagaccagccugcccaagugcuggcuggucuccaacggcagcuaccugaacgagacgcacuucuccgacgacaucgagcagcaggccgacaacaugaucaccgagaugcuccagaaggaguacauggagcggcaggggaagacgccccugggccugguggaccucuucguguucagcaccuccuucuaccugaucagcaucuuccugcaccuggucaagaucccgacccaccgccacaucguggggaaguccugccccaagccccaccggcucaaccacaugggcaucugcagcugcgggcuguacaagcagcccggcgugccgguccgcuggaagcggugaggacuaguaauaaggaaacuguaugaaugucugugggcaggaagugaagagauccuucuguaaagguuuuuggaauuaugucugcugaauaauaaacuuuuuugaaauaauaaaucugguagaaaaaugagaucuaaaaaaaaaaaaaaaaaaaaaaaaaaaaaaaaaaaaaaaaaaaaaaaaaaaaaaaaaaaaaaaaaaaaaaaaaaaaaaaaaaaaaaaaaaaaaaaaaaaa

SEQ ID NO: 36035 - RNA, 1788 nt, Artificial Sequence
  mRNA product Design b-4 (A100) comprising derived and/or modified sequence from LASV(Mad39;Clade IV)__ANH09722__GPCmut9 (opt1)
aggagagucccgcagucggcguccagcggcucugcuuguucgugugugugucguugcaggccuuauucaagcuuaccaugggccagaucgugaccuucuuccaggaggucccccacgugaucgaggaggugaugaacaucguccugaucgcccucagcauccuggccgugcugaaggggcucuacaacguggcgaccugcggccugaucgggcuggucacguuccuccugcugugcggccgcuccugcaccaccacccucuacaaggggguguacgagcugcaggcccuggagcucaacauggagacgcugaacaugaccaugccgcugagcugcaccaagaacaacucccaccacuacauccgggugggcaacgagaccggccucgagcugacgcugaccaacaccagccucaucaaccacaaguucugcaaccuguccgacgcccacaagaagaaccuguacgaccacgcccucaugagcaucaucuccaccuuccaccugagcauccccaacuucaaccaguacgaggccauguccugcgacuucaacgacgggaagaucagcguccaguacaaccugucccacacguacgcgggcgacaccgccaaccacugcgggaccguggccaacggcgugcuccagaccuucaugcgcauggccuggggcgggagcuacaucgcgcuggacuccggcugcgggggcugggacugcaucaugacgagcuaccaguaccugaucauccagaacaccaccugggaggaccacugccaguucucccggcccagccccaucggguaccucggccugcugucccagcggacccgcgacaucuacaucagccggcgccuccugggcacguucaccuggacccuguccgacagcgaggggaaggacaccccgggcggguacugccucacgcgguggaugcugaucgaggccgagcugaagugcuucggcaacaccgccgucgccaagugcaacgagaagcacgacgaggaguucugcgacaugcuccgccuguucgacuucaacaagcaggccauccagcggcugaaggcggaggcccagaugagcauccagcucaucaacaaggccgugaacgcccugaucaacgaccagcugaucaugaagaaccaccuccgcgacaucaugugcauccccuacugcaacuacuccaaguacugguaccugaaccacaccgugaccggcaagacgagccugcccaagugcuggcucgucuccaacggcagcuaccugaacgagacccacuucuccgacgacaucgagcagcaggccgacaacaugaucaccgagaugcugcagaaggaguacauggagcggcaggggaagacgccccucggccugguggaccuguucguguucagcaccuccuucuaccugaucagcaucuuccuccaccuggucaagaucccgacccaccgccacgugguggggaagcccugccccaagccccaccggcugaaccacaugggcaucugcuccugcggguucuacaagcagccgggcguccccgugcgcuggaagcggugaggacuaguaauaaggaaacuguaugaaugucugugggcaggaagugaagagauccuucuguaaagguuuuuggaauuaugucugcugaauaauaaacuuuuuugaaauaauaaaucugguagaaaaaugagaucuaaaaaaaaaaaaaaaaaaaaaaaaaaaaaaaaaaaaaaaaaaaaaaaaaaaaaaaaaaaaaaaaaaaaaaaaaaaaaaaaaaaaaaaaaaaaaaaaaaaa

SEQ ID NO: 36036 - RNA, 1788 nt, Artificial Sequence
  mRNA product Design b-4 (A100) comprising derived and/or modified sequence from LASV(Z0947-SLE-2011;Clade IV)__AIT17840__GPCmut9 (opt1)
aggagagucccgcagucggcguccagcggcucugcuuguucgugugugugucguugcaggccuuauucaagcuuaccaugggccagaucgugaccuucuuccaggaggucccccacgugaucgaggaggugaugaacaucguccugaucgcccucagcauccuggccgugcugaaggggcucuacaacuucgcgaccugcggccugguggggcuggucacguuccuccugcugugcggccgcuccugcaccaucagccucuacaaggggguguacgagcugcagacccuggagcucaacauggagacccugaacaugacgaugccgcuguccugcaccaagaacaacagccaccacuacaucauggugggcaacgagaccggccucgagcugacccugacgaacaccuccaucaucaaccacaaguucugcaaccucagcgacgcccacaagaagaaccuguacgaccacgcccugauguccaucaucagcaccuuccaccucuccauccccaacuucaaccaguacgaggccaugagcugcgacuucaacgggggcaagaucuccguccaguacaaccugagccacuccuacgccggggacgcggccaaccacugcggcaccguggccaacggggugcugcagacguucaugcggauggccuggggcggcagcuacaucgcgcucgacuccgggugcgaccggugggacugcaucaugaccagcuaccaguaccugaucauccagaacaccaccugggaggaccacugccaguucucccgccccagccccaucggcuaccuggggcuccugucccagcggacgcgcgacaucuacaucagccggcgccugcucggcaccuucaccuggacccugagcgacuccgagggcaaggacacgcccgggggcuacugccugacccgguggaugcucaucgaggccgagcugaagugcuucgggaacaccgccgucgccaagugcaacgagaagcacgacgaggaguucugcgacaugcugcgccucuucgacuucaacaagcaggccauccagcggcugaaggcggaggcccagaugagcauccagcugaucaacaaggccgugaacgcccucaucaacgaccagcugaucaugaagaaccaccuccgcgacaucaugugcauccccuacugcaacuacuccaaguacugguaccugaaccacaccacgaccgggaagaccagccugcccaagugcuggcugguguccaacggcagcuaccucaacgagacccacuucuccgacgacaucgagcagcaggccgacaacaugaucacggagaugcugcagaaggaguacauggagcggcagggcaagaccccgcuggggcucgucgaccuguucguguucagcaccuccuucuaccugaucagcaucuuccugcaccucgugaagaucccgacccaccgccacaucgucggcaagcccugccccaagccccaccggcugaaccacauggggaucugcuccugcggccuguacaagcagccgggggugcccgugaaguggaagcgcugaggacuaguaauaaggaaacuguaugaaugucugugggcaggaagugaagagauccuucuguaaagguuuuuggaauuaugucugcugaauaauaaacuuuuuugaaauaauaaaucugguagaaaaaugagaucuaaaaaaaaaaaaaaaaaaaaaaaaaaaaaaaaaaaaaaaaaaaaaaaaaaaaaaaaaaaaaaaaaaaaaaaaaaaaaaaaaaaaaaaaaaaaaaaaaaaa

SEQ ID NO: 36037 - RNA, 1788 nt, Artificial Sequence
  mRNA product Design b-4 (A100) comprising derived and/or modified sequence from LASV(Josiah;Clade IV)__NP_694870__GPCmut9 (opt1)
aggagagucccgcagucggcguccagcggcucugcuuguucgugugugugucguugcaggccuuauucaagcuuaccaugggccagaucgugaccuucuuccaggaggucccccacgugaucgaggaggugaugaacaucguccugaucgcccucagcgugcuggccgugcugaaggggcucuacaacuucgcgaccugcggccuggucgggcuggugacguuccuccugcugugcggccgcuccugcaccaccagccucuacaaggggguguacgagcugcagacccuggagcucaacauggagacgcugaacaugaccaugccgcuguccugcaccaagaacaacagccaccacuacaucauggucggcaacgagaccggccucgagcugacgcugaccaacaccuccaucaucaaccacaaguucugcaaccucagcgacgcccacaagaagaaccuguacgaccacgcccugauguccaucaucagcaccuuccaccucuccauccccaacuucaaccaguacgaggccaugagcugcgacuucaacgggggcaagaucuccgugcaguacaaccugagccacuccuacgccggggacgcggccaaccacugcggcacgguggccaacgggguccugcagaccuucaugcggauggccuggggcggcagcuacaucgcgcucgacuccgggugcggcaacugggacugcaucaugaccagcuaccaguaccugaucauccagaacaccacgugggaggaccacugccaguucucccgccccagccccaucggguaccugggccuccugucccagcggacccgcgacaucuacaucagccggcgccugcucggcaccuucaccuggacgcugagcgacuccgaggggaaggacaccccgggcggguacugccugacccgguggaugcucaucgaggccgagcugaagugcuucggcaacaccgccguggccaagugcaacgagaagcacgacgaggaguucugcgacaugcugcgccucuucgacuucaacaagcaggccauccagcggcugaaggcggaggcccagaugagcauccagcugaucaacaaggccgugaacgcccucaucaacgaccagcugaucaugaagaaccaccuccgcgacaucaugugcauccccuacugcaacuacuccaaguacugguaccugaaccacacgaccaccgggcggaccagccugcccaagugcuggcuggucuccaacggcagcuaccucaacgagacgcacuucuccgacgacaucgagcagcaggccgacaacaugaucaccgagaugcugcagaaggaguacauggagcgccagggcaagacgccccuggggcugguggaccucuucguguucagcaccuccuucuaccugaucagcaucuuccugcaccucgucaagaucccgacccaccggcacaucgugggcaaguccugccccaagccccaccgccugaaccacauggggaucugcagcugcggccuguacaagcagcccggggugccggucaaguggaagcggugaggacuaguaauaaggaaacuguaugaaugucugugggcaggaagugaagagauccuucuguaaagguuuuuggaauuaugucugcugaauaauaaacuuuuuugaaauaauaaaucugguagaaaaaugagaucuaaaaaaaaaaaaaaaaaaaaaaaaaaaaaaaaaaaaaaaaaaaaaaaaaaaaaaaaaaaaaaaaaaaaaaaaaaaaaaaaaaaaaaaaaaaaaaaaaaaa

SEQ ID NO: 36038 - RNA, 1785 nt, Artificial Sequence
  mRNA product Design b-4 (A100) comprising derived and/or modified sequence from LASV(LP;Clade I)__AAF86701__GPCmut9 (opt1)
aggagagucccgcagucggcguccagcggcucugcuuguucgugugugugucguugcaggccuuauucaagcuuaccaugggccagaucaucaccuucuuccaggaggugccccacgucaucgaggaggugaugaacaucgugcugaucgcccucagccugcuggccauccucaaggggcuguacaacaucgcgaccugcggcaucaucgggcuggucgccuuccucuuccugugcggcaaguccugcagccugacgcucaagggcggguacgagcugcagacccuggagcucaacauggagacccugaacaugaccaugccgcuguccugcacgaagaacagcucccaccacuacauccgcgugggcaacgagaccgggcucgagcugacccugaccaacacgagcaucaucaaccacaaguucugcaaccucuccgacgcccacaagaagaaccuguacgaccacgcccugaugagcaucaucuccaccuuccaccucagcauccccaacuucaaccaguacgaggccauguccugcgacuucaacggcgggaagaucagcgugcaguacaaccugucccacagcuacgcgggcgacgccgccgagcacugcgggaccgucgccaacggcgugcugcagaccuucaugcggauggcguggggcgggcgcuacaucgcccucgacuccggcugcgggaacugggacugcaucaugacgagcuaccaguaccugaucauccagaacaccaccugggaggaccacugccaguucucccggcccagccccaucggcuaccugggccuccugucccagcgcacccgggacaucuacaucagccgccggcugcucgggacguucaccuggacccugagcgacuccgagggcaacgagacccccgggggcuacugccugacgcgcuggaugcucaucgaggccgagcugaagugcuucgggaacaccgccguggccaagugcaacgagaagcacgacgaggaguucugcgacaugcugcggcuguucgacuucaacaagcaggcgauccgccggcugaaggccgaggcccagaugagcauccagcugaucaacaaggccgucaacgcccucaucaacgaccagcugaucaugaagaaccaccuccgcgacaucaugugcauccccuacugcaacuacuccaaguacugguaccucaaccacaccagcuccggccggaccagccugcccaagugcuggcugaucuccaacggcagcuaccucaacgagacgcaguucuccgacgacaucgagcagcaggcggacaacaugaucaccgagaugcugcagaaggaguacaucgagcgccaggggaagaccccgcugggccugguggacaucuucaucuucagcaccuccuucuaccucaucagcaucuuccugcaccugaucaagaucccgacgcaccggcacaucguggggaagcccugccccaagccccaccgccucaaccacaugggcgucugcuccugcgggcuguacaagcacccgggcgugcccaccaaguggaagcggugaggacuaguaauaaggaaacuguaugaaugucugugggcaggaagugaagagauccuucuguaaagguuuuuggaauuaugucugcugaauaauaaacuuuuuugaaauaauaaaucugguagaaaaaugagaucuaaaaaaaaaaaaaaaaaaaaaaaaaaaaaaaaaaaaaaaaaaaaaaaaaaaaaaaaaaaaaaaaaaaaaaaaaaaaaaaaaaaaaaaaaaaaaaaaaaaa

SEQ ID NO: 36039 - RNA, 1785 nt, Artificial Sequence
  mRNA product Design b-4 (A100) comprising derived and/or modified sequence from LASV(803213;Clade II)__AAF86703__GPCmut9 (opt1)
aggagagucccgcagucggcguccagcggcucugcuuguucgugugugugucguugcaggccuuauucaagcuuaccaugggccagaucaucaccuucuuccaggaggugccccacgucaucgaggaggugaugaacaucgugcugaucgcccucagccugcuggccauccucaaggggaucuacaacgucgcgaccugcggccuguucgggcugaucuccuuccuccugcugugcggccgcagcugcuccgugacguacaaggggguguacgagcuccagacccuggagcugaacauggccaaccucaacaugaccaugccgcugagcugcaccaagaacaacucccaccacuacaucauggucggcaacgagacgggccuggagcucacccugaccaacaccagcaucaucaaccacaaguucugcaaccuguccgacgcccacaagaagaaccucuacgaccacgcccugaugagcaucaucuccacguuccaccugagcauccccaacuucaaccaguacgaggccauguccugcgacuucaacgggggcaagaucagcgugcaguacaaccucucccacagcuucgcgguggacgccgccaaccacugcgggaccaucgccaacggcguccugcagaccuucaugcggauggcguggggcggguccuacaucgcccuggacagcggcugcgggaacugggacugcaucaugaccuccuaccaguaccucaucauccagaacacgaccugggaggaccacugccaguucagccgccccucccccaucggcuaccuggggcugcucagccagcggacccgcgacaucuacaucagccggcgccugcugggcaccuucacguggacccucuccgacagcgagggcaacgaggcccccgggggcuacugccugacccgguggaugcugaucgaggccgagcucaagugcuucgggaacaccgccguggcgaagugcaacgagaagcacgacgaggaguucugcgacaugcugcgccuguucgacuucaacaagcaggccaucaagcggcucaagacggaggcccagauguccauccagcugaucaacaaggccgugaacgcccugaucaacgaccagcucaucaugaagaaccaccuccgcgacaucaugugcauccccuacugcaacuacagccgguacugguaccugaaccacaccgucaccggcaagaccucccugccccgcugcuggcuggugagcaacggguccuaccugaacgagacgcacuucagcgacgacaucgagcagcaggcggacaacaugaucaccgagaugcuccagaaggaguacauggaccggcagggcaagaccccgcugggccugguggaccuguucgucuucuccaccagcuucuaccucaucuccaucuuccugcaccuggugaagaucccgacgcaccgccacaucguggggaagcccugccccaagccccaccggcucaaccacaugggcaucugcagcugcgggcuguacaagcacccgggcguccccgugaaguggaagcgcugaggacuaguaauaaggaaacuguaugaaugucugugggcaggaagugaagagauccuucuguaaagguuuuuggaauuaugucugcugaauaauaaacuuuuuugaaauaauaaaucugguagaaaaaugagaucuaaaaaaaaaaaaaaaaaaaaaaaaaaaaaaaaaaaaaaaaaaaaaaaaaaaaaaaaaaaaaaaaaaaaaaaaaaaaaaaaaaaaaaaaaaaaaaaaaaaa

SEQ ID NO: 36040 - RNA, 1785 nt, Artificial Sequence
  mRNA product Design b-4 (A100) comprising derived and/or modified sequence from LASV(GA391;Clade III)__CAA36645__GPCmut9 (opt1)
aggagagucccgcagucggcguccagcggcucugcuuguucgugugugugucguugcaggccuuauucaagcuuaccaugggccagaucgugaccuucuuccaggaggucccccacgugaucgaggaggugaugaacaucguccugaucgcccucagcauccuggccauccugaaggggcucuacaacguggcgaccugcggccugaucgggcuggugacguuccuccugcuguccggccgcagcugcucccucaucuacaaggggaccuacgagcugcagacccuggagcucaacauggagacccugaacaugacgaugccgcugagcugcaccaagaacaacucccaccacuacauccgggucggcaacgagaccggccucgagcugacccugacgaacaccagcauccucaaccacaaguucugcaaccuguccgacgcccacaagcgcaaccuguacgaccacagccucauguccaucaucagcaccuuccaccuguccauccccaacuucaaccaguacgaggccaugagcugcgacuucaacgggggcaagaucaccgugcaguacaaccugucccacagcuucgccguggacgccgcggggcacugcggcacgcucgccaacgggguccugcagaccuucaugcggauggccuggggcggcuccuacaucgcccuggacagcgggugcggcaacugggacugcaucaugaccuccuaccaguaccucaucauccagaacaccacgugggacgaccacugccaguucagccgccccucccccaucggguaccugggccugcucagccagcggacccgcgacaucuacaucagccggcgccugcugggcaccuucaccuggacgcucuccgacagcgaggggaacgagaccccgggcggguacugccugacccgguggaugcugaucgaggcggagcucaagugcuucggcaacaccgccguggccaagugcaacgagaagcacgacgaggaguucugcgacaugcugcgccuguucgacuucaacaagcaggccauccggcgccucaagacggaggcccagauguccauccagcugaucaacaaggcggugaacgcccugaucaacgaccagcucaucaugaagaaccaccuccgggacaucaugugcauccccuacugcaacuacagccgcuacugguaccugaaccacaccuccaccgggaagaccagccugccccggugcuggcugaucuccaacggcagcuaccugaacgagacgaaguucuccgacgacaucgagcagcaggccgacaacaugaucaccgagaugcugcagaaggaguacaucgaccgccagggcaagacgccccucgggcuggucgaccuguucguguucagcaccuccuucuaccucaucagcaucuuccugcaccuggugaagaucccgacccaccggcacaucgucggcaagcccugccccaagccccaccgccucaaccacauggggaucugcuccugcggccuguacaagcagccgggggugcccgugcgguggaagcgcugaggacuaguaauaaggaaacuguaugaaugucugugggcaggaagugaagagauccuucuguaaagguuuuuggaauuaugucugcugaauaauaaacuuuuuugaaauaauaaaucugguagaaaaaugagaucuaaaaaaaaaaaaaaaaaaaaaaaaaaaaaaaaaaaaaaaaaaaaaaaaaaaaaaaaaaaaaaaaaaaaaaaaaaaaaaaaaaaaaaaaaaaaaaaaaaaa

SEQ ID NO: 36041 - RNA, 1788 nt, Artificial Sequence
  mRNA product Design b-4 (A100) comprising derived and/or modified sequence from LASV(AV;Clade V)__CCA30314__GPCmut9 (opt1)
aggagagucccgcagucggcguccagcggcucugcuuguucgugugugugucguugcaggccuuauucaagcuuaccaugggccagaucgugaccuucuuccaggaggucccccacgugaucgaggaggugaugaacaucguccugaucgcccucagcauccuggccgugcugaaggggcucuacaacaucgcgaccugcggccugaucgggcugaucacguuccuccugcugugcggccgcuccugcagcuccaaccucuacaaggggguguacgagcugcagagccuggaccucaacauggagacccugaacaugaccaugccgcuguccugcaccaagaacaacagccaccacuacauccgggucggcaacgacacgggccucgagcugacccugaccaacaccuccauccucaaccacaaguucugcaaccugagcgacgcccacaagaaggaccuguacgaccacgcccucauguccaucaucagcacguuccaccuguccauccccaacuucaaccaguacgaggccaugagcugcgacuucaacgggggcaagaucuccgugcaguacaaccugagccacuccuacgccaucgacgcggccaaccacugcgggaccguggccaacggcauccuccagaccuucaugcgcauggccuggggcgggagcuacaucgcgcuggacuccggcugcgggaacugggacugcaucaugaccagcuaccaguaccugaucauccagaacacgaccugggagaaccacugccaguucucccggcccagccccaucggcuaccucgggcugcugagccagcgcacccgggacaucuacaucucccgccggcuccugggcaccuucacguggacccugagcgacuccgagggcaacgccacccccgggggcuacugccucacccgcuggaugcugaucgaggccgagcugaagugcuucgggaacacggccgucgccaagugcaacgagaagcacgacgaggaguucugcgacaugcuccggcuguucgacuucaacaagcaggcgaucagccgccugaaguccgaggcccagaugagcauccagcucaucaacaaggccgugaacgcccugaucaacgaccagcugaucaugaagaaccaccuccgggacaucaugugcauccccuacugcaacuacuccaaguacugguaccugaaccacaccaucaccggcaagaccagccugcccaagugcuggcucguguccaacgggagcuaccugaacgagacgcacuucuccgacgacaucgagcagcaggccgacaacaugaucaccgagaugcugcagaaggaguacauggagcgccagggcaagaccccgcugggccucgucgaccuguucguguucagcaccuccuucuaccugaucagcaucuuccuccggcuggugaagaucccgacgcaccgccacaucgucgggaagcccugccccaagccccaccggcugaaccacaugggcaucugcuccugcgggcucuacaagcagccgggcgugcccgugcgcuggaagcggugaggacuaguaauaaggaaacuguaugaaugucugugggcaggaagugaagagauccuucuguaaagguuuuuggaauuaugucugcugaauaauaaacuuuuuugaaauaauaaaucugguagaaaaaugagaucuaaaaaaaaaaaaaaaaaaaaaaaaaaaaaaaaaaaaaaaaaaaaaaaaaaaaaaaaaaaaaaaaaaaaaaaaaaaaaaaaaaaaaaaaaaaaaaaaaaaa

SEQ ID NO: 36042 - RNA, 1785 nt, Artificial Sequence
  mRNA product Design b-4 (A100) comprising derived and/or modified sequence from LASV(Togo/2016/7082;Clade VI)__AMR44577__GPCmut9 (opt1)
aggagagucccgcagucggcguccagcggcucugcuuguucgugugugugucguugcaggccuuauucaagcuuaccaugggccagaucaucaccuucuuccaggaggugccccacgucaucgaggaggugaugaacaucgugcugaucgcccucagccugcuggccauccucaagggggucuacaacguggcgaccugcggcaucaucgggcuggugacguuccuguuccucugcggccgcuccugcagccugaucuacaagggguccuacgagcugcagacccucgagcugaacauggagacccugaacaugaccaugccgcucagcugcacgaagaacuccagccaccacuacauccgggucggcaacgagaccggccuggagcugacccucaccaacacguccaucaucaaccacaaguucugcaaccugagcgacgcccacaagcgcaaccuguacgaccacgcccucauguccauccugagcaccuuccaccuguccauccccaacuucaaccaguacgaggccaugagcugcgacuucaacgggggcaagaucuccgugcaguacaaccucagccacgccuacgcgguggacgccgccgagcacugcgggaccgucgccaacggcgugcugcagaccuucaugcggauggcguggggcggguccuacaucgcccuggacagcggcugcgggaacugggacugcaucaugacguccuaccaguaccucaucauccagaacaccaccugggaggaccacugccaguucagccgccccucccccaucggcuaccuggggcugcucagccagcggacccgcgacaucuacaucagccggcgccugcugggcacguucaccuggacccucuccgacagcgagggcaacgagacccccgggggcuacugccugacgcgguggaugcugaucgaggccgagcucaagugcuucgggaacaccgccguggccaagugcaacgagaagcacgacgaggaguucugcgacaugcugcgccuguucgacuucaacaagcaggcgauccagcggcucaaguccgaggcccagaugagcauccagcugaucaacaaggccgucaacgcccugaucaacgaccagcucaucaugaagaaccaccuccgcgacaugaugugcauccccuacugcaacuacuccaaguacugguaccugaaccacaccagcuccggccggaccagccugcccaagugcuggcugguguccaacgggagcuaccugaacgagacgcacuucuccgacgacaucgagcagcaggccgacaacaugaucaccgagaugcuccagaaggaguacaucgaccgccagggcaagaccccgcugggccugguggaccuguucgucuucagcaccuccuucuaccucaucagcaucuuccugcaccugaucaagaucccgacgcaccggcacaucguggggaagcccugccccaagccccaccgccucaaccacaugggcaucugcuccugcgggcuguacaagcagccgggcgugcccacccgguggaagcgcugaggacuaguaauaaggaaacuguaugaaugucugugggcaggaagugaagagauccuucuguaaagguuuuuggaauuaugucugcugaauaauaaacuuuuuugaaauaauaaaucugguagaaaaaugagaucuaaaaaaaaaaaaaaaaaaaaaaaaaaaaaaaaaaaaaaaaaaaaaaaaaaaaaaaaaaaaaaaaaaaaaaaaaaaaaaaaaaaaaaaaaaaaaaaaaaaa

SEQ ID NO: 36043 - RNA, 1785 nt, Artificial Sequence
  mRNA product Design b-4 (A100) comprising derived and/or modified sequence from LASV(KAK-428;Clade n.d. (VII))__ANH09740__GPCmut9 (opt1)
aggagagucccgcagucggcguccagcggcucugcuuguucgugugugugucguugcaggccuuauucaagcuuaccaugggccagaucgugaccuucuuccaggaggucccccacgugaucgaggaggugaugaacaucguccugaucgcccucagccugcuggccauccucaaggggcuguacaacuucgcgaccugcggcgugaucgggcugaucacguuccuccugcugugcggccgcuccugcagcgccaccuacaaggggcaguacgagcuccagacccuggagcugaacauggagucccucaacaugaccaugccgcugagcugcacgaagaacaacucccaccacuacauccgggccggcaacaacaccggccuggagcucacccugaccaacacgagcaucaucucccacaaguucugcaaccugagcgacgcccacaagaagaaccucuacgaccacacccugauguccaucaucaccaccuuccaccugagcauccccaacuucaaccaguacgaggccauguccugcgacuucaacgggggcaagaucagcauccaguacaaccucucccacagcuacgcgggggacgccgcccagcacugcggcacgguggccaacgggguccugcagaccuucaugcgcauggcguggggcggcuccuaccuggcccucgacagcgggugccggggcugggacugcaucaucuccagcuaccaguaccugaucauccagaacaccaccugggacgaccacugccaguucucccgccccagccccaucggguaccugggcuucgugagccagaagacgcgggacaucuacaucucccgccggcuccugggcaccuucaccuggacccugagcgacuccgaggggcacgacaugccgggcggguacugccucacgcgcuggaugcugaucgaggccgaccugaagugcuucggcaacaccgccguggccaagugcaacgagaagcacgacgaggaguucugcgacauguggcggcuguucgacuucaacaagcaggcgauccagcgccugaaggccgaggcccagaugaacauccagcugaucaacaaggccgucaacgcccucaucaacgaccagcugaugaugaagaaccaccuccgggacaucaugugcauccccuacugcaacuacagcaaguucugguaccucaacaacaccaccacggggcgcaccucccugccccggugcuggcugaucagcaacggcuccuaccucaacgagacccacuucagcgacgacaucgagcagcaggcggacaacaugaucaccgagaugcugcagaaggaguacauggaccgccagggcaagacgccccuggggcucguggaccuguucguguucuccaccagcuucuaccugaucaccaucuuccugcaccucgucaagaucccgacccaccggcacaucgugggcaagcccugccccaagccccaccgccugaaccacauggggaucugcuccugcggccuguacaagcagccgggggugcccguccgguggaagcgcugaggacuaguaauaaggaaacuguaugaaugucugugggcaggaagugaagagauccuucuguaaagguuuuuggaauuaugucugcugaauaauaaacuuuuuugaaauaauaaaucugguagaaaaaugagaucuaaaaaaaaaaaaaaaaaaaaaaaaaaaaaaaaaaaaaaaaaaaaaaaaaaaaaaaaaaaaaaaaaaaaaaaaaaaaaaaaaaaaaaaaaaaaaaaaaaaa

SEQ ID NO: 36044 - RNA, 1785 nt, Artificial Sequence; identical to SEQ ID NO: 36038
  mRNA product Design b-4 (A100) comprising derived and/or modified sequence from LASV(Pinneo-NIG-1969;Clade I)__AIT17836__GPCmut9 (opt1)

SEQ ID NO: 36045 - RNA, 1785 nt, Artificial Sequence
  mRNA product Design b-4 (A100) comprising derived and/or modified sequence from LASV(ISTH0009-NIG-2011;Clade II)__AIT17404__GPCmut9 (opt1)
aggagagucccgcagucggcguccagcggcucugcuuguucgugugugugucguugcaggccuuauucaagcuuaccaugggccagaucaucaccuucuuccaggaggugccccacgucaucgaggaggugaugaacaucgugcugaucgcccucagccugcuggccauccucaaggggaucuacaacgucgcgaccugcggccuguucgggcugguguccuuccuccugcugugcggccgcagcugcuccacgaccuacaaggggguguacgagcuccagacccuggagcuggacauggccagccucaacaugaccaugccgcuguccugcacgaagaacaacagccaccacuacaucauggucggcaacgagaccggccuggagcucacccugaccaacacguccaucaucaaccacaaguucugcaaccugagcgacgcccacaagaagaaccucuacgaccacgcccugauguccaucaucagcaccuuccaccuguccauccccaacuucaaccaguacgaggccaugagcugcgacuucaacgggggcaagaucuccgugcaguacaaccucagccacgcguacgccguggacgccgccaaccacugcgggaccaucgcgaacggcguccugcagaccuucaugcggauggccuggggcggguccuacaucgcccuggacagcggcugcggguccugggacugcaucaugacgagcuaccaguaccucaucauccagaacaccaccugggaggaccacugccaguucucccgccccagccccaucggcuaccuggggcugcucagccagcggacccgcgacaucuacaucucccggcgccugcugggcacguucaccuggacccucagcgacuccgagggcaacgagacccccgggggcuacugccugacgcgguggaugcugaucgaggccgagcucaagugcuucgggaacaccgccguggcgaagugcaacgagaagcacgacgaggaguucugcgacaugcugcgccuguucgacuucaacaagcaggccauccggcgccucaagaccgaggcccagaugagcauccagcugaucaacaaggccgugaacgcccugaucaacgaccagcucaucaugaagaaccaccuccgggacaucaugugcaucccguacugcaacuacuccaaguacugguaccugaaccacaccgucacgggcaagaccagccugccccgcugcuggcugguguccaacgggagcuaccugaacgagacccacuucuccgacgacaucgagcagcaggcggacaacaugaucaccgagcuccugcagaaggaguacauggaccggcagggcaagacgccccugggccugguggaccucuucgucuucagcaccuccuucuaccugaucagcaucuuccugcaccucaucaagaucccgacccaccgccacaucaccgggaagcccugccccaagccccaccggcugaaccacaugggcaucugcuccugcgggcuguacaagcacccgggcgugcccgugaaguggaagcgcugaggacuaguaauaaggaaacuguaugaaugucugugggcaggaagugaagagauccuucuguaaagguuuuuggaauuaugucugcugaauaauaaacuuuuuugaaauaauaaaucugguagaaaaaugagaucuaaaaaaaaaaaaaaaaaaaaaaaaaaaaaaaaaaaaaaaaaaaaaaaaaaaaaaaaaaaaaaaaaaaaaaaaaaaaaaaaaaaaaaaaaaaaaaaaaaaa

SEQ ID NO: 36046 - RNA, 1785 nt, Artificial Sequence
  mRNA product Design b-4 (A100) comprising derived and/or modified sequence from LASV(ISTH2010-NIG-2012;Clade II)__AIT17482__GPCmut9 (opt1)
aggagagucccgcagucggcguccagcggcucugcuuguucgugugugugucguugcaggccuuauucaagcuuaccaugggccagaucaucaccuucuuccaggaggugccccacgucaucgaggaggugaugaacaucgugcugaucgcccucagccugcuggccauccucaaggggaucuacaacgucgcgaccugcggccuguucgggcugguguccuuccuccugcugugcggccgcagcugcuccacgaccuacaaggggguguacgagcuccagacccuggagcuggacauggccagccucaacaugaccaugccgcuguccugcacgaagaacaacagccaccacuacaucauggucggcaacgagaccggccuggagcucacccugaccaacacguccaucaucaaccacaaguucugcaaccugagcgacgcccacaagaagaaccucuacgaccacgcccugauguccaucaucagcaccuuccaccuguccauccccaacuucaaccaguacgaggccaugagcugcgacuucaacgggggcaagaucuccgugcaguacaaccucagccacgcguacgccguggacgccgccaaccacugcgggaccaucgcgaacggcguccugcagaccuucaugcggauggccuggggcggguccuacaucgcccuggacagcggcugcggguccugggacugcaucaugacgagcuaccaguaccucaucauccagaacaucaccugggaggaccacugccaguucucccgccccagccccaucggcuaccuggggcugcucagccagcggacccgcgacaucuacaucucccggcgccugcugggcaccuucacguggacccucagcgacuccgagggcaacgagacccccgggggcuacugccugacccgguggaugcugaucgaggccgagcucaagugcuucgggaacacggccguggcgaagugcaacgagaagcacgacgaggaguucugcgacaugcugcgccuguucgacuucaacaagcaggccauccggcgccucaagaccgaggcccagaugagcauccagcugaucaacaaggccgugaacgcccugaucaacgaccagcucaucaugaagaaccaccuccgggacaucaugugcauccccuacugcaacuacuccaaguacugguaccugaaccacaccgucaccggcaagacgagccugccccgcugcuggcugguguccaacgggagcuaccugaacgagacccacuucuccgacgacaucgagcagcaggcggacaacaugaucaccgagcuccugcagaaggaguacaucgaccggcagggcaagaccccgcugggccugguggaccucuucgucuucagcacguccuucuaccugaucagcaucuuccugcaccucgugaagaucccgacccaccgccacguggucgggaagcccugccccaagccccaccggcugaaccacaugggcaucugcuccugcgggcuguacaagcacccgggcgugcccgugaaguggaagcgcugaggacuaguaauaaggaaacuguaugaaugucugugggcaggaagugaagagauccuucuguaaagguuuuuggaauuaugucugcugaauaauaaacuuuuuugaaauaauaaaucugguagaaaaaugagaucuaaaaaaaaaaaaaaaaaaaaaaaaaaaaaaaaaaaaaaaaaaaaaaaaaaaaaaaaaaaaaaaaaaaaaaaaaaaaaaaaaaaaaaaaaaaaaaaaaaaa

SEQ ID NO: 36047 - RNA, 1785 nt, Artificial Sequence
  mRNA product Design b-4 (A100) comprising derived and/or modified sequence from LASV(Lassa virus/H.sapiens-wt/NGA/2015/ISTH_0543;Clade II)__AVO03639__GPCmut9 (opt1)
aggagagucccgcagucggcguccagcggcucugcuuguucgugugugugucguugcaggccuuauucaagcuuaccaugggccagaucaucaccuucuuccaggaggugccccacgucaucgaggaggugaugaacaucgugcugaucgcccucagccugcuggccauccucaaggggaucuacaacgucgcgaccugcggccuguucgggcugguguccuuccuccugcugugcggccgcagcugcuccacgaccuacaaggggguguacgagcuccagacccuggagcuggacauggccaaccucaacaugaccaugccgcugagcugcacgaagaacaacucccaccacuacaucauggucggcaacgagaccggccuggagcucacccugaccaacacgagcaucaucaaccacaaguucugcaaccuguccgacgcccacaagaagaaccucuacgaccacgcccugaugagcaucaucuccaccuuccaccugagcauccccaacuucaaccaguacgaggccauguccugcgacuucaacgggggcaagaucagcgugcaguacaaccucucccacaccuacgcgguggacgccgccaaccacugcgggaccaucgccaacggcguccugcagacguucaugcggauggcguggggcgggagcuacaucgcccuggacuccggcugcgggagcugggacugcaucaugaccuccuaccaguaccucgugauccagaacaccaccugggaggaccacugccaguucagccgccccucccccaucggcuaccuggggcugcucagccagcggacgcgcgacaucuacaucagccggcgccugcugggcaccuucaccuggacccucuccgacagcgagggcaacgagacgcccgggggcuacugccugacccgguggaugcugaucgaggccgagcucaagugcuucgggaacaccgccguggccaagugcaacgagaagcacgacgaggaguucugcgacaugcugcgccuguucgacuucaacaagcaggcgauccggcgccucaagaccgaggcccagauguccauccagcugaucaacaaggccgucaacgcccugaucaacgaccagcucaucaugaagaaccaccuccgggacaucaugugcauccccuacugcaacuacagcaaguacugguaccugaaccacacggugaccggcaagaccucccugccccgcugcuggcuggugagcaacggguccuaccugaacgagacccacuucagcgacgacaucgagcagcaggccgacaacaugaucacggagcuccugcagaaggaguacaucgaccggcagggcaagaccccgcugggccuggucgaccucuucguguucuccaccagcuucuaccugaucuccaucuuccugcaccucgugaagaucccgacccaccgccacaucacggggaagcccugccccaagccccaccggcugaaccacaugggcaucugcagcugcgggcuguacaagcacccgggcguccccgugaaguggaagcgcugaggacuaguaauaaggaaacuguaugaaugucugugggcaggaagugaagagauccuucuguaaagguuuuuggaauuaugucugcugaauaauaaacuuuuuugaaauaauaaaucugguagaaaaaugagaucuaaaaaaaaaaaaaaaaaaaaaaaaaaaaaaaaaaaaaaaaaaaaaaaaaaaaaaaaaaaaaaaaaaaaaaaaaaaaaaaaaaaaaaaaaaaaaaaaaaaa

SEQ ID NO: 36048 - RNA, 1785 nt, Artificial Sequence
  mRNA product Design b-4 (A100) comprising derived and/or modified sequence from LASV(Lassa virus/H.sapiens-wt/NGA/2016/ISTH_0009;Clade II)__AVO03571__GPCmut9 (opt1)
aggagagucccgcagucggcguccagcggcucugcuuguucgugugugugucguugcaggccuuauucaagcuuaccaugggccagaucaucaccuucuuccaggaggugccccacgucaucgaggaggugaugaacaucgugcugaucgcccucagccugcuggccauccucaaggggaucuacaacgucgcgaccugcggccugcuggggcucguguccuuccugcugcucugcggccgcagcugcuccacgaccuacaaggggguguacgagcugcagacccuggagcucgacauggccagccugaacaugaccaugccgcuguccugcacgaagaacaacagccaccacuacaucauggucggcaacgagaccggccucgagcugacccugaccaacacguccaucaucaaccacaaguucugcaaccucagcgacgcccacaagaagaaccuguacgaccacgcccugauguccaucaucagcaccuuccaccucuccauccccaacuucaaccaguacgaggccaugagcugcgacuucaacgggggccggaucuccgugcaguacaaccugagccacuccuacgcgguggacgccgccaaccacugcgggaccaucgccaacggcguccugcagaccuucaugcgcauggcguggggcgggagcuacaucgcccucgacuccggcugcgggagcugggacugcaucaugacguccuaccaguaccugaucauccagaacaccaccugggaggaccacugccaguucagccggcccagccccaucggcuaccuggggcuccugucccagcgcacccgggacaucuacaucagccgccggcugcucggcacguucaccuggacccuguccgacagcgagggcaacgagacccccgggggcuacugccugacgcgcuggaugcucaucgaggccgagcugaagugcuucgggaacaccgccguggccaagugcaacgagaagcacgacgaggaguucugcgacaugcugcggcuguucgacuucaacaagcaggcgauccgccggcugaagaccgaggcccagauguccauccagcugaucaacaaggccgugaacgcccucaucaacgaccagcugaucaugaagaaccaccuccgcgacaucaugugcaucccguacugcaacuacagcaaguacugguaccucaaccacaccgucacgggcaagaccucccugccccggugcuggcuggugagcaacggguccuaccucaacgagacccacuucagcgacgacaucgagcagcaggccgacaacaugaucaccgagcugcugcagaaggaguacaucgaccgccagggcaagacgccccugggccucguggaccuguucgucuucuccaccagcuucuaccugaucuccaucuuccuccaccuggugaagaucccgacccaccggcacaucaccgggaagcccugccccaagccccaccgccugaaccacaugggcaucugcagcugcgggcucuacaaccacccgggcgugcccgucaaguggaagcggugaggacuaguaauaaggaaacuguaugaaugucugugggcaggaagugaagagauccuucuguaaagguuuuuggaauuaugucugcugaauaauaaacuuuuuugaaauaauaaaucugguagaaaaaugagaucuaaaaaaaaaaaaaaaaaaaaaaaaaaaaaaaaaaaaaaaaaaaaaaaaaaaaaaaaaaaaaaaaaaaaaaaaaaaaaaaaaaaaaaaaaaaaaaaaaaaa

SEQ ID NO: 36049 - RNA, 1785 nt, Artificial Sequence
  mRNA product Design b-4 (A100) comprising derived and/or modified sequence from LASV(Lassa virus/H.sapiens-wt/NGA/2016/ISTH_0017;Clade II)__AVO03567__GPCmut9 (opt1)
aggagagucccgcagucggcguccagcggcucugcuuguucgugugugugucguugcaggccuuauucaagcuuaccaugggccagaucaucaccuucuuccaggaggugccccacgucaucgaggaggugaugaacaucgugcugaucgcccucagccugcuggccauccucaaggggaucuacaacgucgcgaccugcggccuguucgggcugguguccuuccuccugcugugcggccgcagcugcuccacgaccuacaaggggguguacgagcuccagacccuggagcuggacauggccagccucaacaugaccaugccgcuguccugcacgaagaacaacagccaccacuacaucauggucggcaacgagaccggccuggagcucacccugaccaacacguccaucaucaaccacaaguucugcaaccugagcgacgcccacaagaagaaccucuacgaccacgcccugauguccaucaucagcaccuuccaccuguccauccccaacuucaaccaguacgaggccaugagcugcgacuucaacgggggcaagaucuccgugcaguacaaccucagccacaccuacgcgaucgacgccgccaaccacugcgggaccaucgccaacggcgugcugcagacguucaugcggauggcguggggcggguccuacaucgcccuggacagcggcugcggguccugggacugcaucaugaccagcuaccaguaccucaucauccagaacaccaccugggaggaccacugccaguucucccgccccagccccaucggcuaccuggggcugcucagccagcggacgcgcgacaucuacaucucccggcgccugcugggcaccuucaccuggacccucagcgacuccgagggcaacgagacgcccgggggcuacugccugacccgguggaugcugaucgaggccgagcucaagugcuucgggaacaccgccgucgccaagugcaacgagaagcacgacgaggaguucugcgacaugcugcgccuguucgacuucaacaagcaggcgauccggcgccucaagaccgaggcccagaugagcauccagcugaucaacaaggccgugaacgcccugaucaacgaccagcucaucaugaagaaccaccuccgggacaucaugugcauccccuacugcaacuacuccaaguacugguaccugaaccacacggugaccggcaagaccagccugccccgcugcuggcuggucuccaacgggagcuaccugaacgagacccacuucuccgacgacaucgagcagcaggccgacaacaugaucacggagcuccugcagaaggaguacauggaccggcagggcaagaccccgcugggccugguggaccucuucguguucagcaccuccuucuaccugaucagcaucuuccugcaccucguccgcaucccgacccaccggcacgugaucgggaagcccugccccaagccccaccgccugaaccacaugggcaucugcuccugcgggcuguacaagcacccgggcgugcccgucaaguggaagcggugaggacuaguaauaaggaaacuguaugaaugucugugggcaggaagugaagagauccuucuguaaagguuuuuggaauuaugucugcugaauaauaaacuuuuuugaaauaauaaaucugguagaaaaaugagaucuaaaaaaaaaaaaaaaaaaaaaaaaaaaaaaaaaaaaaaaaaaaaaaaaaaaaaaaaaaaaaaaaaaaaaaaaaaaaaaaaaaaaaaaaaaaaaaaaaaaa

SEQ ID NO: 36050 - RNA, 1785 nt, Artificial Sequence
  mRNA product Design b-4 (A100) comprising derived and/or modified sequence from LASV(Lassa virus/H.sapiens-wt/NGA/2018/ISTH_0959;Clade II)__AVV65099__GPCmut9 (opt1)
aggagagucccgcagucggcguccagcggcucugcuuguucgugugugugucguugcaggccuuauucaagcuuaccaugggccagaucaucaccuucuuccaggaggugccccacgucaucgaggaggugaugaacaucgugcugaucgcccucagccugcuggccauccucaaggggaucuacaacgucgugaccugcggccuguucgggcugguguccuuccuccugcugugcggccgcagcugcuccacgaccuacaagggggucuacgagcuccagacccuggagcuggacauggcgagccucaacaugaccaugccgcuguccugcacgaagaacaacagccaccacuacaucauggugggcaacgagaccggccuggagcucacccugaccaacacguccaucaucaaccacaaguucugcaaccugagcgacgcccacaagaagaaccucuacgaccacgcccugauguccaucaucagcaccuuccaccuguccauccccaacuucaaccaguacgaggccaugagcugcgacuucaacgggggcaagaucuccgugcaguacaaccucagccacgccuacgcgaucgacgccgccaaccacugcgggaccaucgccaacggcguccugcagaccuucaugcggauggcguggggcggguccuacaucgcccuggacagcggcugcggguccugggacugcaucaugacgagcuaccaguaccucaucauccagaacaccaccugggaggaccacugccaguucucccgccccagccccaucggcuaccuggggcugcucagccagcggacccgcgacaucuacaucucccggcgccugcugggcacguucaccuggacccucagcgacuccgagggcaacgagacccccgggggcuacugccugacgcgguggaugcugaucgaggccgagcucaagugcuucgggaacaccgccguggccaagugcaacgagaagcacgacgaggaguucugcgacaugcugcgccuguucgacuucaacaagcaggcgauccggcgccucaagaccgaggcccagaugagcauccagcugaucaacaaggccgugaacgcccugaucaacgaccagcucaucaugaagaaccaccuccgggacaucaugugcaucccguacugcaacuacuccaaguacugguaccugaaccacaccgucacgggcaagaccagccugccccgcugcuggcugguguccaacgggagcuaccugaacgagacccacuucuccgacgacaucgagcagcaggccgacaacaugaucaccgagcuccugcagaaggaguacaucgaccggcagggcaagacgccccugggccugguggaccucuucgucuucagcaccuccuucuaccugaucagcaucuuccugcaccucgugaagaucccgacccaccgccacgugaucgggaagcccugccccaagccccaccggcugaaccacaugggcaucugcuccugcgggcuguacaagcacccgggcguccccgugaaguggaagcgcugaggacuaguaauaaggaaacuguaugaaugucugugggcaggaagugaagagauccuucuguaaagguuuuuggaauuaugucugcugaauaauaaacuuuuuugaaauaauaaaucugguagaaaaaugagaucuaaaaaaaaaaaaaaaaaaaaaaaaaaaaaaaaaaaaaaaaaaaaaaaaaaaaaaaaaaaaaaaaaaaaaaaaaaaaaaaaaaaaaaaaaaaaaaaaaaaa

SEQ ID NO: 36051 - RNA, 1785 nt, Artificial Sequence
  mRNA product Design b-4 (A100) comprising derived and/or modified sequence from LASV(LASV003-NIG-2008;Clade II)__AIT17580__GPCmut9 (opt1)
aggagagucccgcagucggcguccagcggcucugcuuguucgugugugugucguugcaggccuuauucaagcuuaccaugggccagaucaucaccuucuuccaggaggugccccacgucaucgaggaggugaugaacaucgugcugaucgcccucagccugcuggccauccucaaggggaucuacaacgucgcgaccugcggccuguucgggcugguguccuuccuccugcugugcggccgcagcugcuccacgaccuacaaggggguguacgagcuccagacccuggagcuggacauggccagccucaacaugaccaugccgcuguccugcacgaagaacaacagccaccacuacaucauggucggcaacgagaccggccuggagcucacccugaccaacacguccaucaucaaccacaaguucugcaaccugagcgacgcccacaagaagaaccucuacgaccacgcccugauguccaucaucagcaccuuccaccuguccauccccaacuucaaccaguacgaggccaugagcugcgacuucaacgggggcaagaucuccgugcaguacaaccucagccacaccuacgcgguggacgccgccaaccacugcgggaccaucgccaacggcguccugcagacguucaugcggauggcguggggcggguccuacaucgcccuggacagcggcugcggguccugggacugcaucaugaccagcuaccaguaccucaucauccagaacaccaccugggaggaccacugccaguucucccgccccagccccaucggcuaccuggggcugcucagccagcggacgcgcgacaucuacaucucccggcgccugcugggcaccuucaccuggacccucagcgacuccgagagcaacgagacgccgggcggguacugccugacccgguggaugcugaucgaggccgagcucaagugcuucggcaacaccgccguggccaagugcaacgagaagcacgacgaggaguucugcgacaugcugcgccuguucgacuucaacaagcaggcgauccggcgccucaaggccgaggcccagauguccauccagcugaucaacaaggccgugaacgcccugaucaacgaccagcucaucaugaagaaccaccuccgggacaucaugugcauccccuacugcaacuacagcaaguacugguaccugaaccacaccgucacggggcgcaccucccugccccggugcuggcuggugagcaacggcuccuaccugaacgagacccacuucagcgacgacaucgagcagcaggcggacaacaugaucaccgagcuccugcagaaggaguacauggaccgccaggggaagacgccccugggccugguggaccucuucgucuucuccaccagcuucuaccugaucuccaucuuccugcaccucgugaagaucccgacccaccggcacgugaucggcaagcccugccccaagccccaccgccugaaccacauggggaucugcagcugcggccuguacaagcacccggggguccccgugaaguggaagcggugaggacuaguaauaaggaaacuguaugaaugucugugggcaggaagugaagagauccuucuguaaagguuuuuggaauuaugucugcugaauaauaaacuuuuuugaaauaauaaaucugguagaaaaaugagaucuaaaaaaaaaaaaaaaaaaaaaaaaaaaaaaaaaaaaaaaaaaaaaaaaaaaaaaaaaaaaaaaaaaaaaaaaaaaaaaaaaaaaaaaaaaaaaaaaaaaa

SEQ ID NO: 36052 - RNA, 1785 nt, Artificial Sequence
  mRNA product Design b-4 (A100) comprising derived and/or modified sequence from LASV(LASV035-NIG-2009;Clade II)__AIT17588__GPCmut9 (opt1)
aggagagucccgcagucggcguccagcggcucugcuuguucgugugugugucguugcaggccuuauucaagcuuaccaugggccagaucaucaccuucuuccaggaggugccccacgucaucgaggaggugaugaacaucgugcugaucgcccucagccugcuggccauccucaaggggaucuacaacgucgcgaccugcggccuguucgggcugguguccuuccuccugcugugcggccgcagcugcuccacgaccuacaaggggguguacgagcuccagacccuggagcuggacauggccagccucaacaugaccaugccgcuguccugcacgaagaacaacagccaccacuacaucauggucggcaacgagaccggccuggagcucacccugaccaacacguccaucaucaaccacaaguucugcaaccugagcgacgcccacaagaagaaccucuacgaccacgcccugauguccaucaucagcaccuuccaccuguccauccccaacuucaaccaguacgaggccaugagcugcgacuucaacgggggcaagaucuccgugcaguacaaccucagccacgcguacgccguggacgccgccaaccacugcgggaccaucgcgaacggcguccugcagaccuucaugcggauggccuggggcggguccuacaucgcccuggacagcggcugcggguccugggacugcaucaugacgagcuaccaguaccucaucauccagaacaccaccugggaggaccacugccaguucucccgccccagccccaucggcuaccuggggcugcucagccagcggacccgcgacaucuacaucucccggcgccugcugggcacguucaccuggacccucagcgacuccgagggcaacgagacccccgggggcuacugccugacgcgguggaugcugaucgaggccgagcucaagugcuucgggaacaccgccguggcgaagugcaacgagaagcacgacgaggaguucugcgacaugcugcgccuguucgacuucaacaagcaggccauccggcgccucaaggccgaggcccagaugagcauccagcugaucaacaaggccgugaacgcgcugaucaacgaccagcucaucaugaagaaccaccuccgggacaucaugugcauccccuacugcaacuacuccaaguacugguaccugaaccacaccgucaccggcaagacgagccugccccgcugcuggcugguguccaacgggagcuaccugaacgagacccacuucuccgacgacaucgagcagcaggccgacaacaugaucaccgagcuccugcagaaggaguacaucgaccggcagggcaagaccccgcugggccugguggaccucuucgucuucagcacguccuucuaccugaucagcaucuuccugcaccucgugaagaucccgacccaccgccacgugaucgggaagcccugccccaagccccaccggcugaaccacaugggcaucugcuccugcgggcuguacaagcacccgggcguccccgugaaguggaagcgcugaggacuaguaauaaggaaacuguaugaaugucugugggcaggaagugaagagauccuucuguaaagguuuuuggaauuaugucugcugaauaauaaacuuuuuugaaauaauaaaucugguagaaaaaugagaucuaaaaaaaaaaaaaaaaaaaaaaaaaaaaaaaaaaaaaaaaaaaaaaaaaaaaaaaaaaaaaaaaaaaaaaaaaaaaaaaaaaaaaaaaaaaaaaaaaaaa

SEQ ID NO: 36053 - RNA, 1785 nt, Artificial Sequence
  mRNA product Design b-4 (A100) comprising derived and/or modified sequence from LASV(LASV1000-NIG-2009;Clade II)__AIT17782__GPCmut9 (opt1)
aggagagucccgcagucggcguccagcggcucugcuuguucgugugugugucguugcaggccuuauucaagcuuaccaugggccagaucaucaccuucuuccaggaggugccccacgucaucgaggaggugaugaacaucgugcugaucgcccucagccugcuggccauccucaaggggaucuacaacgucgcgaccugcggccuguucgggcugguguccuuccuccugcugugcggccgcagcugcuccacgaccuacaaggggguguacgagcuccagacccuggagcuggacauggccagccucaacaugaccaugccgcuguccugcacgaagaacaacagccaccacuacaucauggucggcaacgagaccggccuggagcucacccugaccaacacguccaucaucaaccacaaguucugcaaccugagcgacgcccacaagaagaaccucuacgaccacgcccugauguccaucaucagcaccuuccaccuguccauccccaacuucaaccaguacgaggccaugagcugcgacuucaacgggggcaagaucuccgugcaguacaaccucagccacaccuacgcgguggacgccgccaaccacugcgggaccaucgccaacggcguccugcagacguucaugcggauggcguggggcggguccuacaucgcccuggacagcggcugcggguccugggacugcaucaugaccagcuaccaguaccucaucauccagaacaccaccugggaggaccacugccaguucucccgccccagccccaucggcuaccuggggcugcucagccagcggacgcgcgacaucuacaucucccggcgccugcugggcaccuucaccuggacccucagcgacuccgagggcaacgagacgcccgggggcuacugccugacccgguggaugcugaucgaggccgagcucaagugcuucgggaacaccgccguggccaagugcaacgagaagcacgacgaggaguucugcgacaugcugcgccuguucgacuucaacaagcaggcgaucaagcggcucaagaccgaggcccagaugagcauccagcugaucaacaaggccgugaacgcccugaucaacgaccagcucaucaugaagaaccaccuccgcgacaucaugugcauccccuacugcaacuacuccaaguacugguaccugaaccacacggucaccggcaagaccagccugccccggugcuggcugguguccaacgggagcuaccugaacgagacccacuucuccgacgacaucgagcagcaggccgacaacaugaucacggagcuccugcagaaggaguacaucgaccgccagggcaagaccccgcugggccugguggaccucuucgucuucagcaccuccuucuaccugaucagcaucuuccugcaccucgugaagaucccgacccaccggcacguggucgggaagcccugccccaagccccaccgccugaaccacaugggcaucugcuccugcgggcuguacaagcacccgggcgugcccgugaaguggaagcggugaggacuaguaauaaggaaacuguaugaaugucugugggcaggaagugaagagauccuucuguaaagguuuuuggaauuaugucugcugaauaauaaacuuuuuugaaauaauaaaucugguagaaaaaugagaucuaaaaaaaaaaaaaaaaaaaaaaaaaaaaaaaaaaaaaaaaaaaaaaaaaaaaaaaaaaaaaaaaaaaaaaaaaaaaaaaaaaaaaaaaaaaaaaaaaaaa

SEQ ID NO: 36054 - RNA, 1785 nt, Artificial Sequence
  mRNA product Design b-4 (A100) comprising derived and/or modified sequence from LASV(LASV221-NIG-2010;Clade II)__AIT17624__GPCmut9 (opt1)
aggagagucccgcagucggcguccagcggcucugcuuguucgugugugugucguugcaggccuuauucaagcuuaccaugggccagaucaucaccuucuuccaggaggugccccacgucaucgaggaggugaugaacaucgugcugaucgcccucagccugcuggccauccucaaggggaucuacaacgucgcgaccugcggccuguucgggcugguguccuuccuccugcugugcggccgcagcugcuccacgaccuacaaggggguguacgagcuccagacccuggagcuggacauggccagccucaacaugaccaugccgcuguccugcacgaagaacaacagccaccacuacaucauggucggcaacgagaccggccuggagcucacccugaccaacacguccaucaucaaccacaaguucugcaaccugagcgacgcccacaagaagaaccucuacgaccacgcccugauguccaucaucagcaccuuccaccuguccauccccaacuucaaccaguacgaggccaugagcugcgacuucaacgggggcaagaucuccgugcaguacaaccucagccacaccuacgcgaucgacgccgccaaccacugcgggaccaucgccaacggcgugcugcagacguucaugcggauggcguggggcggguccuacaucgcccuggacagcggcugcggguccugggacugcaucaugaccagcuaccaguaccucaucauccagaacaccaccugggaggaccacugccaguucucccgccccagccccaucggcuaccuggggcugcucagccagcggacgcgcgacaucuacaucucccggcgccugcugggcaccuucaccuggacccucagcgacuccgagggcaacgagacgcccgggggcuacugccugacccgguggaugcugaucgaggccgagcucaagugcuucgggaacaccgccgucgccaagugcaacgagaagcacgacgaggaguucugcgacaugcugcgccuguucgacuucaacaagcaggcgauccggcgccucaagaccgaggcccagaugagcauccagcugaucaacaaggccgugaacgcccugaucaacgaccagcucaucaugaagaaccaccuccgggacaucaugugcauccccuacugcaacuacuccaaguacugguaccugaaccacacggugaccggcaagaccagccugccccgcugcuggcuggucuccaacgggagcuaccugaacgagacccacuucuccgacgacaucgagcagcaggccgacaacaugaucacggagaugcuccagaaggaguacauggaccggcagggcaagaccccgcugggccugguggaccuguucguguucagcaccuccuucuaccucaucagcaucuuccugcaccuggucaagaucccgacccaccgccacgugaucgggaagcccugccccaagccccaccggcucaaccacaugggcaucugcuccugcgggcuguacaagcacccgggcgugcccgucaaguggaagcgcugaggacuaguaauaaggaaacuguaugaaugucugugggcaggaagugaagagauccuucuguaaagguuuuuggaauuaugucugcugaauaauaaacuuuuuugaaauaauaaaucugguagaaaaaugagaucuaaaaaaaaaaaaaaaaaaaaaaaaaaaaaaaaaaaaaaaaaaaaaaaaaaaaaaaaaaaaaaaaaaaaaaaaaaaaaaaaaaaaaaaaaaaaaaaaaaaa

SEQ ID NO: 36055 - RNA, 1785 nt, Artificial Sequence
  mRNA product Design b-4 (A100) comprising derived and/or modified sequence from LASV(LASV237-NIG-2010;Clade II)__AIT17638__GPCmut9 (opt1)
aggagagucccgcagucggcguccagcggcucugcuuguucgugugugugucguugcaggccuuauucaagcuuaccaugggccagaucaucaccuucuuccaggaggugccccacgucaucgaggaggugaugaacaucgugcugaucgcccucagccugcuggccauccucaaggggaucuacaacgucgcgaccugcggccuguucgggcugguguccuuccuccugcugugcggccgcagcugcuccacgaccuacaaggggguguacgagcuccagacccuggagcuggacauggccagccucaacaugaccaugccgcuguccugcacgaagaacaacagccaccacuacaucauggucggcaacgagaccggccuggagcucacccugaccaacacguccaucaucaaccacaaguucugcaaccugagcgacgcccacaagaaggaccucuacgaccacgcccugauguccaucaucagcaccuuccaccuguccauccccaacuucaaccaguacgaggccaugagcugcgacuucaacgggggcaagaucuccgugcaguacaaccucagccacaccuacgcgguggacgccgccaaccacugcgggaccaucgccaacggcguccugcagacguucaugcggauggcguggggcggguccuacaucgcccuggacagcggcugcggguccugggacugcaucaugaccagcuaccaguaccucaucauccagaacaccaccugggaggaccacugccaguucucccgccccagccccaucggcuaccuggggcugcucagccagcggacgcgcgacaucuacaucucccggcgccugcugggcaccuucaccuggacccucagcgacuccgagggcaacgagacgcccgggggcuacugccugacccgguggaugcugaucgaggccgagcucaagugcuucgggaacaccgccguggccaagugcaacgagaagcacgacgaggaguucugcgacaugcugcgccuguucgacuucaacaagcaggcgauccggcgccucaagaccgaggcccagaugagcauccagcugaucaacaaggccgugaacgcccugaucaacgaccagcucaucaugaagaaccaccuccgggacaucaugugcauccccuacugcaacuacuccaaguacugguaccugaaccacacggucaccggcaagaccagccugccccgcugcuggcugguguccaacgggagcuaccugaacgagacccacuucuccgacgacaucgagcagcaggccgacaacaugaucacggagcuccugcagaaggaguacauggaccggcagggcaagaccccgcugggccugguggaccucuucgucuucagcaccuccuucuaccugaucagcaucuuccugcaccucaucaagaucccgacccaccgccacaucacggggaagcccugccccaagccccaccggcugaaccacaugggcaucugcuccugcgggcuguacaagcacccgggcgugcccgugaaguggaagcgcugaggacuaguaauaaggaaacuguaugaaugucugugggcaggaagugaagagauccuucuguaaagguuuuuggaauuaugucugcugaauaauaaacuuuuuugaaauaauaaaucugguagaaaaaugagaucuaaaaaaaaaaaaaaaaaaaaaaaaaaaaaaaaaaaaaaaaaaaaaaaaaaaaaaaaaaaaaaaaaaaaaaaaaaaaaaaaaaaaaaaaaaaaaaaaaaaa

SEQ ID NO: 36056 - RNA, 1785 nt, Artificial Sequence
  mRNA product Design b-4 (A100) comprising derived and/or modified sequence from LASV(LASV253-NIG-2011;Clade II)__AIT17670__GPCmut9 (opt1)
aggagagucccgcagucggcguccagcggcucugcuuguucgugugugugucguugcaggccuuauucaagcuuaccaugggccagaucaucaccuucuuccaggaggugccccacgucaucgaggaggugaugaacaucgugcugaucgcccucagccugcuggccauccucaaggggaucuacaacgucgcgaccugcggccuguucgggcugguguccuuccuccugcugugcggccgcagcugcuccacgaccuacaaggggguguacgagcuccagacccuggagcuggacauggccagccucaacaugaccaugccgcuguccugcacgaagaacaacagccaccacuacaucauggucggcaacgagaccggccuggagcucacccugaccaacacguccaucaucaaccacaaguucugcaaccugagcgacgcccacaagaagaaccucuacgaccacgcccugauguccaucaucagcaccuuccaccuguccauccccaacuucaaccaguacgaggccaugagcugcgacuucaacgggggcaagaucuccgugcaguacaaccucagccacaccuacgcgguggacgccgccaaccacugcgggaccaucgccaacggcguccugcagacguucaugcggauggcguggggcggguccuacaucgcccuggacagcggcugcggguccugggacugcaucaugaccagcuaccaguaccucaucauccagaacaccaccugggaggaccacugccaguucucccgccccagccccaucggcuaccuggggcugcucagccagcggacgcgcgacaucuacaucucccggcgccugcugggcaccuucaccuggacccucagcgacuccgagggcaacgagacgcccgggggcuacugccugacccgguggaugcugaucgaggccgagcucaagugcuucgggaacaccgccguggccaagugcaacgagaagcacgacgaggaguucugcgacaugcugcgccuguucgacuucaacaagcaggcgauccggcgccucaaggccgaggcccagaugagcauccagcugaucaacaaggccgugaacgcccugaucaacgaccagcucaucaugaagaaccaccuccgggacaucaugugcaucccguacugcaacuacuccaaguacugguaccugaaccacaccgucacgggccgcaccagccugccccggugcuggcugguguccaacgggagcuaccugaacgagacccacuucuccgacgacaucgagcagcaggcggacaacaugaucaccgagcuccugcagaaggaguacaucgaccgccagggcaagacgccccugggccugguggaccucuucgucuucagcaccuccuucuaccugaucagcaucuuccugcaccucgugaagaucccgacccaccggcacaucaucgggaagcccugccccaagccccaccgccugaaccacaugggcaucugcuccugcgggcuguacaagcacccgggcgugcccgucaaguggaagcggugaggacuaguaauaaggaaacuguaugaaugucugugggcaggaagugaagagauccuucuguaaagguuuuuggaauuaugucugcugaauaauaaacuuuuuugaaauaauaaaucugguagaaaaaugagaucuaaaaaaaaaaaaaaaaaaaaaaaaaaaaaaaaaaaaaaaaaaaaaaaaaaaaaaaaaaaaaaaaaaaaaaaaaaaaaaaaaaaaaaaaaaaaaaaaaaaa

SEQ ID NO: 36057 - RNA, 1785 nt, Artificial Sequence
  mRNA product Design b-4 (A100) comprising derived and/or modified sequence from LASV(LASV254-NIG-2011;Clade II)__AIT17674__GPCmut9 (opt1)
aggagagucccgcagucggcguccagcggcucugcuuguucgugugugugucguugcaggccuuauucaagcuuaccaugggccagaucaucaccuucuuccaggaggugccccacgucaucgaggaggugaugaacaucgugcugaucgcccucagccugcuggccauccucaaggggaucuacaacgucgcgaccugcggccuguucgggcugguguccuuccuccugcugugcggccgcagcugcuccacgaccuacaaggggguguacgagcuccagacccuggagcuggacaugaccaaccucaacaugacgaugccgcugagcugcaccaagaacaacucccaccacuacaucauggucggcaacgagaccggccuggagcucacccugacgaacaccagcaucaucaaccacaaguucugcaaccuguccgacgcccacaagaagaaccucuacaaccacgcccugaugagcaucaucuccaccuuccaccugagcauccccaacuucaaccaguacgaggccauguccugcgacuucaacgggggcaagaucagcgugcaguacaaccucucccacagcuacgccguggacgcggccaaccacugcgggaccaucgccaacggcguccugcagacguucaugcggauggccuggggcggguccuacaucgcgcuggacagcggcugcgggaacugggacugcaucaugaccuccuaccaguaccucaucauccagaacaccaccugggaggaccacugccaguucagccgccccucccccaucggcuaccuggggcugcucagccagcggacgcgcgacaucuacaucagccggcgccugcugggcaccuucaccuggacccucuccgacagcgagggcaacgagacgcccgggggcuacugccugacccgguggaugcugaucgaggccgagcucaagugcuucgggaacaccgccguggccaagugcaacgagaagcacgacgaggaguucugcgacaugcugcgccuguucgacuucaacaagcaggccauccggcgccucaagaccgaggcgcaggccaacauccagcugaucaacaaggccgugaacgcccugaucaacgaccagcucaucaugaagaaccaccuccgggacaucaugugcauccccuacugcaacuacuccaaguacugguaccugaaccacacggucaccggcaagaccagccugccccgcugcuggcugguguccaacgggagcuaccugaacgagacccacuucuccgacgacaucgagcagcaggccgacaacaugaucacggagcuccugcagaaggaguacauggaccggcagggcaagaccccgcugggccugguggaccucuucgucuucagcaccuccuucuaccugaucagcaucuuccugcaccucgugaagaucccgacccaccgccacgugaucgggaagcccugccccaagccccaccggcugaaccacaugggcaucugcuccugcgggcuguacaagcacccgggcguccccgugaaguggaagcgcugaggacuaguaauaaggaaacuguaugaaugucugugggcaggaagugaagagauccuucuguaaagguuuuuggaauuaugucugcugaauaauaaacuuuuuugaaauaauaaaucugguagaaaaaugagaucuaaaaaaaaaaaaaaaaaaaaaaaaaaaaaaaaaaaaaaaaaaaaaaaaaaaaaaaaaaaaaaaaaaaaaaaaaaaaaaaaaaaaaaaaaaaaaaaaaaaa

SEQ ID NO: 36058 - RNA, 1785 nt, Artificial Sequence
  mRNA product Design b-4 (A100) comprising derived and/or modified sequence from LASV(Nig08-A19;Clade III)__ADU56618__GPCmut9 (opt1)
aggagagucccgcagucggcguccagcggcucugcuuguucgugugugugucguugcaggccuuauucaagcuuaccaugggccagaucgugaccuucuuccaggaggucccccacgugaucgaggaggugaugaacaucguccugaucgcccucagcauccuggccauccugaaggggcucuacaacaucgcgaccugcggccugaucgggcuggugacguuccuccugcuguccggccgcagcugcuccaugaccuacaaggggguguacgagcuccagacccuggagcugaacaugaacacccucaacaugacgaugccgcugagcugcaccaagaacaacucccaccacuacaucauggucggcaacgagaccggccuggagcucacccugacgaacaccagccugcuccaccacaaguucugcaaccuguccgacgcccacaagaagaaccuguacgaccacacccucaugagcaucaucuccaccuuccaccugagcauccccaacuucaaccaguacgaggccauguccugcgacuucaacgggggcaagaucacggugcaguacaaccugagccacuccuacgccaucgacgccgcgaaccacugcgggaccguggccaacggcguccuccagaccuucaugcggauggccuggggcgggagcuacaucgcccuggacuccggcugcgggaagugggacugcaucaugaccagcuaccaguaccugaucauccagaacacgaccugggaggaccacugccaguucucccgccccagccccaucggcuaccucgggcugcugucccagcggacccgcgacaucuacaucagccggcgccuccugggcaccuucacguggacccugagcgacuccgagggcaacgagacccccgggggcuacugccucacccgguggaugcugaucgaggcggagcugaagugcuucgggaacacggccguggccaagugcaacgagaagcacgacgaggaguucugcgacaugcuccgccuguucgacuucaacaagcaggccauccggcgccugaaggccgaggcgcagaugagcauccagcucaucaacaaggccgugaacgcccugaucaacgaccagcugaucaugaagaaccaccuccgggacaucaugugcauccccuacugcaacuacuccaaguacugguaccugaaccacaccagcaccggccgcaccucccugccccggugcuggcucgucagcaacggguccuaccugaacgagacgcacuucagcgacgacaucgagcagcaggccgacaacaugaucaccgagaugcugcagaaggaguaccuggaccgccagggcaagaccccgcucggccugguggaccuguucguguucuccaccagcuucuaccucaucuccaucuuccugcaccuggucaagaucccgacgcaccggcacaucguggggaagcccugccccaagccccaccgccucaaccacaugggcaucugcagcugcgggcuguacaagcagccgggcgugcccguccgguggaagcgcugaggacuaguaauaaggaaacuguaugaaugucugugggcaggaagugaagagauccuucuguaaagguuuuuggaauuaugucugcugaauaauaaacuuuuuugaaauaauaaaucugguagaaaaaugagaucuaaaaaaaaaaaaaaaaaaaaaaaaaaaaaaaaaaaaaaaaaaaaaaaaaaaaaaaaaaaaaaaaaaaaaaaaaaaaaaaaaaaaaaaaaaaaaaaaaaaa

SEQ ID NO: 36059 - RNA, 1788 nt, Artificial Sequence
  mRNA product Design b-4 (A100) comprising derived and/or modified sequence from LASV(G1180-SLE-2010;Clade IV)__AIT17168__GPCmut9 (opt1)
aggagagucccgcagucggcguccagcggcucugcuuguucgugugugugucguugcaggccuuauucaagcuuaccaugggccagaucgugaccuucuuccaggaggucccccacgugaucgaggaggugaugaacaucguccugaucgcccucagcauccuggccgugcugaaggggcucuacaacuucgcgaccugcggccugguggggcugcucaccuuccugcugcucugcggccgcuccugcaccgccagccgguacaagggggucuacgagcugcagacccuggagcucaacauggagacccugaacaugacgaugccgcuguccugcaccaagaacaacagccaccacuacaucauggugggcaacgagaccggccucgagcugacccugacgaacaccuccaucaucaaccacaaguucugcaaccucagcgacgcccacaagaagaaccuguacgaccacgcccugauguccaucaucagcaccuuccaccucuccauccccaacuucaaccaguacgaggccaugagcugcgacuucaacgggggcaagaucuccgugcaguacaaccugagccacuccuacgcgggggacgccgccaaccacugcggcaccgucgccaacggggugcugcagacguucaugcgcauggcguggggcggcagcuacaucgcccucgacuccgggugcggcagcugggacugcaucaugaccuccuaccaguaccugaucauccagaacaccaccugggaggaccacugccaguucagccggcccucccccaucggguaccugggccuccugagccagcgcacgcgggacaucuacaucagccgccggcugcucggcaccuucaccuggacccuguccgacagcgaggggaaggacacgccgggcggguacugccugacccgcuggaugcucaucgaggccgagcugaagugcuucggcaacaccgccguggccaagugcaacgagaagcacgacgaggaguucugcgacaugcugcggcuguucgacuucaacaagcaggcgauccagcgccugaaggccgaggcccagauguccauccagcugaucaacaaggccgucaacgcccucaucaacgaccagcugaucaugaagaaccaccuccgggacaucaugugcauccccuacugcaacuacagcaaguacugguaccucaaccacaccacgaccgggaagaccucccugcccaagugcuggcuggugagcaacggcuccuaccucaacgagacccacuucagcgacgacaucgagcagcaggcggacaacaugaucacggagaugcugcagaaggaguacauggagcgccagggcaagacgccccuggggcugguggaccucuucgucuucuccaccagcuucuaccugaucuccaucuuccugcaccucgugaagaucccgacccaccggcacaucgugggcaagagcugccccaagccccaccgccugaaccacauggggaucugcuccugcggccuguacaagcagcccggggucccggugaaguggaagcggugaggacuaguaauaaggaaacuguaugaaugucugugggcaggaagugaagagauccuucuguaaagguuuuuggaauuaugucugcugaauaauaaacuuuuuugaaauaauaaaucugguagaaaaaugagaucuaaaaaaaaaaaaaaaaaaaaaaaaaaaaaaaaaaaaaaaaaaaaaaaaaaaaaaaaaaaaaaaaaaaaaaaaaaaaaaaaaaaaaaaaaaaaaaaaaaaa

SEQ ID NO: 36060 - RNA, 1788 nt, Artificial Sequence
  mRNA product Design b-4 (A100) comprising derived and/or modified sequence from LASV(G1442-SLE-2011;Clade IV)__AIT17180__GPCmut9 (opt1)
aggagagucccgcagucggcguccagcggcucugcuuguucgugugugugucguugcaggccuuauucaagcuuaccaugggccagaucgugaccuucuuccaggaggucccccacgugaucgaggaggugaugaacaucguccugaucgcccucagcauccuggccgugcugaaggggcucuacaacguggcgaccugcggccugaucgggcuggucacguuccuccugcugugcggccgcuccugcaccaccacccucuacaaggggguguacgagcugcagacgcuggagcucaacauggagacccugaacaugaccaugccgcugagcugcaccaagaacaacucccaccacuacauccgggugggcaacgagacgggccucgagcugacccugaccaacaccagcaucaucaaccacaaguucugcaaccucuccgacgcccacaagaagaaccuguacgaccacgcccugaugagcaucaucuccacguuccaccucagcauccccaacuucaaccaguacgaggccauguccugcgacuucaacgggggcaagaucagcguccaguacaaccugucccacagcuacgccggggacgcggccaaccacugcggcaccguggccaacggggugcugcagaccuucaugcgcauggccuggggcggcuccuacaucgcgcucgacagcgggugcggcaacugggacugcaucaugaccuccuaccaguaccugaucauccagaacacgaccugggacgaccacugccaguucagccggcccucccccaucggguaccugggccuccugagccagcgcacccgggacgucuacaucucccgccggcugcucggcaccuucacguggacccugagcgacagcgaggggaaggacaccccgggcggguacugccugacccgcuggaugcucaucgaggccgagcugaagugcuucggcaacacggccguggccaagugcaacgagaagcacgacgaggaguucugcgacaugcugcggcuguucgacuucaacaagcaggccauccagcgccugaaggcggaggcccagauguccauccagcugaucaacaaggccgugaacgcccucaucaacgaccagcugaucaugaagaaccaccuccgggacaucaugugcauccccuacugcaacuacagcaaguacugguaccucaacaacaccgccaccgggaagaccucccugcccaagugcuggcugaucagcaacggcuccuaccucaacgagacgcacuucagcgacgacaucgagcaggaggcggacaacaugaucaccgagaugcugcagaaggaguacauggagcgccagggcaagacgccccuggggcuggucgaccucuucguguucuccaccagcuucuaccugaucuccaucuuccugcaccucgugaagaucccgacccaccggcacaucgucggcaagagcugccccaagccccaccgccugaaccacauggggaucugcuccugcggccuguacaagcagcccggggugccggugcgguggaagcgcugaggacuaguaauaaggaaacuguaugaaugucugugggcaggaagugaagagauccuucuguaaagguuuuuggaauuaugucugcugaauaauaaacuuuuuugaaauaauaaaucugguagaaaaaugagaucuaaaaaaaaaaaaaaaaaaaaaaaaaaaaaaaaaaaaaaaaaaaaaaaaaaaaaaaaaaaaaaaaaaaaaaaaaaaaaaaaaaaaaaaaaaaaaaaaaaaa

SEQ ID NO: 36061 - RNA, 1788 nt, Artificial Sequence
  mRNA product Design b-4 (A100) comprising derived and/or modified sequence from LASV(G3010-SLE-2013;Clade IV)__AIT17344__GPCmut9 (opt1)
aggagagucccgcagucggcguccagcggcucugcuuguucgugugugugucguugcaggccuuauucaagcuuaccaugggccagaucgugaccuucuuccaggaggucccccacgugaucgaggaggugaugaacaucguccugaucgcccucagcauccuggccgugcugaaggggcucuacaacuucgcgaccugcggccugguggggcuggucacguuccuccugcugugcggccgcuccugcaccaccagccucuacaaggggguguacgagcugcagacccuggagcucaacauggagacgcugaacaugaccaugccgcuguccugcaccaagaacaacagccaccacuacaucauggugggcaacgagaccggccucgagcugacgcugaccaacaccuccaucaucaaccacaaguucugcaaccucagcgacgcccacaagaagaaccuguacaaccacgcccugauguccaucaucagcaccuuccaccucuccauccccaacuucaaccaguacgaggccaugagcugcgacuucaacgggggcaagaucuccguccaguacaaccugagccacuccuacgccggggacgcggccagccacugcggcacgguggccaacggggugcugcagaccuucaugcggauggccuggggcggcuccuacaucgcgcucgacagcgggugcggcaagugggacugcaucaugaccuccuaccaguaccugaucauccagaacaccacgugggaggaccacugccaguucagccgccccucccccaucggguaccugggccuccugagccagcggacccgcgacaucuacaucagccggcgccugcucggcaccuucaccuggacgcuguccgacagcgaggggaaggacaccccgggcggguacugccugacccgguggaugcucaucgaggccgagcugaagugcuucggcaacaccgccgucgccaagugcaacgagaagcacgacgaggaguucugcgacaugcugcgccucuucgacuucaacaagcaggccauccagcggcugaagacggaggcgcagauguccauccagcugaucaacaaggccgugaacgcccucaucaacgaccagcugaucaugaagaaccaccuccgcgacaucaugugcauccccuacugcaacuacagcaaguacugguaccugaaccacaccaccaccgggaagacgucccugcccaagugcuggcuggugagcaacggcuccuaccucaacgagacccacuucagcgacgacaucgagcagcaggccgacaacaugaucaccgagaugcugcagaaggaguacauggagcggcagggcaagacgccccuggggcuggucgaccucuucguguucuccaccagcuucuaccugaucuccaucuuccugcaccucgugaagaucccgacccaccgccacaucgucggcaagagcugccccaagccccaccggcugaaccacauggggaucugcuccugcggccuguacaagcagcccggggugccggugcgcuggaagcggugaggacuaguaauaaggaaacuguaugaaugucugugggcaggaagugaagagauccuucuguaaagguuuuuggaauuaugucugcugaauaauaaacuuuuuugaaauaauaaaucugguagaaaaaugagaucuaaaaaaaaaaaaaaaaaaaaaaaaaaaaaaaaaaaaaaaaaaaaaaaaaaaaaaaaaaaaaaaaaaaaaaaaaaaaaaaaaaaaaaaaaaaaaaaaaaaa

SEQ ID NO: 36062 - RNA, 1788 nt, Artificial Sequence
  mRNA product Design b-4 (A100) comprising derived and/or modified sequence from LASV(G502-SLE-2009;Clade IV)__AIT17126__GPCmut9 (opt1)
aggagagucccgcagucggcguccagcggcucugcuuguucgugugugugucguugcaggccuuauucaagcuuaccaugggccagaucgugaccuucuuccaggaggucccccacgugaucgaggaggugaugaacaucguccugaucgcccucagcauccuggccgugcugaaggggcucuacaacuucgcgaccugcggccugguggggcugcucacguuccugcugcucugcggccgcuccugcaccaccgggcuguacaagggcgucuacgagcugcagacccucgagcugaacauggagacgcugaacaugaccaugccgcucagcugcaccaagaacaacucccaccacuacaucauggugggcaacgagaccgggcuggagcugacgcucaccaacaccagcaucaucaaccacaaguucugcaaccuguccgacgcccacaagaagaaccuguacgaccacgcccucaugagcaucaucuccaccuuccaccugagcauccccaacuucaaccaguacgaggccauguccugcgacuucaacggcgggaagaucagcgugcaguacaaccugucccacagcuacgccggcgacgcggccgaccacugcgggacggucgccaacggcgugcuccagaccuucaugcggauggccuggggcggguccuacaucgcgcuggacagcggcugcgggcgcugggacugcaucaugaccuccuaccaguaccugaucauccagaacaccacgugggaggaccacugccaguucagccggcccucccccaucggcuaccucggccugcugagccagcgcacccgggacaucuacaucucccgccggcuccuggggaccuucaccuggacgcugagcgacagcgagggcaaggacacccccgggggcuacugccucacccgcuggaugcugaucgaggccgagcugaagugcuucgggaacaccgccguggccaagugcaacgagaagcacgacgaggaguucugcgacaugcuccggcuguucgacuucaacaagcaggccauccagcgccugaaggcggaggcccagauguccauccagcucaucaacaaggccgucaacgcccugaucaacgaccagcuggugaugaagaaccaccuccgggacaucaugugcauccccuacugcaacuacagccgcuacugguaccugaaccacacgaccaccggccggaccucccugcccaagugcuggcucgugagcaacggcuccuaccugaacgagacgcacuucagcgacgacaucgagcagcaggccgacaacaugaucaccgagaugcugcagaaggaguacauggagcgccaggggaagaccccgcugggccucgucgaccuguucguguucuccaccagcuucuaccugaucuccaucuuccuccaccuggugaagaucccgacgcaccggcacaucgucggcaagagcugccccaagccccaccgccugaaccacauggggaucugcuccugcgggcucuacaagcagcccggcgugccggugaaguggaagcggugaggacuaguaauaaggaaacuguaugaaugucugugggcaggaagugaagagauccuucuguaaagguuuuuggaauuaugucugcugaauaauaaacuuuuuugaaauaauaaaucugguagaaaaaugagaucuaaaaaaaaaaaaaaaaaaaaaaaaaaaaaaaaaaaaaaaaaaaaaaaaaaaaaaaaaaaaaaaaaaaaaaaaaaaaaaaaaaaaaaaaaaaaaaaaaaaa

SEQ ID NO: 36063 - RNA, 1788 nt, Artificial Sequence
  mRNA product Design b-4 (A100) comprising derived and/or modified sequence from LASV(G733-SLE-2010;Clade IV)__AIT17154__GPCmut9 (opt1)
aggagagucccgcagucggcguccagcggcucugcuuguucgugugugugucguugcaggccuuauucaagcuuaccaugggccagaucgugaccuucuuccaggaggucccccacgugaucgaggaggugaugaacaucguccugaucgcccucagcauccuggccgugcugaaggggcucuacaacuucgcgaccugcggcaucguggggcuggucuccuuccugcuccugugcggccgcagcugcacgaccucccuguacaaggggguguacgagcuccagacccuggagcugaacauggagacccucaacaugacgaugccgcugagcugcaccaagaacaacucccaccacuacaucauggugggcaacgagaccggccuggagcucacccugacgaacaccagcaucaucaaccacaaguucugcaaccuguccgacgcccacaagaagaaccucuacgaccacgcccugaugagcaucaucuccaccuuccaccugagcauccccaacuucaaccaguacgaggccauguccugcgacuucaacgggggcaagaucagcguccaguacaaccucucccacagcuacgccggggacgcggccaaccacugcggcaccaucgccaacggggugcugcagacguucaugcggauggccuggggcggcuccuacaucgcgcuggacagcgggugcgaccgcugggacugcaucaugaccuccuaccaguaccucaucauccagaacaccaccugggaggaccacugccaguucagccggcccucccccaucggcuaccuggggcugcucagccagcgcacgcgggacaucuacaucagccgccggcugcugggcaccuucaccuggacccucuccgacagcgagggcaaggacacgcccgggggcuacugccugacccgcuggaugcugaucgaggccgagcucaagugcuucgggaacaccgccguggccaagugcaacgagaagcacgacgaggaguucugcgacaugcugcggcuguucgacuucaacaagcaggccauccagcgccucaaggcggaggcccagauguccauccagcugaucaacaaggccgucaacgcccugaucaacgaccagcucaucaugaagaaccaccuccgggacaucaugugcauccccuacugcaacuacagcaaguacugguaccugaaccacaccacgaccggcaagaccucccugcccaagugcuggcuggugagcaacggguccuaccugaacgagacccacuucagcgacgacaucgagcagcaggccgacaacaugaucacggagaugcuccagaaggaguacauggagcgccagggcaagaccccgcugggccugguggaccuguucgucuucuccaccagcuucuaccucaucuccaucuuccugcaccuggugaagaucccgacccaccggcacguggucggcaagagcugccccaagccccaccgccucaaccacauggggaucugcuccugcgggcuguacggccagcccggggugccggugaaguggaagcggugaggacuaguaauaaggaaacuguaugaaugucugugggcaggaagugaagagauccuucuguaaagguuuuuggaauuaugucugcugaauaauaaacuuuuuugaaauaauaaaucugguagaaaaaugagaucuaaaaaaaaaaaaaaaaaaaaaaaaaaaaaaaaaaaaaaaaaaaaaaaaaaaaaaaaaaaaaaaaaaaaaaaaaaaaaaaaaaaaaaaaaaaaaaaaaaaa

SEQ ID NO: 36064 - RNA, 1788 nt, Artificial Sequence
  mRNA product Design b-4 (A100) comprising derived and/or modified sequence from MOPV/LASV reassortant(IGS-1;Clade IV)__AFY05576__GPCmut9 (opt1)
aggagagucccgcagucggcguccagcggcucugcuuguucgugugugugucguugcaggccuuauucaagcuuaccaugggccagaucgugaccuucuuccaggaggucccccacgugaucgaggaggugaugaacaucguccugaucgcccucagcgugcuggccgugcugaaggggcucuacaacuucgcgaccugcggccuggucgggcuggugacguuccuccugcugugcggccgcuccugcaccaccagccucuacaaggggguguacgagcugcagacccuggagcucaacauggagacgcugaacaugaccaugccgcuguccugcaccaagaacaacagccaccacuacaucauggucggcaacgagaccggccucgagcugacgcugaccaacaccuccaucaucaaccacaaguucugcaaccucagcgacgcccacaagaagaaccuguacgaccacgcccugauguccaucaucagcaccuuccaccucuccauccccaacuucaaccaguacgaggccaugagcugcgacuucaacgggggcaagaucuccgugcaguacaaccugagccacuccuacgccggggacgcggccaaccacugcggcacgguggccaacgggguccugcagaccuucaugcggauggccuggggcggcagcuacaucgcgcucgacuccgggugcggcaacugggacugcaucaugaccagcuaccaguaccugaucauccagaacaccacgugggaggaccacugccaguucucccgccccagccccaucggguaccugggccuccugucccagcggacccgcgacaucuacaucagccggcgccugcucggcaccuucaccuggacgcugagcgacuccgagggggaggacaccccgggcggguacugccugacccgguggaugcucaucgaggccgagcugaagugcuucggcaacaccgccguggccaagugcaacgagaagcacgacgaggaguucugcgacaugcugcgccucuucgacuucaacaagcaggccauccagcggcugaaggcggaggcccagaugagcauccagcugaucaacaaggccgugaacgcccucaucaacgaccagcugaucaugaagaaccaccuccgcgacaucaugugcauccccuacugcaacuacuccaaguacugguaccugaaccacacgaccaccgggcggaccagccugcccaagugcuggcuggucuccaacggcagcuaccucaacgagacgcacuucuccgacgacaucgagcagcaggccgacaacaugaucaccgagaugcugcagaaggaguacauggagcgccagggcaagacgccccuggggcugguggaccucuucguguucagcaccuccuucuaccugaucagcaucuuccugcaccucgucaagaucccgacccaccggcacaucgugggcaaguccugccccaagccccaccgccugaaccacauggggaucugcagcugcggccuguacaagcagcccggggugccggucaaguggaagcggugaggacuaguaauaaggaaacuguaugaaugucugugggcaggaagugaagagauccuucuguaaagguuuuuggaauuaugucugcugaauaauaaacuuuuuugaaauaauaaaucugguagaaaaaugagaucuaaaaaaaaaaaaaaaaaaaaaaaaaaaaaaaaaaaaaaaaaaaaaaaaaaaaaaaaaaaaaaaaaaaaaaaaaaaaaaaaaaaaaaaaaaaaaaaaaaaa

SEQ ID NO: 36065 - RNA, 1788 nt, Artificial Sequence
  mRNA product Design b-4 (A100) comprising derived and/or modified sequence from LASV(LM765-SLE-2012;Clade IV)__AIT17814__GPCmut9 (opt1)
aggagagucccgcagucggcguccagcggcucugcuuguucgugugugugucguugcaggccuuauucaagcuuaccaugggccagaucgugaccuucuuccaggaggucccccacgugaucgaggaggugaugaacaucguccugaucgcccucagcauccuggccgugcugaaggggcucuacaacuucgcgaccugcggccugguggggcuggucacguuccuccugcugugcggccgcuccugcaccaccagccucuacaaggggguguacgagcugcagacccuggagcucaacauggagacgcugaacaugaccaugccgcuguccugcaccaagaacaacagccaccacuacaucauggugggcaacgagaccggccucgagcugacgcugaccaacaccuccaucaucgaccacaaguucugcaaccucagcgacgcccaccggaagaaccuguacgaccacgcccugauguccaucaucagcaccuuccaccucuccauccccaacuucaaccaguacgaggccaugagcugcgacuucaacgggggcaagaucuccguccaguacaaccugagccacuccuacgccaaggacgcggccgaccacugcgggacgguggccaacggcgugcugcagaccuucaugcgcauggccuggggcgggagcuacaucgcgcucgacuccggcugcgggcggugggacugcaucaugaccagcuaccaguaccugaucauccagaacaccacgugggaggaccacugccaguucucccgccccagccccaucggcuaccuggggcuccugucccagcggacccgcgacaucuacaucagccggcgccugcucggcaccuucaccuggacgcugagcgacuccgagggcaaggacacccccgggggcuacugccugacccgguggaugcucaucgaggccgagcugaagugcuucgggaacaccgccgucgccaagugcaacgagaagcacgacgaggaguucugcgacaugcugcgccucuucgacuucaacaagcaggccauccagcggcugaaggcggaggcccagaugagcauccagcugaucaacaaggccgugaacgcccucaucaacgaccagcugaucaugaagaaccaccuccgcgacaucaugugcauccccuacugcaacuacuccaaguacugguaccugaaccacacgaccaccggcaagaccagccugcccaagugcuggcugguguccaacgggagcuaccucaacgagacgcacuucuccgacgacaucgagcagcaggccgacaacaugaucaccgagaugcugcagaaggaguacauggagcggcagggcaagaccccgcugggccuggucgaccucuucguguucagcaccuccuucuaccugaucagcaucuuccugcaccucgugaagaucccgacgcaccgccacaucgucgggaagcccugccccaagccccaccggcugaaccacaugggcaucugcuccugcgggcuguacaagcagccgggcgugcccgugaaguggaagcgcugaggacuaguaauaaggaaacuguaugaaugucugugggcaggaagugaagagauccuucuguaaagguuuuuggaauuaugucugcugaauaauaaacuuuuuugaaauaauaaaucugguagaaaaaugagaucuaaaaaaaaaaaaaaaaaaaaaaaaaaaaaaaaaaaaaaaaaaaaaaaaaaaaaaaaaaaaaaaaaaaaaaaaaaaaaaaaaaaaaaaaaaaaaaaaaaaa

SEQ ID NO: 36066 - RNA, 1788 nt, Artificial Sequence
  mRNA product Design b-4 (A100) comprising derived and/or modified sequence from LASV(LM776-SLE-2012;Clade IV)__AIT17824__GPCmut9 (opt1)
aggagagucccgcagucggcguccagcggcucugcuuguucgugugugugucguugcaggccuuauucaagcuuaccaugggccagaucgugaccuucuuccaggaggucccccacgugaucgaggaggugaugaacaucguccugaucgcccucagcauccuggccgugcugaaggggcucuacaacuucgcgaccugcggccugguggggcuggucacguuccuccugcugugcggccgcuccugcaccaccagcguguacaaggggguguacgagcuccagacccuggagcugaacauggagacgcucaacaugaccaugccgcuguccugcaccaagaacaacagccaccacuacaucauggucggcaacgagaccggccuggagcucacgcugaccaacaccuccaucaucaaccacaaguucugcaaccugagcgacgcccacaagaagaaccucuacgaccacgcccugauguccaucaucagcaccuuccaccuguccauccccaacuucaaccaguacgaggccaugagcugcgacuucaacgggggcaagaucuccgugcaguacaaccucagccacuccuacgccggggacgcggccaaccacugcggcacgguggccaacgggguccugcagaccuucaugcggauggccuggggcggcagcuacaucgcgcuggacuccgggugcggcaagugggacugcaucaugaccagcuaccaguaccucaucauccagaacaccacgugggaggaccacugccaguucucccgccccagccccaucggguaccugggccugcucucccagcggacccgcgacaucuacaucagccggcgccugcugggcaccuucaccuggacgcucagcgacuccgaggggaaggacaccccgggcggguacugccugacccgguggaugcugaucgaggccgagcucaagugcuucggcaacaccgccguggccaagugcaacgagaagcacgacgaggaguucugcgacaugcugcgccuguucgacuucaacaagcaggccauccagcggcucaaggcggaggcccagaugagcauccagcugaucaacaaggccgugaacgcccugaucaacgaccagcucaucaugaagaaccaccuccgcgacaucaugugcauccccuacugcaacuacuccaaguacugguaccugaaccacacgaccaccgggaagaccagccugcccaagugcuggcuggucuccaacggcagcuaccugaacgagacgcacuucuccgacgacaucgagcagcaggccgacaacaugaucaccgagaugcuccagaaggaguacauggagcggcagggcaagacgccccuggggcugguggaccuguucguguucagcaccuccuucuaccucaucagcaucuuccugcaccuggucaagaucccgacccaccgccacaucgugggcaaguccugccccaagccccaccggcucaaccacauggggaucugcagcugcggccuguacaagcagcccggggugccgguccgcuggaagcggugaggacuaguaauaaggaaacuguaugaaugucugugggcaggaagugaagagauccuucuguaaagguuuuuggaauuaugucugcugaauaauaaacuuuuuugaaauaauaaaucugguagaaaaaugagaucuaaaaaaaaaaaaaaaaaaaaaaaaaaaaaaaaaaaaaaaaaaaaaaaaaaaaaaaaaaaaaaaaaaaaaaaaaaaaaaaaaaaaaaaaaaaaaaaaaaaa

SEQ ID NO: 36067 - RNA, 1788 nt, Artificial Sequence
  mRNA product Design b-4 (A100) comprising derived and/or modified sequence from LASV(Mad39;Clade IV)__ANH09722__GPCmut9 (opt1)
aggagagucccgcagucggcguccagcggcucugcuuguucgugugugugucguugcaggccuuauucaagcuuaccaugggccagaucgugaccuucuuccaggaggucccccacgugaucgaggaggugaugaacaucguccugaucgcccucagcauccuggccgugcugaaggggcucuacaacguggcgaccugcggccugaucgggcuggucacguuccuccugcugugcggccgcuccugcaccaccacccucuacaaggggguguacgagcugcaggcccuggagcucaacauggagacgcugaacaugaccaugccgcugagcugcaccaagaacaacucccaccacuacauccgggugggcaacgagaccggccucgagcugacgcugaccaacaccagccucaucaaccacaaguucugcaaccuguccgacgcccacaagaagaaccuguacgaccacgcccucaugagcaucaucuccaccuuccaccugagcauccccaacuucaaccaguacgaggccauguccugcgacuucaacgacgggaagaucagcguccaguacaaccugucccacacguacgcgggcgacaccgccaaccacugcgggaccguggccaacggcgugcuccagaccuucaugcgcauggccuggggcgggagcuacaucgcgcuggacuccggcugcgggggcugggacugcaucaugacgagcuaccaguaccugaucauccagaacaccaccugggaggaccacugccaguucucccggcccagccccaucggguaccucggccugcugucccagcgcacccgggacaucuacaucagccgccggcuccugggcacguucaccuggacccuguccgacagcgaggggaaggacaccccgggcggguacugccucacgcgcuggaugcugaucgaggccgagcugaagugcuucggcaacaccgccgucgccaagugcaacgagaagcacgacgaggaguucugcgacaugcuccggcuguucgacuucaacaagcaggccauccagcgccugaaggcggaggcccagaugagcauccagcucaucaacaaggccgugaacgcccugaucaacgaccagcugaucaugaagaaccaccuccgggacaucaugugcauccccuacugcaacuacuccaaguacugguaccugaaccacaccgugaccgggaagacgagccugcccaagugcuggcucgucuccaacggcagcuaccugaacgagacccacuucuccgacgacaucgagcagcaggccgacaacaugaucaccgagaugcugcagaaggaguacauggagcgccagggcaagacgccccuggggcucguggaccuguucguguucagcaccuccuucuaccugaucagcaucuuccuccaccuggucaagaucccgacccaccggcacguggugggcaagcccugccccaagccccaccgccugaaccacauggggaucugcuccugcggcuucuacaagcagccggggguccccgugcgguggaagcgcugaggacuaguaauaaggaaacuguaugaaugucugugggcaggaagugaagagauccuucuguaaagguuuuuggaauuaugucugcugaauaauaaacuuuuuugaaauaauaaaucugguagaaaaaugagaucuaaaaaaaaaaaaaaaaaaaaaaaaaaaaaaaaaaaaaaaaaaaaaaaaaaaaaaaaaaaaaaaaaaaaaaaaaaaaaaaaaaaaaaaaaaaaaaaaaaaa

SEQ ID NO: 36068 - RNA, 1788 nt, Artificial Sequence
  mRNA product Design b-4 (A100) comprising derived and/or modified sequence from LASV(Z0947-SLE-2011;Clade IV)__AIT17840__GPCmut9 (opt1)
aggagagucccgcagucggcguccagcggcucugcuuguucgugugugugucguugcaggccuuauucaagcuuaccaugggccagaucgugaccuucuuccaggaggucccccacgugaucgaggaggugaugaacaucguccugaucgcccucagcauccuggccgugcugaaggggcucuacaacuucgcgaccugcggccugguggggcuggucacguuccuccugcugugcggccgcuccugcaccaucagccucuacaaggggguguacgagcugcagacccuggagcucaacauggagacccugaacaugacgaugccgcuguccugcaccaagaacaacagccaccacuacaucauggugggcaacgagaccggccucgagcugacccugacgaacaccuccaucaucaaccacaaguucugcaaccucagcgacgcccacaagaagaaccuguacgaccacgcccugauguccaucaucagcaccuuccaccucuccauccccaacuucaaccaguacgaggccaugagcugcgacuucaacgggggcaagaucuccguccaguacaaccugagccacuccuacgccggggacgcggccaaccacugcggcaccguggccaacggggugcugcagacguucaugcggauggccuggggcggcagcuacaucgcgcucgacuccgggugcgaccgcugggacugcaucaugaccagcuaccaguaccugaucauccagaacaccaccugggaggaccacugccaguucucccggcccagccccaucggcuaccuggggcuccugucccagcgcacgcgggacaucuacaucagccgccggcugcucggcaccuucaccuggacccugagcgacuccgagggcaaggacacgcccgggggcuacugccugacccgcuggaugcucaucgaggccgagcugaagugcuucgggaacaccgccgucgccaagugcaacgagaagcacgacgaggaguucugcgacaugcugcggcuguucgacuucaacaagcaggccauccagcgccugaaggcggaggcccagaugagcauccagcugaucaacaaggccgugaacgcccucaucaacgaccagcugaucaugaagaaccaccuccgggacaucaugugcauccccuacugcaacuacuccaaguacugguaccucaaccacaccacgaccggcaagaccagccugcccaagugcuggcugguguccaacgggagcuaccucaacgagacccacuucuccgacgacaucgagcagcaggccgacaacaugaucacggagaugcugcagaaggaguacauggagcgccagggcaagaccccgcugggccuggucgaccucuucguguucagcaccuccuucuaccugaucagcaucuuccugcaccucgugaagaucccgacccaccggcacaucgucgggaagcccugccccaagccccaccgccugaaccacaugggcaucugcuccugcgggcuguacaagcagccgggcgugcccgugaaguggaagcggugaggacuaguaauaaggaaacuguaugaaugucugugggcaggaagugaagagauccuucuguaaagguuuuuggaauuaugucugcugaauaauaaacuuuuuugaaauaauaaaucugguagaaaaaugagaucuaaaaaaaaaaaaaaaaaaaaaaaaaaaaaaaaaaaaaaaaaaaaaaaaaaaaaaaaaaaaaaaaaaaaaaaaaaaaaaaaaaaaaaaaaaaaaaaaaaaa

SEQ ID NO: 36069 - RNA, 1788 nt, Artificial Sequence
  mRNA product Design b-4 (A100) comprising derived and/or modified sequence from LASV(Josiah;Clade IV)__NP_694870__GPCmut9 (opt4)
aggagagucccgcagucggcguccagcggcucugcuuguucgugugugugucguugcaggccuuauucaagcuuaccaugggccagaucgugaccuucuuccaggaggugccccacgugaucgaggaggugaugaacaucgugcugaucgcccugagcgugcuggccgugcugaagggccuguacaacuucgccaccugcggccuggugggccuggugaccuuccugcugcugugcggcagaagcugcaccaccagccuguacaagggcguguacgagcugcagacccuggagcugaacauggagacccugaacaugaccaugccccugagcugcaccaagaacaacagccaccacuacaucauggugggcaacgagaccggccuggagcugacccugaccaacaccagcaucaucaaccacaaguucugcaaccugagcgacgcccacaagaagaaccuguacgaccacgcccugaugagcaucaucagcaccuuccaccugagcauccccaacuucaaccaguacgaggccaugagcugcgacuucaacggcggcaagaucagcgugcaguacaaccugagccacagcuacgccggcgacgccgccaaccacugcggcaccguggccaacggcgugcugcagaccuucaugagaauggccuggggcggcagcuacaucgcccuggacagcggcugcggcaacugggacugcaucaugaccagcuaccaguaccugaucauccagaacaccaccugggaggaccacugccaguucagcagacccagccccaucggcuaccugggccugcugagccagagaaccagagacaucuacaucagcagaagacugcugggcaccuucaccuggacccugagcgacagcgagggcaaggacacccccggcggcuacugccugaccagauggaugcugaucgaggccgagcugaagugcuucggcaacaccgccguggccaagugcaacgagaagcacgacgaggaguucugcgacaugcugagacuguucgacuucaacaagcaggccauccagagacugaaggccgaggcccagaugagcauccagcugaucaacaaggccgugaacgcccugaucaacgaccagcugaucaugaagaaccaccugagagacaucaugugcauccccuacugcaacuacagcaaguacugguaccugaaccacaccaccaccggcagaaccagccugcccaagugcuggcuggugagcaacggcagcuaccugaacgagacccacuucagcgacgacaucgagcagcaggccgacaacaugaucaccgagaugcugcagaaggaguacauggagagacagggcaagaccccccugggccugguggaccuguucguguucagcaccagcuucuaccugaucagcaucuuccugcaccuggugaagauccccacccacagacacaucgugggcaagagcugccccaagccccacagacugaaccacaugggcaucugcagcugcggccuguacaagcagcccggcgugcccgugaaguggaagagaugaggacuaguaauaaggaaacuguaugaaugucugugggcaggaagugaagagauccuucuguaaagguuuuuggaauuaugucugcugaauaauaaacuuuuuugaaauaauaaaucugguagaaaaaugagaucuaaaaaaaaaaaaaaaaaaaaaaaaaaaaaaaaaaaaaaaaaaaaaaaaaaaaaaaaaaaaaaaaaaaaaaaaaaaaaaaaaaaaaaaaaaaaaaaaaaaa

SEQ ID NO: 36070 - RNA, 1785 nt, Artificial Sequence
  mRNA product Design b-4 (A100) comprising derived and/or modified sequence from LASV(LP;Clade I)__AAF86701__GPCmut9 (opt4)
aggagagucccgcagucggcguccagcggcucugcuuguucgugugugugucguugcaggccuuauucaagcuuaccaugggccagaucaucaccuucuuccaggaggugccccacgugaucgaggaggugaugaacaucgugcugaucgcccugagccugcuggccauccugaagggccuguacaacaucgccaccugcggcaucaucggccugguggccuuccuguuccugugcggcaagagcugcagccugacccugaagggcggcuacgagcugcagacccuggagcugaacauggagacccugaacaugaccaugccccugagcugcaccaagaacagcagccaccacuacaucagagugggcaacgagaccggccuggagcugacccugaccaacaccagcaucaucaaccacaaguucugcaaccugagcgacgcccacaagaagaaccuguacgaccacgcccugaugagcaucaucagcaccuuccaccugagcauccccaacuucaaccaguacgaggccaugagcugcgacuucaacggcggcaagaucagcgugcaguacaaccugagccacagcuacgccggcgacgccgccgagcacugcggcaccguggccaacggcgugcugcagaccuucaugagaauggccuggggcggcagauacaucgcccuggacagcggcugcggcaacugggacugcaucaugaccagcuaccaguaccugaucauccagaacaccaccugggaggaccacugccaguucagcagacccagccccaucggcuaccugggccugcugagccagagaaccagagacaucuacaucagcagaagacugcugggcaccuucaccuggacccugagcgacagcgagggcaacgagacccccggcggcuacugccugaccagauggaugcugaucgaggccgagcugaagugcuucggcaacaccgccguggccaagugcaacgagaagcacgacgaggaguucugcgacaugcugagacuguucgacuucaacaagcaggccaucagaagacugaaggccgaggcccagaugagcauccagcugaucaacaaggccgugaacgcccugaucaacgaccagcugaucaugaagaaccaccugagagacaucaugugcauccccuacugcaacuacagcaaguacugguaccugaaccacaccagcagcggcagaaccagccugcccaagugcuggcugaucagcaacggcagcuaccugaacgagacccaguucagcgacgacaucgagcagcaggccgacaacaugaucaccgagaugcugcagaaggaguacaucgagagacagggcaagaccccccugggccugguggacaucuucaucuucagcaccagcuucuaccugaucagcaucuuccugcaccugaucaagauccccacccacagacacaucgugggcaagcccugccccaagccccacagacugaaccacaugggcgugugcagcugcggccuguacaagcaccccggcgugcccaccaaguggaagagaugaggacuaguaauaaggaaacuguaugaaugucugugggcaggaagugaagagauccuucuguaaagguuuuuggaauuaugucugcugaauaauaaacuuuuuugaaauaauaaaucugguagaaaaaugagaucuaaaaaaaaaaaaaaaaaaaaaaaaaaaaaaaaaaaaaaaaaaaaaaaaaaaaaaaaaaaaaaaaaaaaaaaaaaaaaaaaaaaaaaaaaaaaaaaaaaaa

SEQ ID NO: 36071 - RNA, 1785 nt, Artificial Sequence
  mRNA product Design b-4 (A100) comprising derived and/or modified sequence from LASV(803213;Clade II)__AAF86703__GPCmut9 (opt4)
aggagagucccgcagucggcguccagcggcucugcuuguucgugugugugucguugcaggccuuauucaagcuuaccaugggccagaucaucaccuucuuccaggaggugccccacgugaucgaggaggugaugaacaucgugcugaucgcccugagccugcuggccauccugaagggcaucuacaacguggccaccugcggccuguucggccugaucagcuuccugcugcugugcggcagaagcugcagcgugaccuacaagggcguguacgagcugcagacccuggagcugaacauggccaaccugaacaugaccaugccccugagcugcaccaagaacaacagccaccacuacaucauggugggcaacgagaccggccuggagcugacccugaccaacaccagcaucaucaaccacaaguucugcaaccugagcgacgcccacaagaagaaccuguacgaccacgcccugaugagcaucaucagcaccuuccaccugagcauccccaacuucaaccaguacgaggccaugagcugcgacuucaacggcggcaagaucagcgugcaguacaaccugagccacagcuucgccguggacgccgccaaccacugcggcaccaucgccaacggcgugcugcagaccuucaugagaauggccuggggcggcagcuacaucgcccuggacagcggcugcggcaacugggacugcaucaugaccagcuaccaguaccugaucauccagaacaccaccugggaggaccacugccaguucagcagacccagccccaucggcuaccugggccugcugagccagagaaccagagacaucuacaucagcagaagacugcugggcaccuucaccuggacccugagcgacagcgagggcaacgaggcccccggcggcuacugccugaccagauggaugcugaucgaggccgagcugaagugcuucggcaacaccgccguggccaagugcaacgagaagcacgacgaggaguucugcgacaugcugagacuguucgacuucaacaagcaggccaucaagagacugaagaccgaggcccagaugagcauccagcugaucaacaaggccgugaacgcccugaucaacgaccagcugaucaugaagaaccaccugagagacaucaugugcauccccuacugcaacuacagcagauacugguaccugaaccacaccgugaccggcaagaccagccugcccagaugcuggcuggugagcaacggcagcuaccugaacgagacccacuucagcgacgacaucgagcagcaggccgacaacaugaucaccgagaugcugcagaaggaguacauggacagacagggcaagaccccccugggccugguggaccuguucguguucagcaccagcuucuaccugaucagcaucuuccugcaccuggugaagauccccacccacagacacaucgugggcaagcccugccccaagccccacagacugaaccacaugggcaucugcagcugcggccuguacaagcaccccggcgugcccgugaaguggaagagaugaggacuaguaauaaggaaacuguaugaaugucugugggcaggaagugaagagauccuucuguaaagguuuuuggaauuaugucugcugaauaauaaacuuuuuugaaauaauaaaucugguagaaaaaugagaucuaaaaaaaaaaaaaaaaaaaaaaaaaaaaaaaaaaaaaaaaaaaaaaaaaaaaaaaaaaaaaaaaaaaaaaaaaaaaaaaaaaaaaaaaaaaaaaaaaaaa

SEQ ID NO: 36072 - RNA, 1785 nt, Artificial Sequence
  mRNA product Design b-4 (A100) comprising derived and/or modified sequence from LASV(GA391;Clade III)__CAA36645__GPCmut9 (opt4)
aggagagucccgcagucggcguccagcggcucugcuuguucgugugugugucguugcaggccuuauucaagcuuaccaugggccagaucgugaccuucuuccaggaggugccccacgugaucgaggaggugaugaacaucgugcugaucgcccugagcauccuggccauccugaagggccuguacaacguggccaccugcggccugaucggccuggugaccuuccugcugcugagcggcagaagcugcagccugaucuacaagggcaccuacgagcugcagacccuggagcugaacauggagacccugaacaugaccaugccccugagcugcaccaagaacaacagccaccacuacaucagagugggcaacgagaccggccuggagcugacccugaccaacaccagcauccugaaccacaaguucugcaaccugagcgacgcccacaagagaaaccuguacgaccacagccugaugagcaucaucagcaccuuccaccugagcauccccaacuucaaccaguacgaggccaugagcugcgacuucaacggcggcaagaucaccgugcaguacaaccugagccacagcuucgccguggacgccgccggccacugcggcacccuggccaacggcgugcugcagaccuucaugagaauggccuggggcggcagcuacaucgcccuggacagcggcugcggcaacugggacugcaucaugaccagcuaccaguaccugaucauccagaacaccaccugggacgaccacugccaguucagcagacccagccccaucggcuaccugggccugcugagccagagaaccagagacaucuacaucagcagaagacugcugggcaccuucaccuggacccugagcgacagcgagggcaacgagacccccggcggcuacugccugaccagauggaugcugaucgaggccgagcugaagugcuucggcaacaccgccguggccaagugcaacgagaagcacgacgaggaguucugcgacaugcugagacuguucgacuucaacaagcaggccaucagaagacugaagaccgaggcccagaugagcauccagcugaucaacaaggccgugaacgcccugaucaacgaccagcugaucaugaagaaccaccugagagacaucaugugcauccccuacugcaacuacagcagauacugguaccugaaccacaccagcaccggcaagaccagccugcccagaugcuggcugaucagcaacggcagcuaccugaacgagaccaaguucagcgacgacaucgagcagcaggccgacaacaugaucaccgagaugcugcagaaggaguacaucgacagacagggcaagaccccccugggccugguggaccuguucguguucagcaccagcuucuaccugaucagcaucuuccugcaccuggugaagauccccacccacagacacaucgugggcaagcccugccccaagccccacagacugaaccacaugggcaucugcagcugcggccuguacaagcagcccggcgugcccgugagauggaagagaugaggacuaguaauaaggaaacuguaugaaugucugugggcaggaagugaagagauccuucuguaaagguuuuuggaauuaugucugcugaauaauaaacuuuuuugaaauaauaaaucugguagaaaaaugagaucuaaaaaaaaaaaaaaaaaaaaaaaaaaaaaaaaaaaaaaaaaaaaaaaaaaaaaaaaaaaaaaaaaaaaaaaaaaaaaaaaaaaaaaaaaaaaaaaaaaaa

SEQ ID NO: 36073 - RNA, 1788 nt, Artificial Sequence
  mRNA product Design b-4 (A100) comprising derived and/or modified sequence from LASV(AV;Clade V)__CCA30314__GPCmut9 (opt4)
aggagagucccgcagucggcguccagcggcucugcuuguucgugugugugucguugcaggccuuauucaagcuuaccaugggccagaucgugaccuucuuccaggaggugccccacgugaucgaggaggugaugaacaucgugcugaucgcccugagcauccuggccgugcugaagggccuguacaacaucgccaccugcggccugaucggccugaucaccuuccugcugcugugcggcagaagcugcagcagcaaccuguacaagggcguguacgagcugcagagccuggaccugaacauggagacccugaacaugaccaugccccugagcugcaccaagaacaacagccaccacuacaucagagugggcaacgacaccggccuggagcugacccugaccaacaccagcauccugaaccacaaguucugcaaccugagcgacgcccacaagaaggaccuguacgaccacgcccugaugagcaucaucagcaccuuccaccugagcauccccaacuucaaccaguacgaggccaugagcugcgacuucaacggcggcaagaucagcgugcaguacaaccugagccacagcuacgccaucgacgccgccaaccacugcggcaccguggccaacggcauccugcagaccuucaugagaauggccuggggcggcagcuacaucgcccuggacagcggcugcggcaacugggacugcaucaugaccagcuaccaguaccugaucauccagaacaccaccugggagaaccacugccaguucagcagacccagccccaucggcuaccugggccugcugagccagagaaccagagacaucuacaucagcagaagacugcugggcaccuucaccuggacccugagcgacagcgagggcaacgccacccccggcggcuacugccugaccagauggaugcugaucgaggccgagcugaagugcuucggcaacaccgccguggccaagugcaacgagaagcacgacgaggaguucugcgacaugcugagacuguucgacuucaacaagcaggccaucagcagacugaagagcgaggcccagaugagcauccagcugaucaacaaggccgugaacgcccugaucaacgaccagcugaucaugaagaaccaccugagagacaucaugugcauccccuacugcaacuacagcaaguacugguaccugaaccacaccaucaccggcaagaccagccugcccaagugcuggcuggugagcaacggcagcuaccugaacgagacccacuucagcgacgacaucgagcagcaggccgacaacaugaucaccgagaugcugcagaaggaguacauggagagacagggcaagaccccccugggccugguggaccuguucguguucagcaccagcuucuaccugaucagcaucuuccugagacuggugaagauccccacccacagacacaucgugggcaagcccugccccaagccccacagacugaaccacaugggcaucugcagcugcggccuguacaagcagcccggcgugcccgugagauggaagagaugaggacuaguaauaaggaaacuguaugaaugucugugggcaggaagugaagagauccuucuguaaagguuuuuggaauuaugucugcugaauaauaaacuuuuuugaaauaauaaaucugguagaaaaaugagaucuaaaaaaaaaaaaaaaaaaaaaaaaaaaaaaaaaaaaaaaaaaaaaaaaaaaaaaaaaaaaaaaaaaaaaaaaaaaaaaaaaaaaaaaaaaaaaaaaaaaa

SEQ ID NO: 36074 - RNA, 1785 nt, Artificial Sequence
  mRNA product Design b-4 (A100) comprising derived and/or modified sequence from LASV(Togo/2016/7082;Clade VI)__AMR44577__GPCmut9 (opt4)
aggagagucccgcagucggcguccagcggcucugcuuguucgugugugugucguugcaggccuuauucaagcuuaccaugggccagaucaucaccuucuuccaggaggugccccacgugaucgaggaggugaugaacaucgugcugaucgcccugagccugcuggccauccugaagggcguguacaacguggccaccugcggcaucaucggccuggugaccuuccuguuccugugcggcagaagcugcagccugaucuacaagggcagcuacgagcugcagacccuggagcugaacauggagacccugaacaugaccaugccccugagcugcaccaagaacagcagccaccacuacaucagagugggcaacgagaccggccuggagcugacccugaccaacaccagcaucaucaaccacaaguucugcaaccugagcgacgcccacaagagaaaccuguacgaccacgcccugaugagcauccugagcaccuuccaccugagcauccccaacuucaaccaguacgaggccaugagcugcgacuucaacggcggcaagaucagcgugcaguacaaccugagccacgccuacgccguggacgccgccgagcacugcggcaccguggccaacggcgugcugcagaccuucaugagaauggccuggggcggcagcuacaucgcccuggacagcggcugcggcaacugggacugcaucaugaccagcuaccaguaccugaucauccagaacaccaccugggaggaccacugccaguucagcagacccagccccaucggcuaccugggccugcugagccagagaaccagagacaucuacaucagcagaagacugcugggcaccuucaccuggacccugagcgacagcgagggcaacgagacccccggcggcuacugccugaccagauggaugcugaucgaggccgagcugaagugcuucggcaacaccgccguggccaagugcaacgagaagcacgacgaggaguucugcgacaugcugagacuguucgacuucaacaagcaggccauccagagacugaagagcgaggcccagaugagcauccagcugaucaacaaggccgugaacgcccugaucaacgaccagcugaucaugaagaaccaccugagagacaugaugugcauccccuacugcaacuacagcaaguacugguaccugaaccacaccagcagcggcagaaccagccugcccaagugcuggcuggugagcaacggcagcuaccugaacgagacccacuucagcgacgacaucgagcagcaggccgacaacaugaucaccgagaugcugcagaaggaguacaucgacagacagggcaagaccccccugggccugguggaccuguucguguucagcaccagcuucuaccugaucagcaucuuccugcaccugaucaagauccccacccacagacacaucgugggcaagcccugccccaagccccacagacugaaccacaugggcaucugcagcugcggccuguacaagcagcccggcgugcccaccagauggaagagaugaggacuaguaauaaggaaacuguaugaaugucugugggcaggaagugaagagauccuucuguaaagguuuuuggaauuaugucugcugaauaauaaacuuuuuugaaauaauaaaucugguagaaaaaugagaucuaaaaaaaaaaaaaaaaaaaaaaaaaaaaaaaaaaaaaaaaaaaaaaaaaaaaaaaaaaaaaaaaaaaaaaaaaaaaaaaaaaaaaaaaaaaaaaaaaaaa

SEQ ID NO: 36075 - RNA, 1785 nt, Artificial Sequence
  mRNA product Design b-4 (A100) comprising derived and/or modified sequence from LASV(KAK-428;Clade n.d. (VII))__ANH09740__GPCmut9 (opt4)
aggagagucccgcagucggcguccagcggcucugcuuguucgugugugugucguugcaggccuuauucaagcuuaccaugggccagaucgugaccuucuuccaggaggugccccacgugaucgaggaggugaugaacaucgugcugaucgcccugagccugcuggccauccugaagggccuguacaacuucgccaccugcggcgugaucggccugaucaccuuccugcugcugugcggcagaagcugcagcgccaccuacaagggccaguacgagcugcagacccuggagcugaacauggagagccugaacaugaccaugccccugagcugcaccaagaacaacagccaccacuacaucagagccggcaacaacaccggccuggagcugacccugaccaacaccagcaucaucagccacaaguucugcaaccugagcgacgcccacaagaagaaccuguacgaccacacccugaugagcaucaucaccaccuuccaccugagcauccccaacuucaaccaguacgaggccaugagcugcgacuucaacggcggcaagaucagcauccaguacaaccugagccacagcuacgccggcgacgccgcccagcacugcggcaccguggccaacggcgugcugcagaccuucaugagaauggccuggggcggcagcuaccuggcccuggacagcggcugcagaggcugggacugcaucaucagcagcuaccaguaccugaucauccagaacaccaccugggacgaccacugccaguucagcagacccagccccaucggcuaccugggcuucgugagccagaagaccagagacaucuacaucagcagaagacugcugggcaccuucaccuggacccugagcgacagcgagggccacgacaugcccggcggcuacugccugaccagauggaugcugaucgaggccgaccugaagugcuucggcaacaccgccguggccaagugcaacgagaagcacgacgaggaguucugcgacauguggagacuguucgacuucaacaagcaggccauccagagacugaaggccgaggcccagaugaacauccagcugaucaacaaggccgugaacgcccugaucaacgaccagcugaugaugaagaaccaccugagagacaucaugugcauccccuacugcaacuacagcaaguucugguaccugaacaacaccaccaccggcagaaccagccugcccagaugcuggcugaucagcaacggcagcuaccugaacgagacccacuucagcgacgacaucgagcagcaggccgacaacaugaucaccgagaugcugcagaaggaguacauggacagacagggcaagaccccccugggccugguggaccuguucguguucagcaccagcuucuaccugaucaccaucuuccugcaccuggugaagauccccacccacagacacaucgugggcaagcccugccccaagccccacagacugaaccacaugggcaucugcagcugcggccuguacaagcagcccggcgugcccgugagauggaagagaugaggacuaguaauaaggaaacuguaugaaugucugugggcaggaagugaagagauccuucuguaaagguuuuuggaauuaugucugcugaauaauaaacuuuuuugaaauaauaaaucugguagaaaaaugagaucuaaaaaaaaaaaaaaaaaaaaaaaaaaaaaaaaaaaaaaaaaaaaaaaaaaaaaaaaaaaaaaaaaaaaaaaaaaaaaaaaaaaaaaaaaaaaaaaaaaaa

SEQ ID NO: 36076 - RNA, 1785 nt, Artificial Sequence; identical to SEQ ID NO: 36070
  mRNA product Design b-4 (A100) comprising derived and/or modified sequence from LASV(Pinneo-NIG-1969;Clade I)__AIT17836__GPCmut9 (opt4)

SEQ ID NO: 36077 - RNA, 1785 nt, Artificial Sequence
  mRNA product Design b-4 (A100) comprising derived and/or modified sequence from LASV(ISTH0009-NIG-2011;Clade II)__AIT17404__GPCmut9 (opt4)
aggagagucccgcagucggcguccagcggcucugcuuguucgugugugugucguugcaggccuuauucaagcuuaccaugggccagaucaucaccuucuuccaggaggugccccacgugaucgaggaggugaugaacaucgugcugaucgcccugagccugcuggccauccugaagggcaucuacaacguggccaccugcggccuguucggccuggugagcuuccugcugcugugcggcagaagcugcagcaccaccuacaagggcguguacgagcugcagacccuggagcuggacauggccagccugaacaugaccaugccccugagcugcaccaagaacaacagccaccacuacaucauggugggcaacgagaccggccuggagcugacccugaccaacaccagcaucaucaaccacaaguucugcaaccugagcgacgcccacaagaagaaccuguacgaccacgcccugaugagcaucaucagcaccuuccaccugagcauccccaacuucaaccaguacgaggccaugagcugcgacuucaacggcggcaagaucagcgugcaguacaaccugagccacgccuacgccguggacgccgccaaccacugcggcaccaucgccaacggcgugcugcagaccuucaugagaauggccuggggcggcagcuacaucgcccuggacagcggcugcggcagcugggacugcaucaugaccagcuaccaguaccugaucauccagaacaccaccugggaggaccacugccaguucagcagacccagccccaucggcuaccugggccugcugagccagagaaccagagacaucuacaucagcagaagacugcugggcaccuucaccuggacccugagcgacagcgagggcaacgagacccccggcggcuacugccugaccagauggaugcugaucgaggccgagcugaagugcuucggcaacaccgccguggccaagugcaacgagaagcacgacgaggaguucugcgacaugcugagacuguucgacuucaacaagcaggccaucagaagacugaagaccgaggcccagaugagcauccagcugaucaacaaggccgugaacgcccugaucaacgaccagcugaucaugaagaaccaccugagagacaucaugugcauccccuacugcaacuacagcaaguacugguaccugaaccacaccgugaccggcaagaccagccugcccagaugcuggcuggugagcaacggcagcuaccugaacgagacccacuucagcgacgacaucgagcagcaggccgacaacaugaucaccgagcugcugcagaaggaguacauggacagacagggcaagaccccccugggccugguggaccuguucguguucagcaccagcuucuaccugaucagcaucuuccugcaccugaucaagauccccacccacagacacaucaccggcaagcccugccccaagccccacagacugaaccacaugggcaucugcagcugcggccuguacaagcaccccggcgugcccgugaaguggaagagaugaggacuaguaauaaggaaacuguaugaaugucugugggcaggaagugaagagauccuucuguaaagguuuuuggaauuaugucugcugaauaauaaacuuuuuugaaauaauaaaucugguagaaaaaugagaucuaaaaaaaaaaaaaaaaaaaaaaaaaaaaaaaaaaaaaaaaaaaaaaaaaaaaaaaaaaaaaaaaaaaaaaaaaaaaaaaaaaaaaaaaaaaaaaaaaaaa

SEQ ID NO: 36078 - RNA, 1785 nt, Artificial Sequence
  mRNA product Design b-4 (A100) comprising derived and/or modified sequence from LASV(ISTH2010-NIG-2012;Clade II)__AIT17482__GPCmut9 (opt4)
aggagagucccgcagucggcguccagcggcucugcuuguucgugugugugucguugcaggccuuauucaagcuuaccaugggccagaucaucaccuucuuccaggaggugccccacgugaucgaggaggugaugaacaucgugcugaucgcccugagccugcuggccauccugaagggcaucuacaacguggccaccugcggccuguucggccuggugagcuuccugcugcugugcggcagaagcugcagcaccaccuacaagggcguguacgagcugcagacccuggagcuggacauggccagccugaacaugaccaugccccugagcugcaccaagaacaacagccaccacuacaucauggugggcaacgagaccggccuggagcugacccugaccaacaccagcaucaucaaccacaaguucugcaaccugagcgacgcccacaagaagaaccuguacgaccacgcccugaugagcaucaucagcaccuuccaccugagcauccccaacuucaaccaguacgaggccaugagcugcgacuucaacggcggcaagaucagcgugcaguacaaccugagccacgccuacgccguggacgccgccaaccacugcggcaccaucgccaacggcgugcugcagaccuucaugagaauggccuggggcggcagcuacaucgcccuggacagcggcugcggcagcugggacugcaucaugaccagcuaccaguaccugaucauccagaacaucaccugggaggaccacugccaguucagcagacccagccccaucggcuaccugggccugcugagccagagaaccagagacaucuacaucagcagaagacugcugggcaccuucaccuggacccugagcgacagcgagggcaacgagacccccggcggcuacugccugaccagauggaugcugaucgaggccgagcugaagugcuucggcaacaccgccguggccaagugcaacgagaagcacgacgaggaguucugcgacaugcugagacuguucgacuucaacaagcaggccaucagaagacugaagaccgaggcccagaugagcauccagcugaucaacaaggccgugaacgcccugaucaacgaccagcugaucaugaagaaccaccugagagacaucaugugcauccccuacugcaacuacagcaaguacugguaccugaaccacaccgugaccggcaagaccagccugcccagaugcuggcuggugagcaacggcagcuaccugaacgagacccacuucagcgacgacaucgagcagcaggccgacaacaugaucaccgagcugcugcagaaggaguacaucgacagacagggcaagaccccccugggccugguggaccuguucguguucagcaccagcuucuaccugaucagcaucuuccugcaccuggugaagauccccacccacagacacguggugggcaagcccugccccaagccccacagacugaaccacaugggcaucugcagcugcggccuguacaagcaccccggcgugcccgugaaguggaagagaugaggacuaguaauaaggaaacuguaugaaugucugugggcaggaagugaagagauccuucuguaaagguuuuuggaauuaugucugcugaauaauaaacuuuuuugaaauaauaaaucugguagaaaaaugagaucuaaaaaaaaaaaaaaaaaaaaaaaaaaaaaaaaaaaaaaaaaaaaaaaaaaaaaaaaaaaaaaaaaaaaaaaaaaaaaaaaaaaaaaaaaaaaaaaaaaaa

SEQ ID NO: 36079 - RNA, 1785 nt, Artificial Sequence
  mRNA product Design b-4 (A100) comprising derived and/or modified sequence from LASV(Lassa virus/H.sapiens-wt/NGA/2015/ISTH_0543;Clade II)__AVO03639__GPCmut9 (opt4)
aggagagucccgcagucggcguccagcggcucugcuuguucgugugugugucguugcaggccuuauucaagcuuaccaugggccagaucaucaccuucuuccaggaggugccccacgugaucgaggaggugaugaacaucgugcugaucgcccugagccugcuggccauccugaagggcaucuacaacguggccaccugcggccuguucggccuggugagcuuccugcugcugugcggcagaagcugcagcaccaccuacaagggcguguacgagcugcagacccuggagcuggacauggccaaccugaacaugaccaugccccugagcugcaccaagaacaacagccaccacuacaucauggugggcaacgagaccggccuggagcugacccugaccaacaccagcaucaucaaccacaaguucugcaaccugagcgacgcccacaagaagaaccuguacgaccacgcccugaugagcaucaucagcaccuuccaccugagcauccccaacuucaaccaguacgaggccaugagcugcgacuucaacggcggcaagaucagcgugcaguacaaccugagccacaccuacgccguggacgccgccaaccacugcggcaccaucgccaacggcgugcugcagaccuucaugagaauggccuggggcggcagcuacaucgcccuggacagcggcugcggcagcugggacugcaucaugaccagcuaccaguaccuggugauccagaacaccaccugggaggaccacugccaguucagcagacccagccccaucggcuaccugggccugcugagccagagaaccagagacaucuacaucagcagaagacugcugggcaccuucaccuggacccugagcgacagcgagggcaacgagacccccggcggcuacugccugaccagauggaugcugaucgaggccgagcugaagugcuucggcaacaccgccguggccaagugcaacgagaagcacgacgaggaguucugcgacaugcugagacuguucgacuucaacaagcaggccaucagaagacugaagaccgaggcccagaugagcauccagcugaucaacaaggccgugaacgcccugaucaacgaccagcugaucaugaagaaccaccugagagacaucaugugcauccccuacugcaacuacagcaaguacugguaccugaaccacaccgugaccggcaagaccagccugcccagaugcuggcuggugagcaacggcagcuaccugaacgagacccacuucagcgacgacaucgagcagcaggccgacaacaugaucaccgagcugcugcagaaggaguacaucgacagacagggcaagaccccccugggccugguggaccuguucguguucagcaccagcuucuaccugaucagcaucuuccugcaccuggugaagauccccacccacagacacaucaccggcaagcccugccccaagccccacagacugaaccacaugggcaucugcagcugcggccuguacaagcaccccggcgugcccgugaaguggaagagaugaggacuaguaauaaggaaacuguaugaaugucugugggcaggaagugaagagauccuucuguaaagguuuuuggaauuaugucugcugaauaauaaacuuuuuugaaauaauaaaucugguagaaaaaugagaucuaaaaaaaaaaaaaaaaaaaaaaaaaaaaaaaaaaaaaaaaaaaaaaaaaaaaaaaaaaaaaaaaaaaaaaaaaaaaaaaaaaaaaaaaaaaaaaaaaaaa

SEQ ID NO: 36080 - RNA, 1785 nt, Artificial Sequence
  mRNA product Design b-4 (A100) comprising derived and/or modified sequence from LASV(Lassa virus/H.sapiens-wt/NGA/2016/ISTH_0009;Clade II)__AVO03571__GPCmut9 (opt4)
aggagagucccgcagucggcguccagcggcucugcuuguucgugugugugucguugcaggccuuauucaagcuuaccaugggccagaucaucaccuucuuccaggaggugccccacgugaucgaggaggugaugaacaucgugcugaucgcccugagccugcuggccauccugaagggcaucuacaacguggccaccugcggccugcugggccuggugagcuuccugcugcugugcggcagaagcugcagcaccaccuacaagggcguguacgagcugcagacccuggagcuggacauggccagccugaacaugaccaugccccugagcugcaccaagaacaacagccaccacuacaucauggugggcaacgagaccggccuggagcugacccugaccaacaccagcaucaucaaccacaaguucugcaaccugagcgacgcccacaagaagaaccuguacgaccacgcccugaugagcaucaucagcaccuuccaccugagcauccccaacuucaaccaguacgaggccaugagcugcgacuucaacggcggcagaaucagcgugcaguacaaccugagccacagcuacgccguggacgccgccaaccacugcggcaccaucgccaacggcgugcugcagaccuucaugagaauggccuggggcggcagcuacaucgcccuggacagcggcugcggcagcugggacugcaucaugaccagcuaccaguaccugaucauccagaacaccaccugggaggaccacugccaguucagcagacccagccccaucggcuaccugggccugcugagccagagaaccagagacaucuacaucagcagaagacugcugggcaccuucaccuggacccugagcgacagcgagggcaacgagacccccggcggcuacugccugaccagauggaugcugaucgaggccgagcugaagugcuucggcaacaccgccguggccaagugcaacgagaagcacgacgaggaguucugcgacaugcugagacuguucgacuucaacaagcaggccaucagaagacugaagaccgaggcccagaugagcauccagcugaucaacaaggccgugaacgcccugaucaacgaccagcugaucaugaagaaccaccugagagacaucaugugcauccccuacugcaacuacagcaaguacugguaccugaaccacaccgugaccggcaagaccagccugcccagaugcuggcuggugagcaacggcagcuaccugaacgagacccacuucagcgacgacaucgagcagcaggccgacaacaugaucaccgagcugcugcagaaggaguacaucgacagacagggcaagaccccccugggccugguggaccuguucguguucagcaccagcuucuaccugaucagcaucuuccugcaccuggugaagauccccacccacagacacaucaccggcaagcccugccccaagccccacagacugaaccacaugggcaucugcagcugcggccuguacaaccaccccggcgugcccgugaaguggaagagaugaggacuaguaauaaggaaacuguaugaaugucugugggcaggaagugaagagauccuucuguaaagguuuuuggaauuaugucugcugaauaauaaacuuuuuugaaauaauaaaucugguagaaaaaugagaucuaaaaaaaaaaaaaaaaaaaaaaaaaaaaaaaaaaaaaaaaaaaaaaaaaaaaaaaaaaaaaaaaaaaaaaaaaaaaaaaaaaaaaaaaaaaaaaaaaaaa

SEQ ID NO: 36081 - RNA, 1785 nt, Artificial Sequence
  mRNA product Design b-4 (A100) comprising derived and/or modified sequence from LASV(Lassa virus/H.sapiens-wt/NGA/2016/ISTH_0017;Clade II)__AVO03567__GPCmut9 (opt4)
aggagagucccgcagucggcguccagcggcucugcuuguucgugugugugucguugcaggccuuauucaagcuuaccaugggccagaucaucaccuucuuccaggaggugccccacgugaucgaggaggugaugaacaucgugcugaucgcccugagccugcuggccauccugaagggcaucuacaacguggccaccugcggccuguucggccuggugagcuuccugcugcugugcggcagaagcugcagcaccaccuacaagggcguguacgagcugcagacccuggagcuggacauggccagccugaacaugaccaugccccugagcugcaccaagaacaacagccaccacuacaucauggugggcaacgagaccggccuggagcugacccugaccaacaccagcaucaucaaccacaaguucugcaaccugagcgacgcccacaagaagaaccuguacgaccacgcccugaugagcaucaucagcaccuuccaccugagcauccccaacuucaaccaguacgaggccaugagcugcgacuucaacggcggcaagaucagcgugcaguacaaccugagccacaccuacgccaucgacgccgccaaccacugcggcaccaucgccaacggcgugcugcagaccuucaugagaauggccuggggcggcagcuacaucgcccuggacagcggcugcggcagcugggacugcaucaugaccagcuaccaguaccugaucauccagaacaccaccugggaggaccacugccaguucagcagacccagccccaucggcuaccugggccugcugagccagagaaccagagacaucuacaucagcagaagacugcugggcaccuucaccuggacccugagcgacagcgagggcaacgagacccccggcggcuacugccugaccagauggaugcugaucgaggccgagcugaagugcuucggcaacaccgccguggccaagugcaacgagaagcacgacgaggaguucugcgacaugcugagacuguucgacuucaacaagcaggccaucagaagacugaagaccgaggcccagaugagcauccagcugaucaacaaggccgugaacgcccugaucaacgaccagcugaucaugaagaaccaccugagagacaucaugugcauccccuacugcaacuacagcaaguacugguaccugaaccacaccgugaccggcaagaccagccugcccagaugcuggcuggugagcaacggcagcuaccugaacgagacccacuucagcgacgacaucgagcagcaggccgacaacaugaucaccgagcugcugcagaaggaguacauggacagacagggcaagaccccccugggccugguggaccuguucguguucagcaccagcuucuaccugaucagcaucuuccugcaccuggugagaauccccacccacagacacgugaucggcaagcccugccccaagccccacagacugaaccacaugggcaucugcagcugcggccuguacaagcaccccggcgugcccgugaaguggaagagaugaggacuaguaauaaggaaacuguaugaaugucugugggcaggaagugaagagauccuucuguaaagguuuuuggaauuaugucugcugaauaauaaacuuuuuugaaauaauaaaucugguagaaaaaugagaucuaaaaaaaaaaaaaaaaaaaaaaaaaaaaaaaaaaaaaaaaaaaaaaaaaaaaaaaaaaaaaaaaaaaaaaaaaaaaaaaaaaaaaaaaaaaaaaaaaaaa

SEQ ID NO: 36082 - RNA, 1785 nt, Artificial Sequence
  mRNA product Design b-4 (A100) comprising derived and/or modified sequence from LASV(Lassa virus/H.sapiens-wt/NGA/2018/ISTH_0959;Clade II)__AVV65099__GPCmut9 (opt4)
aggagagucccgcagucggcguccagcggcucugcuuguucgugugugugucguugcaggccuuauucaagcuuaccaugggccagaucaucaccuucuuccaggaggugccccacgugaucgaggaggugaugaacaucgugcugaucgcccugagccugcuggccauccugaagggcaucuacaacguggugaccugcggccuguucggccuggugagcuuccugcugcugugcggcagaagcugcagcaccaccuacaagggcguguacgagcugcagacccuggagcuggacauggccagccugaacaugaccaugccccugagcugcaccaagaacaacagccaccacuacaucauggugggcaacgagaccggccuggagcugacccugaccaacaccagcaucaucaaccacaaguucugcaaccugagcgacgcccacaagaagaaccuguacgaccacgcccugaugagcaucaucagcaccuuccaccugagcauccccaacuucaaccaguacgaggccaugagcugcgacuucaacggcggcaagaucagcgugcaguacaaccugagccacgccuacgccaucgacgccgccaaccacugcggcaccaucgccaacggcgugcugcagaccuucaugagaauggccuggggcggcagcuacaucgcccuggacagcggcugcggcagcugggacugcaucaugaccagcuaccaguaccugaucauccagaacaccaccugggaggaccacugccaguucagcagacccagccccaucggcuaccugggccugcugagccagagaaccagagacaucuacaucagcagaagacugcugggcaccuucaccuggacccugagcgacagcgagggcaacgagacccccggcggcuacugccugaccagauggaugcugaucgaggccgagcugaagugcuucggcaacaccgccguggccaagugcaacgagaagcacgacgaggaguucugcgacaugcugagacuguucgacuucaacaagcaggccaucagaagacugaagaccgaggcccagaugagcauccagcugaucaacaaggccgugaacgcccugaucaacgaccagcugaucaugaagaaccaccugagagacaucaugugcauccccuacugcaacuacagcaaguacugguaccugaaccacaccgugaccggcaagaccagccugcccagaugcuggcuggugagcaacggcagcuaccugaacgagacccacuucagcgacgacaucgagcagcaggccgacaacaugaucaccgagcugcugcagaaggaguacaucgacagacagggcaagaccccccugggccugguggaccuguucguguucagcaccagcuucuaccugaucagcaucuuccugcaccuggugaagauccccacccacagacacgugaucggcaagcccugccccaagccccacagacugaaccacaugggcaucugcagcugcggccuguacaagcaccccggcgugcccgugaaguggaagagaugaggacuaguaauaaggaaacuguaugaaugucugugggcaggaagugaagagauccuucuguaaagguuuuuggaauuaugucugcugaauaauaaacuuuuuugaaauaauaaaucugguagaaaaaugagaucuaaaaaaaaaaaaaaaaaaaaaaaaaaaaaaaaaaaaaaaaaaaaaaaaaaaaaaaaaaaaaaaaaaaaaaaaaaaaaaaaaaaaaaaaaaaaaaaaaaaa

SEQ ID NO: 36083 - RNA, 1785 nt, Artificial Sequence
  mRNA product Design b-4 (A100) comprising derived and/or modified sequence from LASV(LASV003-NIG-2008;Clade II)__AIT17580__GPCmut9 (opt4)
aggagagucccgcagucggcguccagcggcucugcuuguucgugugugugucguugcaggccuuauucaagcuuaccaugggccagaucaucaccuucuuccaggaggugccccacgugaucgaggaggugaugaacaucgugcugaucgcccugagccugcuggccauccugaagggcaucuacaacguggccaccugcggccuguucggccuggugagcuuccugcugcugugcggcagaagcugcagcaccaccuacaagggcguguacgagcugcagacccuggagcuggacauggccagccugaacaugaccaugccccugagcugcaccaagaacaacagccaccacuacaucauggugggcaacgagaccggccuggagcugacccugaccaacaccagcaucaucaaccacaaguucugcaaccugagcgacgcccacaagaagaaccuguacgaccacgcccugaugagcaucaucagcaccuuccaccugagcauccccaacuucaaccaguacgaggccaugagcugcgacuucaacggcggcaagaucagcgugcaguacaaccugagccacaccuacgccguggacgccgccaaccacugcggcaccaucgccaacggcgugcugcagaccuucaugagaauggccuggggcggcagcuacaucgcccuggacagcggcugcggcagcugggacugcaucaugaccagcuaccaguaccugaucauccagaacaccaccugggaggaccacugccaguucagcagacccagccccaucggcuaccugggccugcugagccagagaaccagagacaucuacaucagcagaagacugcugggcaccuucaccuggacccugagcgacagcgagagcaacgagacccccggcggcuacugccugaccagauggaugcugaucgaggccgagcugaagugcuucggcaacaccgccguggccaagugcaacgagaagcacgacgaggaguucugcgacaugcugagacuguucgacuucaacaagcaggccaucagaagacugaaggccgaggcccagaugagcauccagcugaucaacaaggccgugaacgcccugaucaacgaccagcugaucaugaagaaccaccugagagacaucaugugcauccccuacugcaacuacagcaaguacugguaccugaaccacaccgugaccggcagaaccagccugcccagaugcuggcuggugagcaacggcagcuaccugaacgagacccacuucagcgacgacaucgagcagcaggccgacaacaugaucaccgagcugcugcagaaggaguacauggacagacagggcaagaccccccugggccugguggaccuguucguguucagcaccagcuucuaccugaucagcaucuuccugcaccuggugaagauccccacccacagacacgugaucggcaagcccugccccaagccccacagacugaaccacaugggcaucugcagcugcggccuguacaagcaccccggcgugcccgugaaguggaagagaugaggacuaguaauaaggaaacuguaugaaugucugugggcaggaagugaagagauccuucuguaaagguuuuuggaauuaugucugcugaauaauaaacuuuuuugaaauaauaaaucugguagaaaaaugagaucuaaaaaaaaaaaaaaaaaaaaaaaaaaaaaaaaaaaaaaaaaaaaaaaaaaaaaaaaaaaaaaaaaaaaaaaaaaaaaaaaaaaaaaaaaaaaaaaaaaaa

SEQ ID NO: 36084 - RNA, 1785 nt, Artificial Sequence
  mRNA product Design b-4 (A100) comprising derived and/or modified sequence from LASV(LASV035-NIG-2009;Clade II)__AIT17588__GPCmut9 (opt4)
aggagagucccgcagucggcguccagcggcucugcuuguucgugugugugucguugcaggccuuauucaagcuuaccaugggccagaucaucaccuucuuccaggaggugccccacgugaucgaggaggugaugaacaucgugcugaucgcccugagccugcuggccauccugaagggcaucuacaacguggccaccugcggccuguucggccuggugagcuuccugcugcugugcggcagaagcugcagcaccaccuacaagggcguguacgagcugcagacccuggagcuggacauggccagccugaacaugaccaugccccugagcugcaccaagaacaacagccaccacuacaucauggugggcaacgagaccggccuggagcugacccugaccaacaccagcaucaucaaccacaaguucugcaaccugagcgacgcccacaagaagaaccuguacgaccacgcccugaugagcaucaucagcaccuuccaccugagcauccccaacuucaaccaguacgaggccaugagcugcgacuucaacggcggcaagaucagcgugcaguacaaccugagccacgccuacgccguggacgccgccaaccacugcggcaccaucgccaacggcgugcugcagaccuucaugagaauggccuggggcggcagcuacaucgcccuggacagcggcugcggcagcugggacugcaucaugaccagcuaccaguaccugaucauccagaacaccaccugggaggaccacugccaguucagcagacccagccccaucggcuaccugggccugcugagccagagaaccagagacaucuacaucagcagaagacugcugggcaccuucaccuggacccugagcgacagcgagggcaacgagacccccggcggcuacugccugaccagauggaugcugaucgaggccgagcugaagugcuucggcaacaccgccguggccaagugcaacgagaagcacgacgaggaguucugcgacaugcugagacuguucgacuucaacaagcaggccaucagaagacugaaggccgaggcccagaugagcauccagcugaucaacaaggccgugaacgcccugaucaacgaccagcugaucaugaagaaccaccugagagacaucaugugcauccccuacugcaacuacagcaaguacugguaccugaaccacaccgugaccggcaagaccagccugcccagaugcuggcuggugagcaacggcagcuaccugaacgagacccacuucagcgacgacaucgagcagcaggccgacaacaugaucaccgagcugcugcagaaggaguacaucgacagacagggcaagaccccccugggccugguggaccuguucguguucagcaccagcuucuaccugaucagcaucuuccugcaccuggugaagauccccacccacagacacgugaucggcaagcccugccccaagccccacagacugaaccacaugggcaucugcagcugcggccuguacaagcaccccggcgugcccgugaaguggaagagaugaggacuaguaauaaggaaacuguaugaaugucugugggcaggaagugaagagauccuucuguaaagguuuuuggaauuaugucugcugaauaauaaacuuuuuugaaauaauaaaucugguagaaaaaugagaucuaaaaaaaaaaaaaaaaaaaaaaaaaaaaaaaaaaaaaaaaaaaaaaaaaaaaaaaaaaaaaaaaaaaaaaaaaaaaaaaaaaaaaaaaaaaaaaaaaaaa

SEQ ID NO: 36085 - RNA, 1785 nt, Artificial Sequence
  mRNA product Design b-4 (A100) comprising derived and/or modified sequence from LASV(LASV1000-NIG-2009;Clade II)__AIT17782__GPCmut9 (opt4)
aggagagucccgcagucggcguccagcggcucugcuuguucgugugugugucguugcaggccuuauucaagcuuaccaugggccagaucaucaccuucuuccaggaggugccccacgugaucgaggaggugaugaacaucgugcugaucgcccugagccugcuggccauccugaagggcaucuacaacguggccaccugcggccuguucggccuggugagcuuccugcugcugugcggcagaagcugcagcaccaccuacaagggcguguacgagcugcagacccuggagcuggacauggccagccugaacaugaccaugccccugagcugcaccaagaacaacagccaccacuacaucauggugggcaacgagaccggccuggagcugacccugaccaacaccagcaucaucaaccacaaguucugcaaccugagcgacgcccacaagaagaaccuguacgaccacgcccugaugagcaucaucagcaccuuccaccugagcauccccaacuucaaccaguacgaggccaugagcugcgacuucaacggcggcaagaucagcgugcaguacaaccugagccacaccuacgccguggacgccgccaaccacugcggcaccaucgccaacggcgugcugcagaccuucaugagaauggccuggggcggcagcuacaucgcccuggacagcggcugcggcagcugggacugcaucaugaccagcuaccaguaccugaucauccagaacaccaccugggaggaccacugccaguucagcagacccagccccaucggcuaccugggccugcugagccagagaaccagagacaucuacaucagcagaagacugcugggcaccuucaccuggacccugagcgacagcgagggcaacgagacccccggcggcuacugccugaccagauggaugcugaucgaggccgagcugaagugcuucggcaacaccgccguggccaagugcaacgagaagcacgacgaggaguucugcgacaugcugagacuguucgacuucaacaagcaggccaucaagagacugaagaccgaggcccagaugagcauccagcugaucaacaaggccgugaacgcccugaucaacgaccagcugaucaugaagaaccaccugagagacaucaugugcauccccuacugcaacuacagcaaguacugguaccugaaccacaccgugaccggcaagaccagccugcccagaugcuggcuggugagcaacggcagcuaccugaacgagacccacuucagcgacgacaucgagcagcaggccgacaacaugaucaccgagcugcugcagaaggaguacaucgacagacagggcaagaccccccugggccugguggaccuguucguguucagcaccagcuucuaccugaucagcaucuuccugcaccuggugaagauccccacccacagacacguggugggcaagcccugccccaagccccacagacugaaccacaugggcaucugcagcugcggccuguacaagcaccccggcgugcccgugaaguggaagagaugaggacuaguaauaaggaaacuguaugaaugucugugggcaggaagugaagagauccuucuguaaagguuuuuggaauuaugucugcugaauaauaaacuuuuuugaaauaauaaaucugguagaaaaaugagaucuaaaaaaaaaaaaaaaaaaaaaaaaaaaaaaaaaaaaaaaaaaaaaaaaaaaaaaaaaaaaaaaaaaaaaaaaaaaaaaaaaaaaaaaaaaaaaaaaaaaa

SEQ ID NO: 36086 - RNA, 1785 nt, Artificial Sequence
  mRNA product Design b-4 (A100) comprising derived and/or modified sequence from LASV(LASV221-NIG-2010;Clade II)__AIT17624__GPCmut9 (opt4)
aggagagucccgcagucggcguccagcggcucugcuuguucgugugugugucguugcaggccuuauucaagcuuaccaugggccagaucaucaccuucuuccaggaggugccccacgugaucgaggaggugaugaacaucgugcugaucgcccugagccugcuggccauccugaagggcaucuacaacguggccaccugcggccuguucggccuggugagcuuccugcugcugugcggcagaagcugcagcaccaccuacaagggcguguacgagcugcagacccuggagcuggacauggccagccugaacaugaccaugccccugagcugcaccaagaacaacagccaccacuacaucauggugggcaacgagaccggccuggagcugacccugaccaacaccagcaucaucaaccacaaguucugcaaccugagcgacgcccacaagaagaaccuguacgaccacgcccugaugagcaucaucagcaccuuccaccugagcauccccaacuucaaccaguacgaggccaugagcugcgacuucaacggcggcaagaucagcgugcaguacaaccugagccacaccuacgccaucgacgccgccaaccacugcggcaccaucgccaacggcgugcugcagaccuucaugagaauggccuggggcggcagcuacaucgcccuggacagcggcugcggcagcugggacugcaucaugaccagcuaccaguaccugaucauccagaacaccaccugggaggaccacugccaguucagcagacccagccccaucggcuaccugggccugcugagccagagaaccagagacaucuacaucagcagaagacugcugggcaccuucaccuggacccugagcgacagcgagggcaacgagacccccggcggcuacugccugaccagauggaugcugaucgaggccgagcugaagugcuucggcaacaccgccguggccaagugcaacgagaagcacgacgaggaguucugcgacaugcugagacuguucgacuucaacaagcaggccaucagaagacugaagaccgaggcccagaugagcauccagcugaucaacaaggccgugaacgcccugaucaacgaccagcugaucaugaagaaccaccugagagacaucaugugcauccccuacugcaacuacagcaaguacugguaccugaaccacaccgugaccggcaagaccagccugcccagaugcuggcuggugagcaacggcagcuaccugaacgagacccacuucagcgacgacaucgagcagcaggccgacaacaugaucaccgagaugcugcagaaggaguacauggacagacagggcaagaccccccugggccugguggaccuguucguguucagcaccagcuucuaccugaucagcaucuuccugcaccuggugaagauccccacccacagacacgugaucggcaagcccugccccaagccccacagacugaaccacaugggcaucugcagcugcggccuguacaagcaccccggcgugcccgugaaguggaagagaugaggacuaguaauaaggaaacuguaugaaugucugugggcaggaagugaagagauccuucuguaaagguuuuuggaauuaugucugcugaauaauaaacuuuuuugaaauaauaaaucugguagaaaaaugagaucuaaaaaaaaaaaaaaaaaaaaaaaaaaaaaaaaaaaaaaaaaaaaaaaaaaaaaaaaaaaaaaaaaaaaaaaaaaaaaaaaaaaaaaaaaaaaaaaaaaaa

SEQ ID NO: 36087 - RNA, 1785 nt, Artificial Sequence
  mRNA product Design b-4 (A100) comprising derived and/or modified sequence from LASV(LASV237-NIG-2010;Clade II)__AIT17638__GPCmut9 (opt4)
aggagagucccgcagucggcguccagcggcucugcuuguucgugugugugucguugcaggccuuauucaagcuuaccaugggccagaucaucaccuucuuccaggaggugccccacgugaucgaggaggugaugaacaucgugcugaucgcccugagccugcuggccauccugaagggcaucuacaacguggccaccugcggccuguucggccuggugagcuuccugcugcugugcggcagaagcugcagcaccaccuacaagggcguguacgagcugcagacccuggagcuggacauggccagccugaacaugaccaugccccugagcugcaccaagaacaacagccaccacuacaucauggugggcaacgagaccggccuggagcugacccugaccaacaccagcaucaucaaccacaaguucugcaaccugagcgacgcccacaagaaggaccuguacgaccacgcccugaugagcaucaucagcaccuuccaccugagcauccccaacuucaaccaguacgaggccaugagcugcgacuucaacggcggcaagaucagcgugcaguacaaccugagccacaccuacgccguggacgccgccaaccacugcggcaccaucgccaacggcgugcugcagaccuucaugagaauggccuggggcggcagcuacaucgcccuggacagcggcugcggcagcugggacugcaucaugaccagcuaccaguaccugaucauccagaacaccaccugggaggaccacugccaguucagcagacccagccccaucggcuaccugggccugcugagccagagaaccagagacaucuacaucagcagaagacugcugggcaccuucaccuggacccugagcgacagcgagggcaacgagacccccggcggcuacugccugaccagauggaugcugaucgaggccgagcugaagugcuucggcaacaccgccguggccaagugcaacgagaagcacgacgaggaguucugcgacaugcugagacuguucgacuucaacaagcaggccaucagaagacugaagaccgaggcccagaugagcauccagcugaucaacaaggccgugaacgcccugaucaacgaccagcugaucaugaagaaccaccugagagacaucaugugcauccccuacugcaacuacagcaaguacugguaccugaaccacaccgugaccggcaagaccagccugcccagaugcuggcuggugagcaacggcagcuaccugaacgagacccacuucagcgacgacaucgagcagcaggccgacaacaugaucaccgagcugcugcagaaggaguacauggacagacagggcaagaccccccugggccugguggaccuguucguguucagcaccagcuucuaccugaucagcaucuuccugcaccugaucaagauccccacccacagacacaucaccggcaagcccugccccaagccccacagacugaaccacaugggcaucugcagcugcggccuguacaagcaccccggcgugcccgugaaguggaagagaugaggacuaguaauaaggaaacuguaugaaugucugugggcaggaagugaagagauccuucuguaaagguuuuuggaauuaugucugcugaauaauaaacuuuuuugaaauaauaaaucugguagaaaaaugagaucuaaaaaaaaaaaaaaaaaaaaaaaaaaaaaaaaaaaaaaaaaaaaaaaaaaaaaaaaaaaaaaaaaaaaaaaaaaaaaaaaaaaaaaaaaaaaaaaaaaaa

SEQ ID NO: 36088 - RNA, 1785 nt, Artificial Sequence
  mRNA product Design b-4 (A100) comprising derived and/or modified sequence from LASV(LASV253-NIG-2011;Clade II)__AIT17670__GPCmut9 (opt4)
aggagagucccgcagucggcguccagcggcucugcuuguucgugugugugucguugcaggccuuauucaagcuuaccaugggccagaucaucaccuucuuccaggaggugccccacgugaucgaggaggugaugaacaucgugcugaucgcccugagccugcuggccauccugaagggcaucuacaacguggccaccugcggccuguucggccuggugagcuuccugcugcugugcggcagaagcugcagcaccaccuacaagggcguguacgagcugcagacccuggagcuggacauggccagccugaacaugaccaugccccugagcugcaccaagaacaacagccaccacuacaucauggugggcaacgagaccggccuggagcugacccugaccaacaccagcaucaucaaccacaaguucugcaaccugagcgacgcccacaagaagaaccuguacgaccacgcccugaugagcaucaucagcaccuuccaccugagcauccccaacuucaaccaguacgaggccaugagcugcgacuucaacggcggcaagaucagcgugcaguacaaccugagccacaccuacgccguggacgccgccaaccacugcggcaccaucgccaacggcgugcugcagaccuucaugagaauggccuggggcggcagcuacaucgcccuggacagcggcugcggcagcugggacugcaucaugaccagcuaccaguaccugaucauccagaacaccaccugggaggaccacugccaguucagcagacccagccccaucggcuaccugggccugcugagccagagaaccagagacaucuacaucagcagaagacugcugggcaccuucaccuggacccugagcgacagcgagggcaacgagacccccggcggcuacugccugaccagauggaugcugaucgaggccgagcugaagugcuucggcaacaccgccguggccaagugcaacgagaagcacgacgaggaguucugcgacaugcugagacuguucgacuucaacaagcaggccaucagaagacugaaggccgaggcccagaugagcauccagcugaucaacaaggccgugaacgcccugaucaacgaccagcugaucaugaagaaccaccugagagacaucaugugcauccccuacugcaacuacagcaaguacugguaccugaaccacaccgugaccggcagaaccagccugcccagaugcuggcuggugagcaacggcagcuaccugaacgagacccacuucagcgacgacaucgagcagcaggccgacaacaugaucaccgagcugcugcagaaggaguacaucgacagacagggcaagaccccccugggccugguggaccuguucguguucagcaccagcuucuaccugaucagcaucuuccugcaccuggugaagauccccacccacagacacaucaucggcaagcccugccccaagccccacagacugaaccacaugggcaucugcagcugcggccuguacaagcaccccggcgugcccgugaaguggaagagaugaggacuaguaauaaggaaacuguaugaaugucugugggcaggaagugaagagauccuucuguaaagguuuuuggaauuaugucugcugaauaauaaacuuuuuugaaauaauaaaucugguagaaaaaugagaucuaaaaaaaaaaaaaaaaaaaaaaaaaaaaaaaaaaaaaaaaaaaaaaaaaaaaaaaaaaaaaaaaaaaaaaaaaaaaaaaaaaaaaaaaaaaaaaaaaaaa

SEQ ID NO: 36089 - RNA, 1785 nt, Artificial Sequence
  mRNA product Design b-4 (A100) comprising derived and/or modified sequence from LASV(LASV254-NIG-2011;Clade II)__AIT17674__GPCmut9 (opt4)
aggagagucccgcagucggcguccagcggcucugcuuguucgugugugugucguugcaggccuuauucaagcuuaccaugggccagaucaucaccuucuuccaggaggugccccacgugaucgaggaggugaugaacaucgugcugaucgcccugagccugcuggccauccugaagggcaucuacaacguggccaccugcggccuguucggccuggugagcuuccugcugcugugcggcagaagcugcagcaccaccuacaagggcguguacgagcugcagacccuggagcuggacaugaccaaccugaacaugaccaugccccugagcugcaccaagaacaacagccaccacuacaucauggugggcaacgagaccggccuggagcugacccugaccaacaccagcaucaucaaccacaaguucugcaaccugagcgacgcccacaagaagaaccuguacaaccacgcccugaugagcaucaucagcaccuuccaccugagcauccccaacuucaaccaguacgaggccaugagcugcgacuucaacggcggcaagaucagcgugcaguacaaccugagccacagcuacgccguggacgccgccaaccacugcggcaccaucgccaacggcgugcugcagaccuucaugagaauggccuggggcggcagcuacaucgcccuggacagcggcugcggcaacugggacugcaucaugaccagcuaccaguaccugaucauccagaacaccaccugggaggaccacugccaguucagcagacccagccccaucggcuaccugggccugcugagccagagaaccagagacaucuacaucagcagaagacugcugggcaccuucaccuggacccugagcgacagcgagggcaacgagacccccggcggcuacugccugaccagauggaugcugaucgaggccgagcugaagugcuucggcaacaccgccguggccaagugcaacgagaagcacgacgaggaguucugcgacaugcugagacuguucgacuucaacaagcaggccaucagaagacugaagaccgaggcccaggccaacauccagcugaucaacaaggccgugaacgcccugaucaacgaccagcugaucaugaagaaccaccugagagacaucaugugcauccccuacugcaacuacagcaaguacugguaccugaaccacaccgugaccggcaagaccagccugcccagaugcuggcuggugagcaacggcagcuaccugaacgagacccacuucagcgacgacaucgagcagcaggccgacaacaugaucaccgagcugcugcagaaggaguacauggacagacagggcaagaccccccugggccugguggaccuguucguguucagcaccagcuucuaccugaucagcaucuuccugcaccuggugaagauccccacccacagacacgugaucggcaagcccugccccaagccccacagacugaaccacaugggcaucugcagcugcggccuguacaagcaccccggcgugcccgugaaguggaagagaugaggacuaguaauaaggaaacuguaugaaugucugugggcaggaagugaagagauccuucuguaaagguuuuuggaauuaugucugcugaauaauaaacuuuuuugaaauaauaaaucugguagaaaaaugagaucuaaaaaaaaaaaaaaaaaaaaaaaaaaaaaaaaaaaaaaaaaaaaaaaaaaaaaaaaaaaaaaaaaaaaaaaaaaaaaaaaaaaaaaaaaaaaaaaaaaaa

SEQ ID NO: 36090 - RNA, 1785 nt, Artificial Sequence
  mRNA product Design b-4 (A100) comprising derived and/or modified sequence from LASV(Nig08-A19;Clade III)__ADU56618__GPCmut9 (opt4)
aggagagucccgcagucggcguccagcggcucugcuuguucgugugugugucguugcaggccuuauucaagcuuaccaugggccagaucgugaccuucuuccaggaggugccccacgugaucgaggaggugaugaacaucgugcugaucgcccugagcauccuggccauccugaagggccuguacaacaucgccaccugcggccugaucggccuggugaccuuccugcugcugagcggcagaagcugcagcaugaccuacaagggcguguacgagcugcagacccuggagcugaacaugaacacccugaacaugaccaugccccugagcugcaccaagaacaacagccaccacuacaucauggugggcaacgagaccggccuggagcugacccugaccaacaccagccugcugcaccacaaguucugcaaccugagcgacgcccacaagaagaaccuguacgaccacacccugaugagcaucaucagcaccuuccaccugagcauccccaacuucaaccaguacgaggccaugagcugcgacuucaacggcggcaagaucaccgugcaguacaaccugagccacagcuacgccaucgacgccgccaaccacugcggcaccguggccaacggcgugcugcagaccuucaugagaauggccuggggcggcagcuacaucgcccuggacagcggcugcggcaagugggacugcaucaugaccagcuaccaguaccugaucauccagaacaccaccugggaggaccacugccaguucagcagacccagccccaucggcuaccugggccugcugagccagagaaccagagacaucuacaucagcagaagacugcugggcaccuucaccuggacccugagcgacagcgagggcaacgagacccccggcggcuacugccugaccagauggaugcugaucgaggccgagcugaagugcuucggcaacaccgccguggccaagugcaacgagaagcacgacgaggaguucugcgacaugcugagacuguucgacuucaacaagcaggccaucagaagacugaaggccgaggcccagaugagcauccagcugaucaacaaggccgugaacgcccugaucaacgaccagcugaucaugaagaaccaccugagagacaucaugugcauccccuacugcaacuacagcaaguacugguaccugaaccacaccagcaccggcagaaccagccugcccagaugcuggcuggugagcaacggcagcuaccugaacgagacccacuucagcgacgacaucgagcagcaggccgacaacaugaucaccgagaugcugcagaaggaguaccuggacagacagggcaagaccccccugggccugguggaccuguucguguucagcaccagcuucuaccugaucagcaucuuccugcaccuggugaagauccccacccacagacacaucgugggcaagcccugccccaagccccacagacugaaccacaugggcaucugcagcugcggccuguacaagcagcccggcgugcccgugagauggaagagaugaggacuaguaauaaggaaacuguaugaaugucugugggcaggaagugaagagauccuucuguaaagguuuuuggaauuaugucugcugaauaauaaacuuuuuugaaauaauaaaucugguagaaaaaugagaucuaaaaaaaaaaaaaaaaaaaaaaaaaaaaaaaaaaaaaaaaaaaaaaaaaaaaaaaaaaaaaaaaaaaaaaaaaaaaaaaaaaaaaaaaaaaaaaaaaaaa

SEQ ID NO: 36091 - RNA, 1788 nt, Artificial Sequence
  mRNA product Design b-4 (A100) comprising derived and/or modified sequence from LASV(G1180-SLE-2010;Clade IV)__AIT17168__GPCmut9 (opt4)
aggagagucccgcagucggcguccagcggcucugcuuguucgugugugugucguugcaggccuuauucaagcuuaccaugggccagaucgugaccuucuuccaggaggugccccacgugaucgaggaggugaugaacaucgugcugaucgcccugagcauccuggccgugcugaagggccuguacaacuucgccaccugcggccuggugggccugcugaccuuccugcugcugugcggcagaagcugcaccgccagcagauacaagggcguguacgagcugcagacccuggagcugaacauggagacccugaacaugaccaugccccugagcugcaccaagaacaacagccaccacuacaucauggugggcaacgagaccggccuggagcugacccugaccaacaccagcaucaucaaccacaaguucugcaaccugagcgacgcccacaagaagaaccuguacgaccacgcccugaugagcaucaucagcaccuuccaccugagcauccccaacuucaaccaguacgaggccaugagcugcgacuucaacggcggcaagaucagcgugcaguacaaccugagccacagcuacgccggcgacgccgccaaccacugcggcaccguggccaacggcgugcugcagaccuucaugagaauggccuggggcggcagcuacaucgcccuggacagcggcugcggcagcugggacugcaucaugaccagcuaccaguaccugaucauccagaacaccaccugggaggaccacugccaguucagcagacccagccccaucggcuaccugggccugcugagccagagaaccagagacaucuacaucagcagaagacugcugggcaccuucaccuggacccugagcgacagcgagggcaaggacacccccggcggcuacugccugaccagauggaugcugaucgaggccgagcugaagugcuucggcaacaccgccguggccaagugcaacgagaagcacgacgaggaguucugcgacaugcugagacuguucgacuucaacaagcaggccauccagagacugaaggccgaggcccagaugagcauccagcugaucaacaaggccgugaacgcccugaucaacgaccagcugaucaugaagaaccaccugagagacaucaugugcauccccuacugcaacuacagcaaguacugguaccugaaccacaccaccaccggcaagaccagccugcccaagugcuggcuggugagcaacggcagcuaccugaacgagacccacuucagcgacgacaucgagcagcaggccgacaacaugaucaccgagaugcugcagaaggaguacauggagagacagggcaagaccccccugggccugguggaccuguucguguucagcaccagcuucuaccugaucagcaucuuccugcaccuggugaagauccccacccacagacacaucgugggcaagagcugccccaagccccacagacugaaccacaugggcaucugcagcugcggccuguacaagcagcccggcgugcccgugaaguggaagagaugaggacuaguaauaaggaaacuguaugaaugucugugggcaggaagugaagagauccuucuguaaagguuuuuggaauuaugucugcugaauaauaaacuuuuuugaaauaauaaaucugguagaaaaaugagaucuaaaaaaaaaaaaaaaaaaaaaaaaaaaaaaaaaaaaaaaaaaaaaaaaaaaaaaaaaaaaaaaaaaaaaaaaaaaaaaaaaaaaaaaaaaaaaaaaaaaa

SEQ ID NO: 36092 - RNA, 1788 nt, Artificial Sequence
  mRNA product Design b-4 (A100) comprising derived and/or modified sequence from LASV(G1442-SLE-2011;Clade IV)__AIT17180__GPCmut9 (opt4)
aggagagucccgcagucggcguccagcggcucugcuuguucgugugugugucguugcaggccuuauucaagcuuaccaugggccagaucgugaccuucuuccaggaggugccccacgugaucgaggaggugaugaacaucgugcugaucgcccugagcauccuggccgugcugaagggccuguacaacguggccaccugcggccugaucggccuggugaccuuccugcugcugugcggcagaagcugcaccaccacccuguacaagggcguguacgagcugcagacccuggagcugaacauggagacccugaacaugaccaugccccugagcugcaccaagaacaacagccaccacuacaucagagugggcaacgagaccggccuggagcugacccugaccaacaccagcaucaucaaccacaaguucugcaaccugagcgacgcccacaagaagaaccuguacgaccacgcccugaugagcaucaucagcaccuuccaccugagcauccccaacuucaaccaguacgaggccaugagcugcgacuucaacggcggcaagaucagcgugcaguacaaccugagccacagcuacgccggcgacgccgccaaccacugcggcaccguggccaacggcgugcugcagaccuucaugagaauggccuggggcggcagcuacaucgcccuggacagcggcugcggcaacugggacugcaucaugaccagcuaccaguaccugaucauccagaacaccaccugggacgaccacugccaguucagcagacccagccccaucggcuaccugggccugcugagccagagaaccagagacguguacaucagcagaagacugcugggcaccuucaccuggacccugagcgacagcgagggcaaggacacccccggcggcuacugccugaccagauggaugcugaucgaggccgagcugaagugcuucggcaacaccgccguggccaagugcaacgagaagcacgacgaggaguucugcgacaugcugagacuguucgacuucaacaagcaggccauccagagacugaaggccgaggcccagaugagcauccagcugaucaacaaggccgugaacgcccugaucaacgaccagcugaucaugaagaaccaccugagagacaucaugugcauccccuacugcaacuacagcaaguacugguaccugaacaacaccgccaccggcaagaccagccugcccaagugcuggcugaucagcaacggcagcuaccugaacgagacccacuucagcgacgacaucgagcaggaggccgacaacaugaucaccgagaugcugcagaaggaguacauggagagacagggcaagaccccccugggccugguggaccuguucguguucagcaccagcuucuaccugaucagcaucuuccugcaccuggugaagauccccacccacagacacaucgugggcaagagcugccccaagccccacagacugaaccacaugggcaucugcagcugcggccuguacaagcagcccggcgugcccgugagauggaagagaugaggacuaguaauaaggaaacuguaugaaugucugugggcaggaagugaagagauccuucuguaaagguuuuuggaauuaugucugcugaauaauaaacuuuuuugaaauaauaaaucugguagaaaaaugagaucuaaaaaaaaaaaaaaaaaaaaaaaaaaaaaaaaaaaaaaaaaaaaaaaaaaaaaaaaaaaaaaaaaaaaaaaaaaaaaaaaaaaaaaaaaaaaaaaaaaaa

SEQ ID NO: 36093 - RNA, 1788 nt, Artificial Sequence
  mRNA product Design b-4 (A100) comprising derived and/or modified sequence from LASV(G3010-SLE-2013;Clade IV)__AIT17344__GPCmut9 (opt4)
aggagagucccgcagucggcguccagcggcucugcuuguucgugugugugucguugcaggccuuauucaagcuuaccaugggccagaucgugaccuucuuccaggaggugccccacgugaucgaggaggugaugaacaucgugcugaucgcccugagcauccuggccgugcugaagggccuguacaacuucgccaccugcggccuggugggccuggugaccuuccugcugcugugcggcagaagcugcaccaccagccuguacaagggcguguacgagcugcagacccuggagcugaacauggagacccugaacaugaccaugccccugagcugcaccaagaacaacagccaccacuacaucauggugggcaacgagaccggccuggagcugacccugaccaacaccagcaucaucaaccacaaguucugcaaccugagcgacgcccacaagaagaaccuguacaaccacgcccugaugagcaucaucagcaccuuccaccugagcauccccaacuucaaccaguacgaggccaugagcugcgacuucaacggcggcaagaucagcgugcaguacaaccugagccacagcuacgccggcgacgccgccagccacugcggcaccguggccaacggcgugcugcagaccuucaugagaauggccuggggcggcagcuacaucgcccuggacagcggcugcggcaagugggacugcaucaugaccagcuaccaguaccugaucauccagaacaccaccugggaggaccacugccaguucagcagacccagccccaucggcuaccugggccugcugagccagagaaccagagacaucuacaucagcagaagacugcugggcaccuucaccuggacccugagcgacagcgagggcaaggacacccccggcggcuacugccugaccagauggaugcugaucgaggccgagcugaagugcuucggcaacaccgccguggccaagugcaacgagaagcacgacgaggaguucugcgacaugcugagacuguucgacuucaacaagcaggccauccagagacugaagaccgaggcccagaugagcauccagcugaucaacaaggccgugaacgcccugaucaacgaccagcugaucaugaagaaccaccugagagacaucaugugcauccccuacugcaacuacagcaaguacugguaccugaaccacaccaccaccggcaagaccagccugcccaagugcuggcuggugagcaacggcagcuaccugaacgagacccacuucagcgacgacaucgagcagcaggccgacaacaugaucaccgagaugcugcagaaggaguacauggagagacagggcaagaccccccugggccugguggaccuguucguguucagcaccagcuucuaccugaucagcaucuuccugcaccuggugaagauccccacccacagacacaucgugggcaagagcugccccaagccccacagacugaaccacaugggcaucugcagcugcggccuguacaagcagcccggcgugcccgugagauggaagagaugaggacuaguaauaaggaaacuguaugaaugucugugggcaggaagugaagagauccuucuguaaagguuuuuggaauuaugucugcugaauaauaaacuuuuuugaaauaauaaaucugguagaaaaaugagaucuaaaaaaaaaaaaaaaaaaaaaaaaaaaaaaaaaaaaaaaaaaaaaaaaaaaaaaaaaaaaaaaaaaaaaaaaaaaaaaaaaaaaaaaaaaaaaaaaaaaa

SEQ ID NO: 36094 - RNA, 1788 nt, Artificial Sequence
  mRNA product Design b-4 (A100) comprising derived and/or modified sequence from LASV(G502-SLE-2009;Clade IV)__AIT17126__GPCmut9 (opt4)
aggagagucccgcagucggcguccagcggcucugcuuguucgugugugugucguugcaggccuuauucaagcuuaccaugggccagaucgugaccuucuuccaggaggugccccacgugaucgaggaggugaugaacaucgugcugaucgcccugagcauccuggccgugcugaagggccuguacaacuucgccaccugcggccuggugggccugcugaccuuccugcugcugugcggcagaagcugcaccaccggccuguacaagggcguguacgagcugcagacccuggagcugaacauggagacccugaacaugaccaugccccugagcugcaccaagaacaacagccaccacuacaucauggugggcaacgagaccggccuggagcugacccugaccaacaccagcaucaucaaccacaaguucugcaaccugagcgacgcccacaagaagaaccuguacgaccacgcccugaugagcaucaucagcaccuuccaccugagcauccccaacuucaaccaguacgaggccaugagcugcgacuucaacggcggcaagaucagcgugcaguacaaccugagccacagcuacgccggcgacgccgccgaccacugcggcaccguggccaacggcgugcugcagaccuucaugagaauggccuggggcggcagcuacaucgcccuggacagcggcugcggcagaugggacugcaucaugaccagcuaccaguaccugaucauccagaacaccaccugggaggaccacugccaguucagcagacccagccccaucggcuaccugggccugcugagccagagaaccagagacaucuacaucagcagaagacugcugggcaccuucaccuggacccugagcgacagcgagggcaaggacacccccggcggcuacugccugaccagauggaugcugaucgaggccgagcugaagugcuucggcaacaccgccguggccaagugcaacgagaagcacgacgaggaguucugcgacaugcugagacuguucgacuucaacaagcaggccauccagagacugaaggccgaggcccagaugagcauccagcugaucaacaaggccgugaacgcccugaucaacgaccagcuggugaugaagaaccaccugagagacaucaugugcauccccuacugcaacuacagcagauacugguaccugaaccacaccaccaccggcagaaccagccugcccaagugcuggcuggugagcaacggcagcuaccugaacgagacccacuucagcgacgacaucgagcagcaggccgacaacaugaucaccgagaugcugcagaaggaguacauggagagacagggcaagaccccccugggccugguggaccuguucguguucagcaccagcuucuaccugaucagcaucuuccugcaccuggugaagauccccacccacagacacaucgugggcaagagcugccccaagccccacagacugaaccacaugggcaucugcagcugcggccuguacaagcagcccggcgugcccgugaaguggaagagaugaggacuaguaauaaggaaacuguaugaaugucugugggcaggaagugaagagauccuucuguaaagguuuuuggaauuaugucugcugaauaauaaacuuuuuugaaauaauaaaucugguagaaaaaugagaucuaaaaaaaaaaaaaaaaaaaaaaaaaaaaaaaaaaaaaaaaaaaaaaaaaaaaaaaaaaaaaaaaaaaaaaaaaaaaaaaaaaaaaaaaaaaaaaaaaaaa

SEQ ID NO: 36095 - RNA, 1788 nt, Artificial Sequence
  mRNA product Design b-4 (A100) comprising derived and/or modified sequence from LASV(G733-SLE-2010;Clade IV)__AIT17154__GPCmut9 (opt4)
aggagagucccgcagucggcguccagcggcucugcuuguucgugugugugucguugcaggccuuauucaagcuuaccaugggccagaucgugaccuucuuccaggaggugccccacgugaucgaggaggugaugaacaucgugcugaucgcccugagcauccuggccgugcugaagggccuguacaacuucgccaccugcggcaucgugggccuggugagcuuccugcugcugugcggcagaagcugcaccaccagccuguacaagggcguguacgagcugcagacccuggagcugaacauggagacccugaacaugaccaugccccugagcugcaccaagaacaacagccaccacuacaucauggugggcaacgagaccggccuggagcugacccugaccaacaccagcaucaucaaccacaaguucugcaaccugagcgacgcccacaagaagaaccuguacgaccacgcccugaugagcaucaucagcaccuuccaccugagcauccccaacuucaaccaguacgaggccaugagcugcgacuucaacggcggcaagaucagcgugcaguacaaccugagccacagcuacgccggcgacgccgccaaccacugcggcaccaucgccaacggcgugcugcagaccuucaugagaauggccuggggcggcagcuacaucgcccuggacagcggcugcgacagaugggacugcaucaugaccagcuaccaguaccugaucauccagaacaccaccugggaggaccacugccaguucagcagacccagccccaucggcuaccugggccugcugagccagagaaccagagacaucuacaucagcagaagacugcugggcaccuucaccuggacccugagcgacagcgagggcaaggacacccccggcggcuacugccugaccagauggaugcugaucgaggccgagcugaagugcuucggcaacaccgccguggccaagugcaacgagaagcacgacgaggaguucugcgacaugcugagacuguucgacuucaacaagcaggccauccagagacugaaggccgaggcccagaugagcauccagcugaucaacaaggccgugaacgcccugaucaacgaccagcugaucaugaagaaccaccugagagacaucaugugcauccccuacugcaacuacagcaaguacugguaccugaaccacaccaccaccggcaagaccagccugcccaagugcuggcuggugagcaacggcagcuaccugaacgagacccacuucagcgacgacaucgagcagcaggccgacaacaugaucaccgagaugcugcagaaggaguacauggagagacagggcaagaccccccugggccugguggaccuguucguguucagcaccagcuucuaccugaucagcaucuuccugcaccuggugaagauccccacccacagacacguggugggcaagagcugccccaagccccacagacugaaccacaugggcaucugcagcugcggccuguacggccagcccggcgugcccgugaaguggaagagaugaggacuaguaauaaggaaacuguaugaaugucugugggcaggaagugaagagauccuucuguaaagguuuuuggaauuaugucugcugaauaauaaacuuuuuugaaauaauaaaucugguagaaaaaugagaucuaaaaaaaaaaaaaaaaaaaaaaaaaaaaaaaaaaaaaaaaaaaaaaaaaaaaaaaaaaaaaaaaaaaaaaaaaaaaaaaaaaaaaaaaaaaaaaaaaaaa

SEQ ID NO: 36096 - RNA, 1788 nt, Artificial Sequence
  mRNA product Design b-4 (A100) comprising derived and/or modified sequence from MOPV/LASV reassortant(IGS-1;Clade IV)__AFY05576__GPCmut9 (opt4)
aggagagucccgcagucggcguccagcggcucugcuuguucgugugugugucguugcaggccuuauucaagcuuaccaugggccagaucgugaccuucuuccaggaggugccccacgugaucgaggaggugaugaacaucgugcugaucgcccugagcgugcuggccgugcugaagggccuguacaacuucgccaccugcggccuggugggccuggugaccuuccugcugcugugcggcagaagcugcaccaccagccuguacaagggcguguacgagcugcagacccuggagcugaacauggagacccugaacaugaccaugccccugagcugcaccaagaacaacagccaccacuacaucauggugggcaacgagaccggccuggagcugacccugaccaacaccagcaucaucaaccacaaguucugcaaccugagcgacgcccacaagaagaaccuguacgaccacgcccugaugagcaucaucagcaccuuccaccugagcauccccaacuucaaccaguacgaggccaugagcugcgacuucaacggcggcaagaucagcgugcaguacaaccugagccacagcuacgccggcgacgccgccaaccacugcggcaccguggccaacggcgugcugcagaccuucaugagaauggccuggggcggcagcuacaucgcccuggacagcggcugcggcaacugggacugcaucaugaccagcuaccaguaccugaucauccagaacaccaccugggaggaccacugccaguucagcagacccagccccaucggcuaccugggccugcugagccagagaaccagagacaucuacaucagcagaagacugcugggcaccuucaccuggacccugagcgacagcgagggcgaggacacccccggcggcuacugccugaccagauggaugcugaucgaggccgagcugaagugcuucggcaacaccgccguggccaagugcaacgagaagcacgacgaggaguucugcgacaugcugagacuguucgacuucaacaagcaggccauccagagacugaaggccgaggcccagaugagcauccagcugaucaacaaggccgugaacgcccugaucaacgaccagcugaucaugaagaaccaccugagagacaucaugugcauccccuacugcaacuacagcaaguacugguaccugaaccacaccaccaccggcagaaccagccugcccaagugcuggcuggugagcaacggcagcuaccugaacgagacccacuucagcgacgacaucgagcagcaggccgacaacaugaucaccgagaugcugcagaaggaguacauggagagacagggcaagaccccccugggccugguggaccuguucguguucagcaccagcuucuaccugaucagcaucuuccugcaccuggugaagauccccacccacagacacaucgugggcaagagcugccccaagccccacagacugaaccacaugggcaucugcagcugcggccuguacaagcagcccggcgugcccgugaaguggaagagaugaggacuaguaauaaggaaacuguaugaaugucugugggcaggaagugaagagauccuucuguaaagguuuuuggaauuaugucugcugaauaauaaacuuuuuugaaauaauaaaucugguagaaaaaugagaucuaaaaaaaaaaaaaaaaaaaaaaaaaaaaaaaaaaaaaaaaaaaaaaaaaaaaaaaaaaaaaaaaaaaaaaaaaaaaaaaaaaaaaaaaaaaaaaaaaaaa

SEQ ID NO: 36097 - RNA, 1788 nt, Artificial Sequence
  mRNA product Design b-4 (A100) comprising derived and/or modified sequence from LASV(LM765-SLE-2012;Clade IV)__AIT17814__GPCmut9 (opt4)
aggagagucccgcagucggcguccagcggcucugcuuguucgugugugugucguugcaggccuuauucaagcuuaccaugggccagaucgugaccuucuuccaggaggugccccacgugaucgaggaggugaugaacaucgugcugaucgcccugagcauccuggccgugcugaagggccuguacaacuucgccaccugcggccuggugggccuggugaccuuccugcugcugugcggcagaagcugcaccaccagccuguacaagggcguguacgagcugcagacccuggagcugaacauggagacccugaacaugaccaugccccugagcugcaccaagaacaacagccaccacuacaucauggugggcaacgagaccggccuggagcugacccugaccaacaccagcaucaucgaccacaaguucugcaaccugagcgacgcccacagaaagaaccuguacgaccacgcccugaugagcaucaucagcaccuuccaccugagcauccccaacuucaaccaguacgaggccaugagcugcgacuucaacggcggcaagaucagcgugcaguacaaccugagccacagcuacgccaaggacgccgccgaccacugcggcaccguggccaacggcgugcugcagaccuucaugagaauggccuggggcggcagcuacaucgcccuggacagcggcugcggcagaugggacugcaucaugaccagcuaccaguaccugaucauccagaacaccaccugggaggaccacugccaguucagcagacccagccccaucggcuaccugggccugcugagccagagaaccagagacaucuacaucagcagaagacugcugggcaccuucaccuggacccugagcgacagcgagggcaaggacacccccggcggcuacugccugaccagauggaugcugaucgaggccgagcugaagugcuucggcaacaccgccguggccaagugcaacgagaagcacgacgaggaguucugcgacaugcugagacuguucgacuucaacaagcaggccauccagagacugaaggccgaggcccagaugagcauccagcugaucaacaaggccgugaacgcccugaucaacgaccagcugaucaugaagaaccaccugagagacaucaugugcauccccuacugcaacuacagcaaguacugguaccugaaccacaccaccaccggcaagaccagccugcccaagugcuggcuggugagcaacggcagcuaccugaacgagacccacuucagcgacgacaucgagcagcaggccgacaacaugaucaccgagaugcugcagaaggaguacauggagagacagggcaagaccccccugggccugguggaccuguucguguucagcaccagcuucuaccugaucagcaucuuccugcaccuggugaagauccccacccacagacacaucgugggcaagcccugccccaagccccacagacugaaccacaugggcaucugcagcugcggccuguacaagcagcccggcgugcccgugaaguggaagagaugaggacuaguaauaaggaaacuguaugaaugucugugggcaggaagugaagagauccuucuguaaagguuuuuggaauuaugucugcugaauaauaaacuuuuuugaaauaauaaaucugguagaaaaaugagaucuaaaaaaaaaaaaaaaaaaaaaaaaaaaaaaaaaaaaaaaaaaaaaaaaaaaaaaaaaaaaaaaaaaaaaaaaaaaaaaaaaaaaaaaaaaaaaaaaaaaa

SEQ ID NO: 36098 - RNA, 1788 nt, Artificial Sequence
  mRNA product Design b-4 (A100) comprising derived and/or modified sequence from LASV(LM776-SLE-2012;Clade IV)__AIT17824__GPCmut9 (opt4)
aggagagucccgcagucggcguccagcggcucugcuuguucgugugugugucguugcaggccuuauucaagcuuaccaugggccagaucgugaccuucuuccaggaggugccccacgugaucgaggaggugaugaacaucgugcugaucgcccugagcauccuggccgugcugaagggccuguacaacuucgccaccugcggccuggugggccuggugaccuuccugcugcugugcggcagaagcugcaccaccagcguguacaagggcguguacgagcugcagacccuggagcugaacauggagacccugaacaugaccaugccccugagcugcaccaagaacaacagccaccacuacaucauggugggcaacgagaccggccuggagcugacccugaccaacaccagcaucaucaaccacaaguucugcaaccugagcgacgcccacaagaagaaccuguacgaccacgcccugaugagcaucaucagcaccuuccaccugagcauccccaacuucaaccaguacgaggccaugagcugcgacuucaacggcggcaagaucagcgugcaguacaaccugagccacagcuacgccggcgacgccgccaaccacugcggcaccguggccaacggcgugcugcagaccuucaugagaauggccuggggcggcagcuacaucgcccuggacagcggcugcggcaagugggacugcaucaugaccagcuaccaguaccugaucauccagaacaccaccugggaggaccacugccaguucagcagacccagccccaucggcuaccugggccugcugagccagagaaccagagacaucuacaucagcagaagacugcugggcaccuucaccuggacccugagcgacagcgagggcaaggacacccccggcggcuacugccugaccagauggaugcugaucgaggccgagcugaagugcuucggcaacaccgccguggccaagugcaacgagaagcacgacgaggaguucugcgacaugcugagacuguucgacuucaacaagcaggccauccagagacugaaggccgaggcccagaugagcauccagcugaucaacaaggccgugaacgcccugaucaacgaccagcugaucaugaagaaccaccugagagacaucaugugcauccccuacugcaacuacagcaaguacugguaccugaaccacaccaccaccggcaagaccagccugcccaagugcuggcuggugagcaacggcagcuaccugaacgagacccacuucagcgacgacaucgagcagcaggccgacaacaugaucaccgagaugcugcagaaggaguacauggagagacagggcaagaccccccugggccugguggaccuguucguguucagcaccagcuucuaccugaucagcaucuuccugcaccuggugaagauccccacccacagacacaucgugggcaagagcugccccaagccccacagacugaaccacaugggcaucugcagcugcggccuguacaagcagcccggcgugcccgugagauggaagagaugaggacuaguaauaaggaaacuguaugaaugucugugggcaggaagugaagagauccuucuguaaagguuuuuggaauuaugucugcugaauaauaaacuuuuuugaaauaauaaaucugguagaaaaaugagaucuaaaaaaaaaaaaaaaaaaaaaaaaaaaaaaaaaaaaaaaaaaaaaaaaaaaaaaaaaaaaaaaaaaaaaaaaaaaaaaaaaaaaaaaaaaaaaaaaaaaa

SEQ ID NO: 36099 - RNA, 1788 nt, Artificial Sequence
  mRNA product Design b-4 (A100) comprising derived and/or modified sequence from LASV(Mad39;Clade IV)__ANH09722__GPCmut9 (opt4)
aggagagucccgcagucggcguccagcggcucugcuuguucgugugugugucguugcaggccuuauucaagcuuaccaugggccagaucgugaccuucuuccaggaggugccccacgugaucgaggaggugaugaacaucgugcugaucgcccugagcauccuggccgugcugaagggccuguacaacguggccaccugcggccugaucggccuggugaccuuccugcugcugugcggcagaagcugcaccaccacccuguacaagggcguguacgagcugcaggcccuggagcugaacauggagacccugaacaugaccaugccccugagcugcaccaagaacaacagccaccacuacaucagagugggcaacgagaccggccuggagcugacccugaccaacaccagccugaucaaccacaaguucugcaaccugagcgacgcccacaagaagaaccuguacgaccacgcccugaugagcaucaucagcaccuuccaccugagcauccccaacuucaaccaguacgaggccaugagcugcgacuucaacgacggcaagaucagcgugcaguacaaccugagccacaccuacgccggcgacaccgccaaccacugcggcaccguggccaacggcgugcugcagaccuucaugagaauggccuggggcggcagcuacaucgcccuggacagcggcugcggcggcugggacugcaucaugaccagcuaccaguaccugaucauccagaacaccaccugggaggaccacugccaguucagcagacccagccccaucggcuaccugggccugcugagccagagaaccagagacaucuacaucagcagaagacugcugggcaccuucaccuggacccugagcgacagcgagggcaaggacacccccggcggcuacugccugaccagauggaugcugaucgaggccgagcugaagugcuucggcaacaccgccguggccaagugcaacgagaagcacgacgaggaguucugcgacaugcugagacuguucgacuucaacaagcaggccauccagagacugaaggccgaggcccagaugagcauccagcugaucaacaaggccgugaacgcccugaucaacgaccagcugaucaugaagaaccaccugagagacaucaugugcauccccuacugcaacuacagcaaguacugguaccugaaccacaccgugaccggcaagaccagccugcccaagugcuggcuggugagcaacggcagcuaccugaacgagacccacuucagcgacgacaucgagcagcaggccgacaacaugaucaccgagaugcugcagaaggaguacauggagagacagggcaagaccccccugggccugguggaccuguucguguucagcaccagcuucuaccugaucagcaucuuccugcaccuggugaagauccccacccacagacacguggugggcaagcccugccccaagccccacagacugaaccacaugggcaucugcagcugcggcuucuacaagcagcccggcgugcccgugagauggaagagaugaggacuaguaauaaggaaacuguaugaaugucugugggcaggaagugaagagauccuucuguaaagguuuuuggaauuaugucugcugaauaauaaacuuuuuugaaauaauaaaucugguagaaaaaugagaucuaaaaaaaaaaaaaaaaaaaaaaaaaaaaaaaaaaaaaaaaaaaaaaaaaaaaaaaaaaaaaaaaaaaaaaaaaaaaaaaaaaaaaaaaaaaaaaaaaaaa

SEQ ID NO: 36100 - RNA, 1788 nt, Artificial Sequence
  mRNA product Design b-4 (A100) comprising derived and/or modified sequence from LASV(Z0947-SLE-2011;Clade IV)__AIT17840__GPCmut9 (opt4)
aggagagucccgcagucggcguccagcggcucugcuuguucgugugugugucguugcaggccuuauucaagcuuaccaugggccagaucgugaccuucuuccaggaggugccccacgugaucgaggaggugaugaacaucgugcugaucgcccugagcauccuggccgugcugaagggccuguacaacuucgccaccugcggccuggugggccuggugaccuuccugcugcugugcggcagaagcugcaccaucagccuguacaagggcguguacgagcugcagacccuggagcugaacauggagacccugaacaugaccaugccccugagcugcaccaagaacaacagccaccacuacaucauggugggcaacgagaccggccuggagcugacccugaccaacaccagcaucaucaaccacaaguucugcaaccugagcgacgcccacaagaagaaccuguacgaccacgcccugaugagcaucaucagcaccuuccaccugagcauccccaacuucaaccaguacgaggccaugagcugcgacuucaacggcggcaagaucagcgugcaguacaaccugagccacagcuacgccggcgacgccgccaaccacugcggcaccguggccaacggcgugcugcagaccuucaugagaauggccuggggcggcagcuacaucgcccuggacagcggcugcgacagaugggacugcaucaugaccagcuaccaguaccugaucauccagaacaccaccugggaggaccacugccaguucagcagacccagccccaucggcuaccugggccugcugagccagagaaccagagacaucuacaucagcagaagacugcugggcaccuucaccuggacccugagcgacagcgagggcaaggacacccccggcggcuacugccugaccagauggaugcugaucgaggccgagcugaagugcuucggcaacaccgccguggccaagugcaacgagaagcacgacgaggaguucugcgacaugcugagacuguucgacuucaacaagcaggccauccagagacugaaggccgaggcccagaugagcauccagcugaucaacaaggccgugaacgcccugaucaacgaccagcugaucaugaagaaccaccugagagacaucaugugcauccccuacugcaacuacagcaaguacugguaccugaaccacaccaccaccggcaagaccagccugcccaagugcuggcuggugagcaacggcagcuaccugaacgagacccacuucagcgacgacaucgagcagcaggccgacaacaugaucaccgagaugcugcagaaggaguacauggagagacagggcaagaccccccugggccugguggaccuguucguguucagcaccagcuucuaccugaucagcaucuuccugcaccuggugaagauccccacccacagacacaucgugggcaagcccugccccaagccccacagacugaaccacaugggcaucugcagcugcggccuguacaagcagcccggcgugcccgugaaguggaagagaugaggacuaguaauaaggaaacuguaugaaugucugugggcaggaagugaagagauccuucuguaaagguuuuuggaauuaugucugcugaauaauaaacuuuuuugaaauaauaaaucugguagaaaaaugagaucuaaaaaaaaaaaaaaaaaaaaaaaaaaaaaaaaaaaaaaaaaaaaaaaaaaaaaaaaaaaaaaaaaaaaaaaaaaaaaaaaaaaaaaaaaaaaaaaaaaaa

SEQ ID NO: 36101 - RNA, 1788 nt, Artificial Sequence
  mRNA product Design b-4 (A100) comprising derived and/or modified sequence from LASV(Josiah;Clade IV)__NP_694870__GPCmut9 (opt5)
aggagagucccgcagucggcguccagcggcucugcuuguucgugugugugucguugcaggccuuauucaagcuuaccaugggccagaucgugaccuucuuucaagaggucccccacguuauugaagaggugaugaacaucgugcugauugcccucagcguccuggcugugcuuaaggggcuguacaauuucgccacaugcggacucguuggccuggugacguuucuucugcucugugggagauccugcaccacaucucuguauaaaggagucuacgaacugcagacccucgagcugaacauggaaacacuuaauaugaccaugccucugagcuguacaaagaacaauucccaucacuauaucauggugggcaacgagaccgggcucgagcugacgcuuaccaauacaucuauuaucaaccauaaauucugcaaucugagcgacgcgcacaagaaaaaccucuacgaucaugcucugauguccaucauuucuaccuuucaccugagcaucccgaauuucaaccaguaugaagccauguccugugacuuuaauggaggcaagauuagcguucaguacaaccucucucacuccuaugccggcgaugcugccaaucauugcgggacaguggcuaacggaguccugcaaaccuucaugcggauggccuggggcgggagcuacaucgcgcuugacucuggauguggcaacugggauugcauuaugacguccuaccaguaucugaucauucagaauacaaccugggaggaccacugucaguuuagccgccccucuccuaucggguaccucggacugcuuucccaaagaacacgggauaucuauauuagccgcagacugcucggcaccuucaccuggacacuguccgacucugaaggcaaggauacgcccgggggauacugccugacccgguggaugcucaucgaggccgagcugaaauguuuuggcaacacagcuguggccaagugcaaugaaaaacaugacgaggaguucugcgauaugcuucgccuguuugacuucaacaagcaggcuauucagagacucaaagccgaagcgcagaugagcauccaacugauuaauaaggccgugaacgcucuuaucaaugaucagcugaucaugaagaaccaccuccgggacauuauguguaucccuuauugcaauuacuccaaauauugguaccugaaccacaccacaaccgggcgcacgagccugcccaaguguuggcucgucucuaauggauccuaccugaacgaaacacauuucagcgacgauauugagcagcaagccgacaauaugaucaccgagaugcuucagaaagaauauauggagagacagggcaagaccccucuggggcucguugaucuguuuguguucucuaccagcuuuuaccugauuuccaucuuccuucaccucgugaaaaucccgacacaucggcacauugucggaaagucuugccccaaaccucaucgccugaaccacaugggcaucuguagcugcggccuguauaagcagcccggggugccuguuaaguggaaaagaugaggacuaguaauaaggaaacuguaugaaugucugugggcaggaagugaagagauccuucuguaaagguuuuuggaauuaugucugcugaauaauaaacuuuuuugaaauaauaaaucugguagaaaaaugagaucuaaaaaaaaaaaaaaaaaaaaaaaaaaaaaaaaaaaaaaaaaaaaaaaaaaaaaaaaaaaaaaaaaaaaaaaaaaaaaaaaaaaaaaaaaaaaaaaaaaaa

SEQ ID NO: 36102 - RNA, 1785 nt, Artificial Sequence
  mRNA product Design b-4 (A100) comprising derived and/or modified sequence from LASV(LP;Clade I)__AAF86701__GPCmut9 (opt5)
aggagagucccgcagucggcguccagcggcucugcuuguucgugugugugucguugcaggccuuauucaagcuuaccaugggccagaucauuaccuucuuucaagaggugccccacgucaucgaagagguuaugaacauugugcugaucgcccucagccugcuugcuauucugaaggggcucuacaauaucgccacaugcggaaucauuggccugguggcguuccuuuuucugugugggaaauccugcucucucacgcugaagggaggcuaugaacugcagacccucgagcugaacauggaaacacuuaauaugaccaugccucugagcuguaccaaaaacuccucucaucacuacaucagagucgggaaugagacaggacucgagcugacacuuaccaacacgagcauuaucaaucauaaguucugcaaccuguccgacgcucacaaaaagaaucucuaugaucaugcccugaugucuauuaucagcaccuuucaccuguccauuccgaacuucaaucaguacgaagccaugagcugugacuuuaacggcggcaagaucucugugcaguauaaucucucccacagcuacgcuggggaugccgcugagcauugcggaacaguugccaacggcgugcugcaaaccuucaugcggauggcguggggagggcgcuauaucgcccuugacucuggcugugggaauugggauugcauuaugacauccuaccaguaccugaucauucagaacaccacgugggaagaccacugucaguuuagcagacccucuccuaucggauaucucggccugcuuucccaacggacacgcgauauuuacaucagcagacggcugcucggcaccuucacauggacccuguccgacucugaggggaacgagacccccggaggcuauugccugacacgcuggaugcucaucgaagcugagcugaaauguuuugggaauacggccgucgcuaagugcaacgaaaaacaugaugaggaguucugcgacaugcuuagacuguuugauuucaauaagcaggccauucggcgccucaaagcggaagcccagaugagcauccagcugauuaacaaggcugugaaugcccuuaucaacgaccaacugauuaugaagaaucaccucagagauaucauguguaucccuuacugcaacuauuccaaauacugguaucugaaucacaccagcucuggacggacaucccugcccaaguguuggcucauuagcaacggcucuuaccugaaugagacccaguucagcgacgacaucgaacagcaagcugauaacaugauuacagagaugcuucagaaagaauacaucgagcgccaggggaagaccccucugggacucguugacauuuuuaucuucuccacgucuuuuuaucugauuagcaucuuccugcaucuuaucaaaauuccgacacacagacauaucgugggcaagcccugcccuaaaccccaccggcucaaucauaugggcgucuguuccugcgggcuguacaagcacccuggagugcccaccaaguggaaacgcugaggacuaguaauaaggaaacuguaugaaugucugugggcaggaagugaagagauccuucuguaaagguuuuuggaauuaugucugcugaauaauaaacuuuuuugaaauaauaaaucugguagaaaaaugagaucuaaaaaaaaaaaaaaaaaaaaaaaaaaaaaaaaaaaaaaaaaaaaaaaaaaaaaaaaaaaaaaaaaaaaaaaaaaaaaaaaaaaaaaaaaaaaaaaaaaaa

SEQ ID NO: 36103 - RNA, 1785 nt, Artificial Sequence
  mRNA product Design b-4 (A100) comprising derived and/or modified sequence from LASV(803213;Clade II)__AAF86703__GPCmut9 (opt5)
aggagagucccgcagucggcguccagcggcucugcuuguucgugugugugucguugcaggccuuauucaagcuuaccaugggccagaucauuaccuucuuucaagaggugccccacgucaucgaagagguuaugaacauugugcugaucgcccucagccugcuugcuauucugaaggggaucuacaauguggccacaugcggacucuucggccugaucuccuuucuucugcucugugggagaucuugcagcgucacguauaaaggaguguacgaacugcagacccuggagcucaacauggcgaaucugaacaugacaaugccucuuuccuguaccaagaauaacucucaucacuauauuaugguuggcaaugaaacagggcuggagcucacccugacaaacaccagcaucauuaaucauaaauucugcaaccuuuccgacgcucacaagaaaaaucuguacgaucaugcccucaugucuaucauuagcacguuucaccuguccaucccgaacuucaaucaguaugaggccaugagcugugacuuuaacggaggcaagauuucugugcaguacaaucugucccacagcuucgcugucgaugccgcuaaccauugcggcaccaucgccaacggggugcuccaaacauuuaugcggauggcguggggaggcucuuauaucgcccuggacuccggguguggaaauugggauugcauuaugaccagcuaccaguaccuuaucauucagaacacaaccugggaagaccacugucaguucucucgccccuccccuaucggcuaucuggggcuccugagccaaagaacgcgggauauuuacaucucccgcagacuucugggaacauuuaccuggacacucucugacagcgagggcaaugaagcucccggcggguauugccugacccgguggaugcugaucgaggccgagcucaaguguuucggaaacaccgcuguugccaaaugcaaugaaaagcaugaugaggaauuuugcgacaugcugcgccuuuucgauuucaacaaacaggcgauuaagagacugaaaacagaggcccagauguccauccagcucauuaauaaggcugugaacgcccugaucaaugaccaacuuauuaugaagaaccaucugcgggauaucauguguaucccuuacugcaauuauagccgcuacugguaucucaaccacacggucaccggcaaaacaucucugcccagauguuggcugguguccaaugggagcuaccucaacgaaacccacuuuucugacgacauugagcagcaggcugauaauaugaucacagagaugcugcaaaaggaauacauggaccggcagggaaaaaccccucuuggccugguggaucucuucgucuuuagcacguccuucuaucugauuucuaucuuucugcaccuuguuaagauuccgacacaucgccacaucguggggaaacccugcccuaagccccauagacucaaccacaugggaauuuguagcugcggccuguacaaacacccuggcgugcccgucaaguggaagcggugaggacuaguaauaaggaaacuguaugaaugucugugggcaggaagugaagagauccuucuguaaagguuuuuggaauuaugucugcugaauaauaaacuuuuuugaaauaauaaaucugguagaaaaaugagaucuaaaaaaaaaaaaaaaaaaaaaaaaaaaaaaaaaaaaaaaaaaaaaaaaaaaaaaaaaaaaaaaaaaaaaaaaaaaaaaaaaaaaaaaaaaaaaaaaaaaa

SEQ ID NO: 36104 - RNA, 1785 nt, Artificial Sequence
  mRNA product Design b-4 (A100) comprising derived and/or modified sequence from LASV(GA391;Clade III)__CAA36645__GPCmut9 (opt5)
aggagagucccgcagucggcguccagcggcucugcuuguucgugugugugucguugcaggccuuauucaagcuuaccaugggccagaucgugaccuucuuucaagaggucccccacguuauugaagaggugaugaacaucgugcugauugcccucagcauccuggcuauucuuaaggggcuguacaaugucgccacaugcggacucaucggccuggugacguuccuucugcucuccgggagaucuuguagccugaucuauaaaggaaccuacgaacugcagacacucgagcugaacauggaaacccuuaauaugacaaugccucuguccugcaccaagaacaauucucaucacuauauucggguuggcaacgagacagggcucgagcugacccuuacgaauaccagcauccugaaccauaaauuuuguaaucucuccgacgcgcacaagcgcaaccuguacgaucauucucugaugagcauuaucuccacauuccaccucagcauuccgaauuuuaaccaguaugaagcuaugucuugcgacuucaauggaggcaaaaucaccgugcaguacaaccugucccacagcuuugccgucgaugccgcuggccauugugggacacuugccaauggagugcugcaaaccuucaugagaauggcuuggggcgggucuuauauugcccucgacuccggaugcggcaacugggauuguaucaugacgagcuaccaguaccugaucauucagaacacaaccugggacgaucacugccaguuuucucggcccuccccuaucggguaucuuggacugcucagccaacgcacaagagacauuuacaucucccggcgccugcugggcaccuucaccuggacacucucugauagcgagggcaaugaaacgcccgggggauauugucugaccagauggaugcuuauugaggcggagcugaagugcuuuggcaacacagccguugcuaaguguaaugaaaaacaugacgaggaguucugcgauaugcuccggcuguuugacuucaacaagcaggccauccgcagacuuaaaaccgaagcucagauguccauccagcugauuaauaaggccgugaacgcgcucaucaaugaucaacugauuaugaaaaaccaucugcgggacaucaugugcauuccuuacuguaauuauagccgcuacugguaucucaaccacacaucuaccgggaagacgucccugcccagaugcuggcuuaucagcaauggaucuuaccugaacgaaacaaaguucagcgacgauaucgagcagcaggccgacaauaugauuaccgagaugcuccaaaaagaauacaucgaucggcagggcaagaccccucuggggcuggucgaccuuuuuguguucuccacaucuuuuuaucucauuagcaucuuccugcaccuggugaaaauuccgacccaccgccauaucgucggaaagcccuguccuaaaccccacagacucaaccauaugggcauuugcuccuguggccuguacaagcagccugggguucccgugcgguggaaaagaugaggacuaguaauaaggaaacuguaugaaugucugugggcaggaagugaagagauccuucuguaaagguuuuuggaauuaugucugcugaauaauaaacuuuuuugaaauaauaaaucugguagaaaaaugagaucuaaaaaaaaaaaaaaaaaaaaaaaaaaaaaaaaaaaaaaaaaaaaaaaaaaaaaaaaaaaaaaaaaaaaaaaaaaaaaaaaaaaaaaaaaaaaaaaaaaaa

SEQ ID NO: 36105 - RNA, 1788 nt, Artificial Sequence
  mRNA product Design b-4 (A100) comprising derived and/or modified sequence from LASV(AV;Clade V)__CCA30314__GPCmut9 (opt5)
aggagagucccgcagucggcguccagcggcucugcuuguucgugugugugucguugcaggccuuauucaagcuuaccaugggccagaucgugaccuucuuucaagaggucccccacguuauugaagaggugaugaacaucgugcugauugcccucagcauccuggcuguccuuaaggggcuguacaauauugccacaugcggacucaucggccugaucacguuccuucugcucugugggagauccugcucuagcaaccuguauaaaggaguguacgaacugcagucccucgaccugaauauggagacccuuaacaugacaaugccucugucuuguaccaagaauaacagccaucacuauauucggguuggcaaugauacagggcucgaacugacccuuacaaacaccuccauccugaaucauaaauuuugcaaccucucugacgcgcacaagaaagaucuguacgaccaugcucugaugagcauuaucuccacguuccaccucagcauuccgaauuuuaaccaguaugaggccaugucuugugauuucaauggaggcaagaucuccgugcaguacaaccugagccacucuuaugccauugacgcugccaaucauugcggcaccgucgcuaacgggauccuucaaacauuuaugcgcauggccuggggaggcuccuacaucgcgcuggauagcggguguggaaacugggacugcauuaugaccucuuaccaguaucucaucauucagaauacaaccugggagaaccacugucaguucuccagacccagcccuaucggcuaccuggggcuucugucccaacggacgcgcgauauuuauaucucuagacggcuccugggaacauuuaccuggacacugagcgacuccgaaggcaaugccacccccggcggguacugccucacccgcuggaugcugaucgaggcugaacuuaaguguuucggaaacacagccguggcuaaaugcaaugagaagcaugaugaggaauuuugcgacaugcugagacucuucgauuuuaacaaacaggccauuagccggcugaagucugaggcgcagauguccauccagcuuauuaauaaagccguuaacgcucugaucaaugaccaacucauuaugaagaaccaucugcgcgacaucauguguaucccuuauugcaauuacagcaaguauugguaccugaaccacacgauuaccggcaaaacaucucuccccaaguguuggcuggugagcaauggguccuaccuuaacgaaacccacuucucugaugacaucgagcagcaggccgauaauaugauuacagaaaugcugcaaaaagaguauauggagagacagggaaagaccccucucggccuggucgaccuguucguguuuagcacguccuucuaccuuaucagcauuuuucuccggcuggugaaaaucccgacacaccgccauauugucgggaagcccugcccuaaaccccacagacugaaccauaugggaaucuguucuugcggccucuauaagcagccuggcguucccgugcgguggaagcgcugaggacuaguaauaaggaaacuguaugaaugucugugggcaggaagugaagagauccuucuguaaagguuuuuggaauuaugucugcugaauaauaaacuuuuuugaaauaauaaaucugguagaaaaaugagaucuaaaaaaaaaaaaaaaaaaaaaaaaaaaaaaaaaaaaaaaaaaaaaaaaaaaaaaaaaaaaaaaaaaaaaaaaaaaaaaaaaaaaaaaaaaaaaaaaaaaa

SEQ ID NO: 36106 - RNA, 1785 nt, Artificial Sequence
  mRNA product Design b-4 (A100) comprising derived and/or modified sequence from LASV(Togo/2016/7082;Clade VI)__AMR44577__GPCmut9 (opt5)
aggagagucccgcagucggcguccagcggcucugcuuguucgugugugugucguugcaggccuuauucaagcuuaccaugggccagaucauuaccuucuuucaagaggugccccacgucaucgaagagguuaugaacauugugcugaucgcccucagccugcuugcuauucugaaggggguguacaaugucgccacaugcggaaucaucggccucgugacguuccuguuucuuugugggagauccugcucucugauuuauaaaggaagcuacgaacuccagacccuggagcugaacauggaaacacucaauaugaccaugccucuguccuguacaaagaacucuagccaucacuauauccggguuggcaaugagaccgggcuugagcugacacucaccaacacguccauuaucaaucauaaauucugcaaccugucugacgcgcacaagcgcaaucuuuacgaucaugcucugaugagcauucucuccaccuuucaccugagcaucccgaacuucaaucaguaugaagccaugucuugugacuuuaacggaggcaaaauuuccgugcaguacaaucugagccacgccuaugcugucgaugccgcugagcauugcggcacaguggccaacgggguucuccaaaccuucaugagaauggcguggggaggcucuuacaucgcccuggacuccggguguggaaauugggauugcaucaugacaagcuaccaguaucuuauuauccagaacaccacgugggaagaccacugucaguuuucucggcccuccccuauuggcuaccuggggcuccugagccaacgcacaagagauaucuauauuucccggcgccuucugggaaccuucacauggacccucucugacagcgagggcaacgagacccccggcggguacugccugacaagauggaugcugaucgaagcugagcucaaguguuuuggaaauacggccguggcuaagugcaacgaaaaacaugaugaggaguucugcgacaugcugcggcuuuuugauuucaauaagcaggccauccagcgccugaaauccgaagcgcagaugagcauucaacucaucaacaaggccgucaaugcucugauuaacgaccagcuuaucaugaaaaaucaccugagagauaugauguguauuccuuauugcaacuacucuaaguauugguaccucaaucacaccuccagcggccggacaucucugcccaaguguuggcuggugagcaacggguccuaccucaaugagacccauuucucugacgacaucgaacagcaagccgauaacaugaucacagagaugcugcagaaagaauauauugaccgccagggaaagaccccucuuggccugguggaucucuuugucuucagcacguccuuuuaccugaucagcauuuuccugcaccuuaucaaaauuccgacacauagacacaucguugggaagcccugcccuaaaccccaucggcucaaucacaugggaauuuguucuugcggccuguauaagcagccuggcgugcccacccgcuggaaaagaugaggacuaguaauaaggaaacuguaugaaugucugugggcaggaagugaagagauccuucuguaaagguuuuuggaauuaugucugcugaauaauaaacuuuuuugaaauaauaaaucugguagaaaaaugagaucuaaaaaaaaaaaaaaaaaaaaaaaaaaaaaaaaaaaaaaaaaaaaaaaaaaaaaaaaaaaaaaaaaaaaaaaaaaaaaaaaaaaaaaaaaaaaaaaaaaaa

SEQ ID NO: 36107 - RNA, 1785 nt, Artificial Sequence
  mRNA product Design b-4 (A100) comprising derived and/or modified sequence from LASV(KAK-428;Clade n.d. (VII))__ANH09740__GPCmut9 (opt5)
aggagagucccgcagucggcguccagcggcucugcuuguucgugugugugucguugcaggccuuauucaagcuuaccaugggccagaucgugaccuucuuucaagaggucccccacguuauugaagaggugaugaacaucgugcugauugcccucagccugcuugcuauccugaaggggcucuacaauuucgccacaugcggagucauuggccugaucacguuucuucugcucugugggagauccugcucugcgaccuauaaaggacaguacgaacugcagacacuggagcucaacauggaaagccugaauaugaccaugccucuuuccuguacaaagaacaauucucaucacuauauccgggcuggcaacaauaccgggcuggagcucacacugaccaacacgagcauuaucucccauaaauucugcaaucuuucugacgcccacaagaaaaaccuguacgaucauacccucaugagcauuaucacaaccuuucaccuguccauuccgaauuucaaccaguaugaggccaugagcugugacuuuaauggaggcaagaucucuauucaauacaaccugucccacagcuaugcuggcgaugccgcucagcauugcgggacaguggccaauggaguucuccagaccuucaugcgcauggcguggggcgggucuuaccuggcccuugacuccggauguagaggcugggauugcaucaucagcucuuaccaguaucugauuauccaaaacacgacaugggacgaucacugucaguuuucccggcccagcccuauuggguaccucggauucgugucccagaagacccgcgacaucuauauuucuagacggcugcuuggcacauuuaccuggacccugagcgauuccgaaggccaugacaugcccgggggauacugccucacacgcuggaugcugaucgaggcugaucugaaauguuucggcaacacggccgucgcuaagugcaaugaaaaacacgacgaggaguuuugcgauauguggagacucuucgacuucaacaagcaggccauccaacggcugaaagcggaagcccagaugaauauucagcuuaucaacaaggcugugaaugcccugauuaacgaccaacucaugaugaagaaucaucugcgcgauaucauguguauuccuuauugcaacuacagcaaauuuugguaucuuaauaacaccacaaccgggagaacaucucugccccgguguuggcucaucuccaauggaagcuaccugaacgagacccacuucucugacgauaucgaacagcaggcugacaauaugauuacggagaugcugcagaaggaauacauggaucgccaaggcaaaacaccucucgggcugguugaccuuuuuguguucagcaccuccuuuuaucugaucaccauuuuccuccaccuggucaagaucccgacacauagacacauugugggaaaacccugcccuaagccccaucggcugaaccacaugggcaucuguucuugcggccuuuacaaacagccuggggugcccguccgcuggaagagaugaggacuaguaauaaggaaacuguaugaaugucugugggcaggaagugaagagauccuucuguaaagguuuuuggaauuaugucugcugaauaauaaacuuuuuugaaauaauaaaucugguagaaaaaugagaucuaaaaaaaaaaaaaaaaaaaaaaaaaaaaaaaaaaaaaaaaaaaaaaaaaaaaaaaaaaaaaaaaaaaaaaaaaaaaaaaaaaaaaaaaaaaaaaaaaaaa

SEQ ID NO: 36108 - RNA, 1785 nt, Artificial Sequence; identical to SEQ ID NO: 36102
  mRNA product Design b-4 (A100) comprising derived and/or modified sequence from LASV(Pinneo-NIG-1969;Clade I)__AIT17836__GPCmut9 (opt5)

SEQ ID NO: 36109 - RNA, 1785 nt, Artificial Sequence
  mRNA product Design b-4 (A100) comprising derived and/or modified sequence from LASV(ISTH0009-NIG-2011;Clade II)__AIT17404__GPCmut9 (opt5)
aggagagucccgcagucggcguccagcggcucugcuuguucgugugugugucguugcaggccuuauucaagcuuaccaugggccagaucauuaccuucuuucaagaggugccccacgucaucgaagagguuaugaacauugugcugaucgcccucagccugcuugcuauucugaaggggaucuacaauguggccacaugcggacucuucggccuggucuccuuucuucugcucugugggagaucuugcagcacgaccuauaaaggaguguacgaacugcagacacuggagcucgacauggcgucccugaacaugaccaugccucuuucuuguacaaagaauaacagccaucacuauaucaugguuggcaaugaaaccgggcuggagcucacacugaccaacacguccauuaucaaucauaaauucugcaaccuuucugaugcucacaagaaaaaucuguacgaccaugcccucaugagcauuaucuccaccuuucaccugagcauuccgaacuucaaucaguaugaggccaugucuugugauuuuaacggaggcaagaucuccgugcaguacaaucugagccacgcuuaugccgucgacgcugccaaccauugcggcacaauugcgaauggggugcuccaaaccuucaugcggauggccuggggaggcucuuacaucgcucuggauuccggguguggaagcugggacugcaucaugacaucuuaccaguaucuuauuauccagaacaccacgugggaagaucacugucaguuuucccgccccagcccuauuggcuaccuggggcuccugucccaaagaacacgggacaucuauauuucucgcagacuucugggaaccuucacauggacccucagcgauuccgagggcaacgaaacccccggcggguacugccugacacgguggaugcugaucgaggccgagcucaaguguuuuggaaauacggcuguugccaaaugcaacgaaaagcaugacgaggaguucugcgauaugcugcgccuuuuugacuucaauaaacaggcgaucagacggcugaagaccgaagcccagaugagcauucagcucaucaacaaagcugugaaugcccugauuaacgaucaacuuaucaugaagaaucaucugcgcgacauuauguguaucccuuauugcaacuacucuaaguauugguaccucaaucacacagucaccggcaaaacaucccugcccagauguuggcuggugagcaacgggucuuaccucaaugaaacccacuucagcgacgauaucgagcagcaggcugacaacaugauuacggagcugcuucaaaaggaauauauggaucggcagggaaaaacaccucugggccucguggaccuguuugucuucuccaccucuuuuuaccugaucagcauuuuccuucaccucaucaagauuccgacccaucgccacaucacagggaaacccugcccuaagccccauagacugaaucacaugggaauuuguuccugcggccuguauaaacacccuggcguucccgugaaguggaagcggugaggacuaguaauaaggaaacuguaugaaugucugugggcaggaagugaagagauccuucuguaaagguuuuuggaauuaugucugcugaauaauaaacuuuuuugaaauaauaaaucugguagaaaaaugagaucuaaaaaaaaaaaaaaaaaaaaaaaaaaaaaaaaaaaaaaaaaaaaaaaaaaaaaaaaaaaaaaaaaaaaaaaaaaaaaaaaaaaaaaaaaaaaaaaaaaaa

SEQ ID NO: 36110 - RNA, 1785 nt, Artificial Sequence
  mRNA product Design b-4 (A100) comprising derived and/or modified sequence from LASV(ISTH2010-NIG-2012;Clade II)__AIT17482__GPCmut9 (opt5)
aggagagucccgcagucggcguccagcggcucugcuuguucgugugugugucguugcaggccuuauucaagcuuaccaugggccagaucauuaccuucuuucaagaggugccccacgucaucgaagagguuaugaacauugugcugaucgcccucagccugcuugcuauucugaaggggaucuacaauguggccacaugcggacucuucggccuggucuccuuucuucugcucugugggagaucuugcagcacgaccuauaaaggaguguacgaacugcagacacuggagcucgacauggcgucccugaacaugaccaugccucuuucuuguacaaagaauaacagccaucacuauaucaugguuggcaaugaaaccgggcuggagcucacacugaccaacacguccauuaucaaucauaaauucugcaaccuuucugaugcucacaagaaaaaucuguacgaccaugcccucaugagcauuaucuccaccuuucaccugagcauuccgaacuucaaucaguaugaggccaugucuugugauuuuaacggaggcaagaucuccgugcaguacaaucugagccacgcuuaugccgucgacgcugccaaccauugcggcacaauugcgaauggggugcuccaaaccuucaugcggauggccuggggaggcucuuacaucgcucuggauuccggguguggaagcugggacugcaucaugacaucuuaccaguaucuuauuauccagaacauuaccugggaagaucacugucaguuuucccgccccagcccuaucggcuaccuggggcuccugucccaaagaacgcgggacauuuauaucucucgcagacuucugggaacauucaccuggacacucagcgauuccgagggcaacgaaacccccggcggguacugccugacccgguggaugcugaucgaggccgagcucaaguguuuuggaaauacagcuguugccaaaugcaacgaaaagcaugacgaggaguucugcgauaugcugcgccuuuuugacuucaauaaacaggcgauuagacggcugaagacggaagcccagaugagcauccagcucauuaacaaagcugugaaugcccugaucaacgaucaacuuauuaugaagaaucaucugcgcgacaucauguguaucccuuauugcaacuacucuaaguauugguaccucaaucacaccgucacaggcaaaaccucccugcccagauguuggcuggugagcaacgggucuuaccucaaugaaacacacuucagcgacgauauugagcagcaggcugacaacaugaucaccgagcugcuucaaaaggaauauauugaucggcagggaaaaacgccucugggccucguggaccuguuugucuucuccacaucuuuuuaccugaucagcauuuuccuucaccucguuaagaucccgacccaucgccacgugguggggaaacccugcccuaagccccauagacugaaucacaugggaauuuguuccugcggccuguauaaacacccuggcguccccgugaaguggaagcggugaggacuaguaauaaggaaacuguaugaaugucugugggcaggaagugaagagauccuucuguaaagguuuuuggaauuaugucugcugaauaauaaacuuuuuugaaauaauaaaucugguagaaaaaugagaucuaaaaaaaaaaaaaaaaaaaaaaaaaaaaaaaaaaaaaaaaaaaaaaaaaaaaaaaaaaaaaaaaaaaaaaaaaaaaaaaaaaaaaaaaaaaaaaaaaaaa

SEQ ID NO: 36111 - RNA, 1785 nt, Artificial Sequence
  mRNA product Design b-4 (A100) comprising derived and/or modified sequence from LASV(Lassa virus/H.sapiens-wt/NGA/2015/ISTH_0543;Clade II)__AVO03639__GPCmut9 (opt5)
aggagagucccgcagucggcguccagcggcucugcuuguucgugugugugucguugcaggccuuauucaagcuuaccaugggccagaucauuaccuucuuucaagaggugccccacgucaucgaagagguuaugaacauugugcugaucgcccucagccugcuugcuauucugaaggggaucuacaauguggccacaugcggacucuucggccuggucuccuuucuucugcucugugggagaucuugcagcacgaccuauaaaggaguguacgaacugcagacacuggagcucgacauggcgaaccugaauaugaccaugccucuuuccuguacaaagaacaauucucaucacuauaucaugguuggcaacgaaaccgggcuggagcucacacugaccaauacgagcauuaucaaccauaaauucugcaaucuuuccgaugcucacaagaaaaaccuguacgaccaugcccucaugucuauuaucagcaccuuucaccuguccauuccgaauuucaaccaguaugaggccaugagcugugauuuuaauggaggcaagaucucugugcaguacaaccugucccacacauaugcugucgacgccgcuaaucauugcggcaccauugccaacggggugcuccaaacauucaugcggauggcguggggaggcagcuacaucgcccuggauucuggguguggauccugggacugcaucaugaccagcuaccaguaucuuguuauucagaacacgacaugggaagaucacugucaguuuucucgccccuccccuaucggcuaccuggggcuccugagccaaagaacccgggacauuuauaucucccgcagacuucugggaacauucaccuggacccucucugauagcgagggcaaugaaacacccggcggguacugccugacgcgguggaugcugauugaggcugagcucaaguguuuuggaaacaccgccguggcuaaaugcaaugaaaagcaugacgaggaguucugcgauaugcugcgccuuuuugacuucaacaaacaggccaucagacggcugaagacagaagcgcagauguccauccagcucauuaauaaagccgucaacgcucugaucaaugaucaacuuauuaugaagaaccaucugcgcgacaucauguguauuccuuauugcaauuacagcaaguauugguaccucaaccacaccgugacaggcaaaaccucucugcccagauguuggcugguguccaaugggagcuaccucaacgaaacgcacuucucugacgauaucgagcagcaggccgacaauaugaucacagagcugcuucaaaaggaauauauugaucggcagggaaaaaccccucugggccucgucgaccuguuuguuuucagcaccuccuuuuaccugaucucuauuuuccuucaccucgugaagaucccgacacaucgccacauuaccgggaaacccugcccuaagccccauagacugaaccacaugggaaucuguagcugcggccuguauaaacacccuggcgugcccgucaaguggaagcggugaggacuaguaauaaggaaacuguaugaaugucugugggcaggaagugaagagauccuucuguaaagguuuuuggaauuaugucugcugaauaauaaacuuuuuugaaauaauaaaucugguagaaaaaugagaucuaaaaaaaaaaaaaaaaaaaaaaaaaaaaaaaaaaaaaaaaaaaaaaaaaaaaaaaaaaaaaaaaaaaaaaaaaaaaaaaaaaaaaaaaaaaaaaaaaaaa

SEQ ID NO: 36112 - RNA, 1785 nt, Artificial Sequence
  mRNA product Design b-4 (A100) comprising derived and/or modified sequence from LASV(Lassa virus/H.sapiens-wt/NGA/2016/ISTH_0009;Clade II)__AVO03571__GPCmut9 (opt5)
aggagagucccgcagucggcguccagcggcucugcuuguucgugugugugucguugcaggccuuauucaagcuuaccaugggccagaucauuaccuucuuucaagaggugccccacgucaucgaagagguuaugaacauugugcugaucgcccucagccugcuugcuauucugaaggggaucuacaauguggccacaugcggacuccugggccuugucuccuuccugcuccugugugggagaucuugcagcacgaccuauaaaggaguguacgaacugcagacacucgagcuggacauggcgucccuuaacaugaccaugccucugucuuguacaaagaauaacagccaucacuauaucaugguuggcaaugaaaccgggcucgagcugacacuuaccaacacguccauuaucaaucauaaauuuugcaaccugucugaugcucacaagaaaaaucucuacgaccaugcccugaugagcauuaucuccaccuuccaccugagcauuccgaacuuuaaucaguaugaggccaugucuugugauuucaacggaggccggaucuccgugcaguacaaucucagccacucuuaugcugucgacgccgcuaaccauugcggcacaauugccaauggggugcugcaaaccuuuaugcgcauggcguggggaggcuccuacaucgcccuugauagcggguguggaucuugggacugcaucaugacauccuaccaguaucugauuauccagaacaccacgugggaagaucacugucaguucagcagacccuccccuauuggcuaccucgggcugcuuucucaacggacacgcgacaucuauauuagcagacggcugcucggaaccuuuacauggacccuguccgauagcgagggcaacgaaacccccggcggguacugccugacacgcuggaugcucaucgaggcugagcugaaguguuucggaaauacggccguugcuaagugcaacgaaaaacaugacgaggaauuuugcgauaugcuuagacuguucgacuuuaauaagcaggccauccggcgccucaaaaccgaggcgcagaugucuauucagcugaucaacaaggccgugaaugcucuuauuaacgaucaacugaucaugaaaaaucaccucagagacauuauguguaucccuuauugcaacuacuccaaguauugguaccugaaucacacagucaccggcaagacaagccugccccgguguuggcucgugucuaacgggagcuaccugaaugaaacccauuucuccgacgauaucgagcagcaggccgacaacaugauuacggagcuucugcaaaaagaauauaucgaucgccagggaaagacaccucucggccugguggaccuguucgucuuuucuaccagcuucuaccuuauuuccaucuuucuccaccugguuaaaauuccgacccauagacacaucacagggaagcccugcccuaaaccccaucggcugaaucacaugggaauuuguagcugcggccucuauaaccacccuggcgugcccgugaaguggaaacgcugaggacuaguaauaaggaaacuguaugaaugucugugggcaggaagugaagagauccuucuguaaagguuuuuggaauuaugucugcugaauaauaaacuuuuuugaaauaauaaaucugguagaaaaaugagaucuaaaaaaaaaaaaaaaaaaaaaaaaaaaaaaaaaaaaaaaaaaaaaaaaaaaaaaaaaaaaaaaaaaaaaaaaaaaaaaaaaaaaaaaaaaaaaaaaaaaa

SEQ ID NO: 36113 - RNA, 1785 nt, Artificial Sequence
  mRNA product Design b-4 (A100) comprising derived and/or modified sequence from LASV(Lassa virus/H.sapiens-wt/NGA/2016/ISTH_0017;Clade II)__AVO03567__GPCmut9 (opt5)
aggagagucccgcagucggcguccagcggcucugcuuguucgugugugugucguugcaggccuuauucaagcuuaccaugggccagaucauuaccuucuuucaagaggugccccacgucaucgaagagguuaugaacauugugcugaucgcccucagccugcuugcuauucugaaggggaucuacaauguggccacaugcggacucuucggccuggucuccuuucuucugcucugugggagaucuugcagcacgaccuauaaaggaguguacgaacugcagacacuggagcucgacauggcgucccugaacaugaccaugccucuuucuuguacaaagaauaacagccaucacuauaucaugguuggcaaugaaaccgggcuggagcucacacugaccaacacguccauuaucaaucauaaauucugcaaccuuucugaugcucacaagaaaaaucuguacgaccaugcccucaugagcauuaucuccaccuuucaccugagcauuccgaacuucaaucaguaugaggccaugucuugugauuuuaacggaggcaagaucuccgugcaguacaaucugagccacacauaugcuauugacgccgcuaaccauugcggcaccaucgccaaugggguccuccaaacauucaugcggauggcguggggaggcucuuacaucgcccuggauuccggguguggaagcugggacugcauuaugaccucuuaccaguaucuuaucauucagaacacgacaugggaagaucacugucaguuuucccgccccagcccuaucggcuaccuggggcuccugucccaaagaacccgggacauuuauaucucucgcagacuucugggaacauucaccuggacccucagcgauuccgagggcaacgaaacacccggcggguacugccugacgcgguggaugcugaucgaggcugagcucaaguguuuuggaaauaccgccguggcuaaaugcaacgaaaagcaugacgaggaguucugcgauaugcugcgccuuuuugacuucaauaaacaggccauuagacggcugaagacagaagcgcagaugagcauccagcucauuaacaaagccguuaaugcucugaucaacgaucaacuuauuaugaagaaucaucugcgcgacaucauguguaucccuuauugcaacuacucuaaguauugguaccucaaucacaccgugacaggcaaaaccucccugcccagauguuggcuggucagcaacgggucuuaccucaaugaaacgcacuucagcgacgauauugagcagcaggccgacaacaugaucacagagcugcuucaaaaggaauauauggaucggcagggaaaaaccccucugggccucguggaccuguuuguguucuccaccucuuuuuaccugauuagcaucuuccuucaccucguccgcauuccgacacauagacacguuaucgggaagcccugcccuaaaccccaucggcugaaucacaugggaauuuguuccugcggccuguauaagcacccuggcgugcccgugaaauggaagcgcugaggacuaguaauaaggaaacuguaugaaugucugugggcaggaagugaagagauccuucuguaaagguuuuuggaauuaugucugcugaauaauaaacuuuuuugaaauaauaaaucugguagaaaaaugagaucuaaaaaaaaaaaaaaaaaaaaaaaaaaaaaaaaaaaaaaaaaaaaaaaaaaaaaaaaaaaaaaaaaaaaaaaaaaaaaaaaaaaaaaaaaaaaaaaaaaaa

SEQ ID NO: 36114 - RNA, 1785 nt, Artificial Sequence
  mRNA product Design b-4 (A100) comprising derived and/or modified sequence from LASV(Lassa virus/H.sapiens-wt/NGA/2018/ISTH_0959;Clade II)__AVV65099__GPCmut9 (opt5)
aggagagucccgcagucggcguccagcggcucugcuuguucgugugugugucguugcaggccuuauucaagcuuaccaugggccagaucauuaccuucuuucaagaggugccccacgucaucgaagagguuaugaacauugugcugaucgcccucagccugcuugcuauucugaaggggaucuacaauguggucacaugcggacucuucggccugguguccuuucuucugcucugugggagaucuugcagcacgaccuauaaaggaguuuacgaacugcagacacuggagcucgacauggccucccugaacaugaccaugccucuuucuuguacaaagaauaacagccaucacuauaucauggugggcaaugaaaccgggcuggagcucacacugaccaacacguccauuaucaaucauaaauucugcaaccuuucugaugcgcacaagaaaaaucuguacgaccaugcucucaugagcauuaucuccaccuuucaccugagcauuccgaacuucaaucaguaugaggccaugucuugugauuuuaacggaggcaagaucuccguccaguacaaucugagccacgccuaugcuauugacgccgcuaaccauugcggcacaaucgccaauggggugcuccaaaccuucaugcggauggcguggggaggcucuuacaucgcccuggauuccggguguggaagcugggacugcauuaugacaucuuaccaguaucuuaucauucagaacaccacgugggaagaucacugucaguuuucccgccccagcccuaucggcuaccuggggcuccugucccaaagaacacgggacauuuauaucucucgcagacuucugggaaccuucacauggacccucagcgauuccgagggcaacgaaacccccggcggguacugccugacacgguggaugcugaucgaggcugagcucaaguguuuuggaaauacggccguugcuaaaugcaacgaaaagcaugacgaggaguucugcgauaugcugcgccuuuuugacuucaauaaacaggccauuagacggcugaagaccgaagcgcagaugagcauccagcucauuaacaaagccgugaaugcucugaucaacgaucaacuuauuaugaagaaucaucugcgcgacaucauguguaucccuuauugcaacuacucuaaguauugguaccucaaucacacagucaccggcaaaacaucccugcccagauguuggcuggugagcaacgggucuuaccucaaugaaacccacuucagcgacgauauugagcagcaggccgacaacaugaucacggagcugcuucaaaaggaauauauugaucggcagggaaaaacaccucugggccucguggaccuguuugucuucuccaccucuuuuuaccugaucagcauuuuccuucaccucguuaagaucccgacccaucgccacgugauugggaaacccugcccuaagccccauagacugaaucacaugggaaucuguuccugcggccuguauaaacacccuggcgugcccgucaaguggaagcggugaggacuaguaauaaggaaacuguaugaaugucugugggcaggaagugaagagauccuucuguaaagguuuuuggaauuaugucugcugaauaauaaacuuuuuugaaauaauaaaucugguagaaaaaugagaucuaaaaaaaaaaaaaaaaaaaaaaaaaaaaaaaaaaaaaaaaaaaaaaaaaaaaaaaaaaaaaaaaaaaaaaaaaaaaaaaaaaaaaaaaaaaaaaaaaaaa

SEQ ID NO: 36115 - RNA, 1785 nt, Artificial Sequence
  mRNA product Design b-4 (A100) comprising derived and/or modified sequence from LASV(LASV003-NIG-2008;Clade II)__AIT17580__GPCmut9 (opt5)
aggagagucccgcagucggcguccagcggcucugcuuguucgugugugugucguugcaggccuuauucaagcuuaccaugggccagaucauuaccuucuuucaagaggugccccacgucaucgaagagguuaugaacauugugcugaucgcccucagccugcuugcuauucugaaggggaucuacaauguggccacaugcggacucuucggccuggucuccuuucuucugcucugugggagaucuugcagcacgaccuauaaaggaguguacgaacugcagacacuggagcucgacauggcgucccugaacaugaccaugccucuuucuuguacaaagaauaacagccaucacuauaucaugguuggcaaugaaaccgggcuggagcucacacugaccaacacguccauuaucaaucauaaauucugcaaccuuucugaugcucacaagaaaaaucuguacgaccaugcccucaugagcauuaucuccaccuuucaccugagcauuccgaacuucaaucaguaugaggccaugucuugugauuuuaacggaggcaagaucuccgugcaguacaaucugagccacacauaugcugucgacgccgcuaaccauugcggcaccauugccaauggggugcuccaaacauucaugcggauggcguggggaggcucuuacaucgcccuggauuccggguguggaagcugggacugcaucaugaccucuuaccaguaucuuauuauccagaacacgacaugggaagaucacugucaguuuucccgccccagcccuauuggcuaccuggggcuccugucccaaagaacccgggacaucuauauuucucgcagacuucugggaacauucaccuggacccucagcgauuccgagagcaacgaaacacccggcggcuacugccugacgcgguggaugcugaucgaggcugagcucaaguguuuugggaauaccgccguugcuaaaugcaacgaaaagcaugacgaggaguucugcgauaugcugcgccuuuuugacuucaauaaacaggccaucagacggcugaaggcggaagcccagaugucuauucagcucaucaacaaagcugugaaugcccugauuaacgaucaacuuaucaugaagaaucaucugcgcgacauuauguguaucccuuauugcaacuacuccaaguauugguaccucaaucacacagucaccggaagaacaagccugccccgguguuggcuggugucuaacggcagcuaccucaaugaaacccacuucuccgacgauaucgagcagcaggcugacaacaugauuacggagcugcuucaaaaagaauauauggaucgccaggggaagacaccucugggacucguggaccuguuugucuucucuaccagcuuuuaccugaucuccauuuuccuucaccucguuaaaaucccgacccauagacacgugauuggcaagcccugcccuaaaccccaucggcugaaucacauggggaucuguagcugcggacuguauaagcacccuggcgugcccgucaaauggaagcgcugaggacuaguaauaaggaaacuguaugaaugucugugggcaggaagugaagagauccuucuguaaagguuuuuggaauuaugucugcugaauaauaaacuuuuuugaaauaauaaaucugguagaaaaaugagaucuaaaaaaaaaaaaaaaaaaaaaaaaaaaaaaaaaaaaaaaaaaaaaaaaaaaaaaaaaaaaaaaaaaaaaaaaaaaaaaaaaaaaaaaaaaaaaaaaaaaa

SEQ ID NO: 36116 - RNA, 1785 nt, Artificial Sequence
  mRNA product Design b-4 (A100) comprising derived and/or modified sequence from LASV(LASV035-NIG-2009;Clade II)__AIT17588__GPCmut9 (opt5)
aggagagucccgcagucggcguccagcggcucugcuuguucgugugugugucguugcaggccuuauucaagcuuaccaugggccagaucauuaccuucuuucaagaggugccccacgucaucgaagagguuaugaacauugugcugaucgcccucagccugcuugcuauucugaaggggaucuacaauguggccacaugcggacucuucggccuggucuccuuucuucugcucugugggagaucuugcagcacgaccuauaaaggaguguacgaacugcagacacuggagcucgacauggcgucccugaacaugaccaugccucuuucuuguacaaagaauaacagccaucacuauaucaugguuggcaaugaaaccgggcuggagcucacacugaccaacacguccauuaucaaucauaaauucugcaaccuuucugaugcucacaagaaaaaucuguacgaccaugcccucaugagcauuaucuccaccuuucaccugagcauuccgaacuucaaucaguaugaggccaugucuugugauuuuaacggaggcaagaucuccgugcaguacaaucugagccacgcuuaugccgucgacgcugccaaccauugcggcacaauugcgaauggggugcuccaaaccuucaugcggauggccuggggaggcucuuacaucgcucuggauuccggguguggaagcugggacugcaucaugacaucuuaccaguaucuuauuauccagaacaccacgugggaagaucacugucaguuuucccgccccagcccuauuggcuaccuggggcuccugucccaaagaacacgggacaucuauauuucucgcagacuucugggaaccuucacauggacccucagcgauuccgagggcaacgaaacccccggcggguacugccugacacgguggaugcugaucgaggccgagcucaaguguuuuggaaauacggcuguugccaaaugcaacgaaaagcaugacgaggaguucugcgauaugcugcgccuuuuugacuucaauaaacaggcgaucagacggcugaaggccgaagcucagaugagcauucagcucaucaacaaagccgugaaugcucugauuaacgaucaacuuaucaugaagaaucaucugcgcgacauuauguguaucccuuauugcaacuacucuaaguauugguaccucaaucacaccgucacaggcaaaaccucccugcccagauguuggcuggugagcaacgggucuuaccucaaugaaacacacuucagcgacgauaucgagcagcaggccgacaacaugauuaccgagcugcuucaaaaggaauauaucgaucggcagggaaaaacgccucugggccucguggaccuguuugucuucuccacaucuuuuuaccugauuagcaucuuccuucaccucguuaagauuccgacccaucgccacgugaucgggaaacccugcccuaagccccauagacugaaucacaugggaauuuguuccugcggccuguauaaacacccuggcgugcccgucaaguggaagcggugaggacuaguaauaaggaaacuguaugaaugucugugggcaggaagugaagagauccuucuguaaagguuuuuggaauuaugucugcugaauaauaaacuuuuuugaaauaauaaaucugguagaaaaaugagaucuaaaaaaaaaaaaaaaaaaaaaaaaaaaaaaaaaaaaaaaaaaaaaaaaaaaaaaaaaaaaaaaaaaaaaaaaaaaaaaaaaaaaaaaaaaaaaaaaaaaa

SEQ ID NO: 36117 - RNA, 1785 nt, Artificial Sequence
  mRNA product Design b-4 (A100) comprising derived and/or modified sequence from LASV(LASV1000-NIG-2009;Clade II)__AIT17782__GPCmut9 (opt5)
aggagagucccgcagucggcguccagcggcucugcuuguucgugugugugucguugcaggccuuauucaagcuuaccaugggccagaucauuaccuucuuucaagaggugccccacgucaucgaagagguuaugaacauugugcugaucgcccucagccugcuugcuauucugaaggggaucuacaauguggccacaugcggacucuucggccuggucuccuuucuucugcucugugggagaucuugcagcacgaccuauaaaggaguguacgaacugcagacacuggagcucgacauggcgucccugaacaugaccaugccucuuucuuguacaaagaauaacagccaucacuauaucaugguuggcaaugaaaccgggcuggagcucacacugaccaacacguccauuaucaaucauaaauucugcaaccuuucugaugcucacaagaaaaaucuguacgaccaugcccucaugagcauuaucuccaccuuucaccugagcauuccgaacuucaaucaguaugaggccaugucuugugauuuuaacggaggcaagaucuccgugcaguacaaucugagccacacauaugcugucgacgccgcuaaccauugcggcaccauugccaauggggugcuccaaacauucaugcggauggcguggggaggcucuuacaucgcccuggauuccggguguggaagcugggacugcaucaugaccucuuaccaguaucuuauuauccagaacacgacaugggaagaucacugucaguuuucccgccccagcccuauuggcuaccuggggcuccugucccaaagaacccgggacaucuauauuucucgcagacuucugggaacauucaccuggacccucagcgauuccgagggcaacgaaacacccggcggguacugccugacgcgguggaugcugaucgaggcugagcucaaguguuuuggaaauaccgccguugcuaaaugcaacgaaaagcaugacgaggaguucugcgauaugcugcgccuuuuugacuucaauaaacaggccaucaagagacugaaaacagaagcgcagaugagcauucagcucaucaacaaggccgugaaugcucugauuaacgaucaacuuaucaugaagaaucaucugcgggacauuauguguaucccuuauugcaacuacucuaaauauugguaccucaaucacaccgucacaggcaagaccucccugccccgcuguuggcuggugagcaacgggucuuaccucaaugaaacgcacuucagcgacgauaucgagcagcaggccgacaacaugauuacagagcugcuucaaaaagaauauaucgauagacagggaaagaccccucugggccucguggaccuguuugucuucuccaccucuuuuuaccugauuagcaucuuccuucaccucguuaaaauuccgacacaucggcacgugguggggaagcccugcccuaaaccccaucgccugaaucacaugggaaucuguuccugcggccuguauaagcacccuggcguccccgugaaguggaaaagaugaggacuaguaauaaggaaacuguaugaaugucugugggcaggaagugaagagauccuucuguaaagguuuuuggaauuaugucugcugaauaauaaacuuuuuugaaauaauaaaucugguagaaaaaugagaucuaaaaaaaaaaaaaaaaaaaaaaaaaaaaaaaaaaaaaaaaaaaaaaaaaaaaaaaaaaaaaaaaaaaaaaaaaaaaaaaaaaaaaaaaaaaaaaaaaaaa

SEQ ID NO: 36118 - RNA, 1785 nt, Artificial Sequence
  mRNA product Design b-4 (A100) comprising derived and/or modified sequence from LASV(LASV221-NIG-2010;Clade II)__AIT17624__GPCmut9 (opt5)
aggagagucccgcagucggcguccagcggcucugcuuguucgugugugugucguugcaggccuuauucaagcuuaccaugggccagaucauuaccuucuuucaagaggugccccacgucaucgaagagguuaugaacauugugcugaucgcccucagccugcuugcuauucugaaggggaucuacaauguggccacaugcggacucuucggccuggucuccuuucuucugcucugugggagaucuugcagcacgaccuauaaaggaguguacgaacugcagacacuggagcucgacauggcgucccugaacaugaccaugccucuuucuuguacaaagaauaacagccaucacuauaucaugguuggcaaugaaaccgggcuggagcucacacugaccaacacguccauuaucaaucauaaauucugcaaccuuucugaugcucacaagaaaaaucuguacgaccaugcccucaugagcauuaucuccaccuuucaccugagcauuccgaacuucaaucaguaugaggccaugucuugugauuuuaacggaggcaagaucuccgugcaguacaaucugagccacacauaugcuauugacgccgcuaaccauugcggcaccaucgccaaugggguccuccaaacauucaugcggauggcguggggaggcucuuacaucgcccuggauuccggguguggaagcugggacugcauuaugaccucuuaccaguaucuuaucauucagaacacgacaugggaagaucacugucaguuuucccgccccagcccuaucggcuaccuggggcuccugucccaaagaacccgggacauuuauaucucucgcagacuucugggaacauucaccuggacccucagcgauuccgagggcaacgaaacacccggcggguacugccugacgcgguggaugcugaucgaggcugagcucaaguguuuuggaaauaccgccguggcuaaaugcaacgaaaagcaugacgaggaguucugcgauaugcugcgccuuuuugacuucaauaaacaggccauuagacggcugaagacagaagcgcagaugagcauccagcucauuaacaaagccguuaaugcucugaucaacgaucaacuuauuaugaagaaucaucugcgcgacaucauguguaucccuuauugcaacuacucuaaguauugguaccucaaucacaccgugacaggcaaaaccucccugcccagauguuggcuggucagcaacgggucuuaccucaaugaaacgcacuucagcgacgauauugagcagcaggccgacaacaugaucacagagaugcugcaaaaggaauauauggaucggcagggaaaaaccccucuuggccugguggaccucuuuguguucuccaccucuuuuuaccugauuagcaucuuccugcaccuugucaagauuccgacacaucgccacguuaucgggaaacccugcccuaagccccauagacucaaucacaugggaauuuguuccugcggccuguauaaacacccuggcgugcccgugaaguggaagcggugaggacuaguaauaaggaaacuguaugaaugucugugggcaggaagugaagagauccuucuguaaagguuuuuggaauuaugucugcugaauaauaaacuuuuuugaaauaauaaaucugguagaaaaaugagaucuaaaaaaaaaaaaaaaaaaaaaaaaaaaaaaaaaaaaaaaaaaaaaaaaaaaaaaaaaaaaaaaaaaaaaaaaaaaaaaaaaaaaaaaaaaaaaaaaaaaa

SEQ ID NO: 36119 - RNA, 1785 nt, Artificial Sequence
  mRNA product Design b-4 (A100) comprising derived and/or modified sequence from LASV(LASV237-NIG-2010;Clade II)__AIT17638__GPCmut9 (opt5)
aggagagucccgcagucggcguccagcggcucugcuuguucgugugugugucguugcaggccuuauucaagcuuaccaugggccagaucauuaccuucuuucaagaggugccccacgucaucgaagagguuaugaacauugugcugaucgcccucagccugcuugcuauucugaaggggaucuacaauguggccacaugcggacucuucggccuggucuccuuucuucugcucugugggagaucuugcagcacgaccuauaaaggaguguacgaacugcagacacuggagcucgacauggcgucccugaacaugaccaugccucuuucuuguacaaagaauaacagccaucacuauaucaugguuggcaaugaaaccgggcuggagcucacacugaccaacacguccauuaucaaucauaaauucugcaaccuuucugaugcucacaagaaagaccuguacgaucaugcccucaugagcauuaucuccaccuuucaccugagcauuccgaauuucaaccaguaugaggccaugucuugugacuuuaauggaggcaagaucuccgugcaguacaaccugagccacacauaugcugucgaugccgcuaaucauugcggcaccauugccaacggggugcuccaaacauucaugcggauggcguggggaggcucuuacaucgcccuggacuccggguguggaagcugggauugcaucaugaccucuuaccaguaucuuauuauccagaauacgacaugggaagaccacugucaguuuucccgccccagcccuauuggcuaccuggggcuccugucccaaagaacccgggauaucuauauuucucgcagacuucugggaacauucaccuggacccucagcgacuccgagggcaacgaaacacccggcggguacugccugacgcgguggaugcugaucgaggcugagcucaaguguuuuggaaacaccgccguugcuaaaugcaaugaaaagcaugaugaggaguucugcgacaugcugcgccuuuuugauuucaacaaacaggccaucagacggcugaagacagaagcgcagaugagcauucagcucaucaauaaagccgugaacgcucugauuaaugaccaacuuaucaugaagaaccaucugcgcgacauuauguguaucccuuauugcaauuacucuaaguauugguaccucaaccacaccgucacaggcaaaaccucccugcccagauguuggcuggugagcaaugggucuuaccucaacgaaacgcacuucagcgaugacaucgagcagcaggccgauaauaugauuacagagcugcuucaaaaggaauauauggaccggcagggaaaaaccccucugggccucguggaucuguuugucuucuccaccucuuuuuaccugaucagcauuuuccuucaccucaucaagauuccgacacaucgccacaucaccgggaaacccugcccuaagccccauagacugaaccacaugggaauuuguuccugcggccuguauaaacacccuggcguucccgugaaguggaagcggugaggacuaguaauaaggaaacuguaugaaugucugugggcaggaagugaagagauccuucuguaaagguuuuuggaauuaugucugcugaauaauaaacuuuuuugaaauaauaaaucugguagaaaaaugagaucuaaaaaaaaaaaaaaaaaaaaaaaaaaaaaaaaaaaaaaaaaaaaaaaaaaaaaaaaaaaaaaaaaaaaaaaaaaaaaaaaaaaaaaaaaaaaaaaaaaaa

SEQ ID NO: 36120 - RNA, 1785 nt, Artificial Sequence
  mRNA product Design b-4 (A100) comprising derived and/or modified sequence from LASV(LASV253-NIG-2011;Clade II)__AIT17670__GPCmut9 (opt5)
aggagagucccgcagucggcguccagcggcucugcuuguucgugugugugucguugcaggccuuauucaagcuuaccaugggccagaucauuaccuucuuucaagaggugccccacgucaucgaagagguuaugaacauugugcugaucgcccucagccugcuugcuauucugaaggggaucuacaauguggccacaugcggacucuucggccuggucuccuuucuucugcucugugggagaucuugcagcacgaccuauaaaggaguguacgaacugcagacacuggagcucgacauggcgucccugaacaugaccaugccucuuucuuguacaaagaauaacagccaucacuauaucaugguuggcaaugaaaccgggcuggagcucacacugaccaacacguccauuaucaaucauaaauucugcaaccuuucugaugcucacaagaaaaaucuguacgaccaugcccucaugagcauuaucuccaccuuucaccugagcauuccgaacuucaaucaguaugaggccaugucuugugauuuuaacggaggcaagaucuccgugcaguacaaucugagccacacauaugcugucgacgccgcuaaccauugcggcaccauugccaauggggugcuccaaacauucaugcggauggcguggggaggcucuuacaucgcccuggauuccggguguggaagcugggacugcaucaugaccucuuaccaguaucuuauuauccagaacacgacaugggaagaucacugucaguuuucccgccccagcccuauuggcuaccuggggcuccugucccaaagaacccgggacaucuauauuucucgcagacuucugggaacauucaccuggacccucagcgauuccgagggcaacgaaacacccggcggguacugccugacgcgguggaugcugaucgaggcugagcucaaguguuuuggaaauaccgccguugcuaaaugcaacgaaaagcaugacgaggaguucugcgauaugcugcgccuuuuugacuucaauaaacaggccaucagacggcugaaggcggaagcccagaugagcauucagcucaucaacaaagcugugaaugcccugauuaacgaucaacuuaucaugaagaaucaucugcgcgacauuauguguaucccuuauugcaacuacucuaaguauugguaccucaaucacacagucaccggcagaacaucccugccccgguguuggcuggugagcaacgggucuuaccucaaugaaacccacuucagcgacgauaucgagcagcaggcugacaacaugauuacggagcugcuucaaaaagaauauaucgaucgccagggaaagacaccucugggccucguggaccuguuugucuucuccaccucuuuuuaccugauuagcaucuuccuucaccucguuaaaauuccgacccauagacacaucauugggaagcccugcccuaaaccccaucggcugaaucacaugggaaucuguuccugcggccuguauaagcacccuggcgugcccgugaaauggaagcgcugaggacuaguaauaaggaaacuguaugaaugucugugggcaggaagugaagagauccuucuguaaagguuuuuggaauuaugucugcugaauaauaaacuuuuuugaaauaauaaaucugguagaaaaaugagaucuaaaaaaaaaaaaaaaaaaaaaaaaaaaaaaaaaaaaaaaaaaaaaaaaaaaaaaaaaaaaaaaaaaaaaaaaaaaaaaaaaaaaaaaaaaaaaaaaaaaa

SEQ ID NO: 36121 - RNA, 1785 nt, Artificial Sequence
  mRNA product Design b-4 (A100) comprising derived and/or modified sequence from LASV(LASV254-NIG-2011;Clade II)__AIT17674__GPCmut9 (opt5)
aggagagucccgcagucggcguccagcggcucugcuuguucgugugugugucguugcaggccuuauucaagcuuaccaugggccagaucauuaccuucuuucaagaggugccccacgucaucgaagagguuaugaacauugugcugaucgcccucagccugcuugcuauucugaaggggaucuacaauguggccacaugcggacucuucggccuggucuccuuucuucugcucugugggagaucuugcagcacgaccuauaaaggaguguacgaacugcagacacuggagcucgacaugaccaaccugaauaugacaaugccucuuuccuguaccaagaacaauucucaucacuauaucaugguuggcaacgaaacagggcuggagcucacccugacgaauaccagcauuaucaaccauaaauucugcaaucuuuccgaugcgcacaagaaaaaccuguacaaucaugcucucaugucuauuaucagcacauuucaccuguccauuccgaacuucaaucaguaugaggccaugagcugugacuuuaacggaggcaagaucucugugcaguacaaucugucccacagcuaugccgucgaugcugccaaccauugcggcaccauugcuaacggggugcuccaaacauucaugcggauggccuggggaggcucuuacaucgcgcuggacuccggguguggaaauugggauugcaucaugaccagcuaccaguaucuuauuauccagaacacgacaugggaagaccacugucaguuuucucgccccuccccuauuggcuaccuggggcuccugagccaaagaacccgggauaucuauauuucccgcagacuucugggaacauucaccuggacccucucugacagcgagggcaaugaaacacccggcggguacugccugacgcgguggaugcugaucgaggccgagcucaaguguuuuggaaacaccgcuguugccaaaugcaaugaaaagcaugaugaggaguucugcgacaugcugcgccuuuuugauuucaacaaacaggcuaucagacggcugaagacagaagcccaggcgaauauucagcucaucaacaaagccgugaaugcucugauuaacgaccaacuuaucaugaagaaucaucugcgcgauauuauguguaucccuuauugcaacuacuccaaguauugguaccucaaucacaccgucacaggcaaaaccagccugcccagauguuggcuggugucuaacggguccuaccucaaugaaacgcacuucagcgacgacaucgagcagcaggccgauaacaugauuacagagcugcuucaaaaggaauauauggaccggcagggaaaaaccccucugggccucguggaucuguuugucuucucuaccagcuuuuaccugaucuccauuuuccuucaccucguuaagaucccgacacaucgccacgugauugggaaacccugcccuaagccccauagacugaaccacaugggaaucuguucuugcggccuguauaaacacccuggcgugcccgucaaguggaagcggugaggacuaguaauaaggaaacuguaugaaugucugugggcaggaagugaagagauccuucuguaaagguuuuuggaauuaugucugcugaauaauaaacuuuuuugaaauaauaaaucugguagaaaaaugagaucuaaaaaaaaaaaaaaaaaaaaaaaaaaaaaaaaaaaaaaaaaaaaaaaaaaaaaaaaaaaaaaaaaaaaaaaaaaaaaaaaaaaaaaaaaaaaaaaaaaaa

SEQ ID NO: 36122 - RNA, 1785 nt, Artificial Sequence
  mRNA product Design b-4 (A100) comprising derived and/or modified sequence from LASV(Nig08-A19;Clade III)__ADU56618__GPCmut9 (opt5)
aggagagucccgcagucggcguccagcggcucugcuuguucgugugugugucguugcaggccuuauucaagcuuaccaugggccagaucgugaccuucuuucaagaggucccccacguuauugaagaggugaugaacaucgugcugauugcccucagcauccuggcuauucuuaaggggcuguacaauaucgccacaugcggacucaucggccuggucacguuccuucugcucuccgggagaucuuguagcaugaccuauaaaggaguguacgaacugcagacacuggagcucaacaugaauacccugaacaugacaaugccucuuuccugcaccaagaauaacucucaucacuauauuaugguuggcaaugaaacagggcuggagcucacccugacgaacaccagccuucugcaucacaaauuuuguaaucucuccgacgcgcauaagaaaaaccuguacgaucacacacugaugucuaucauuagcaccuuccaccucuccaucccgaauuuuaaccaguaugaggcuaugagcugcgacuucaauggaggcaagauuacagugcaguacaaccugucucauuccuaugccaucgaugccgcuaaucacuguggcaccgucgccaacggggugcuucaaacguuuaugcggauggcuuggggaggcagcuacauugcccuggacucugggugcggaaagugggauuguaucaugacauccuaccaguaucucaucauucagaacaccacaugggaagaccauugccaguucagccgccccucuccuaucggcuaccuggggcuucugucccaaagaacccgggauauuuauaucagccgcagacuccugggaaccuuuacauggacgcuguccgacucugagggcaaugaaacccccggcggguacugucucacacgguggaugcugauugaggcggagcuuaaaugcuucggaaacaccgccguugcuaaguguaaugaaaaacacgaugaggaauuuugcgacaugcugcgccucuucgauuuuaacaagcaggccaucagacggcugaaagcugaggcccagaugagcauccagcuuauuaauaaggcggugaacgcccugaucaaugaccaacucauuaugaagaaccaucugcgcgauaucaugugcauuccuuauuguaauuacuccaaauauugguaccugaaccacacaagcaccggcagaacgucucucccccggugcuggcuggucuccaaugggagcuaccuuaacgaaacacacuucucugacgacaucgagcagcaggcugauaauaugaucaccgagaugcugcaaaaggaauaucucgaccgccagggaaaaaccccucugggccugguggaucuuuucguguuuagcacauccuucuaccucauuucuaucuuucugcaucuggucaagauuccgacccacagacauaucguugggaaacccuguccuaagccccaccggcucaaccacaugggaauuugcagcuguggccuguauaaacagccuggcgugcccgugcgcuggaagagaugaggacuaguaauaaggaaacuguaugaaugucugugggcaggaagugaagagauccuucuguaaagguuuuuggaauuaugucugcugaauaauaaacuuuuuugaaauaauaaaucugguagaaaaaugagaucuaaaaaaaaaaaaaaaaaaaaaaaaaaaaaaaaaaaaaaaaaaaaaaaaaaaaaaaaaaaaaaaaaaaaaaaaaaaaaaaaaaaaaaaaaaaaaaaaaaaa

SEQ ID NO: 36123 - RNA, 1788 nt, Artificial Sequence
  mRNA product Design b-4 (A100) comprising derived and/or modified sequence from LASV(G1180-SLE-2010;Clade IV)__AIT17168__GPCmut9 (opt5)
aggagagucccgcagucggcguccagcggcucugcuuguucgugugugugucguugcaggccuuauucaagcuuaccaugggccagaucgugaccuucuuucaagaggucccccacguuauugaagaggugaugaacaucgugcugauugcccucagcauccuggcuguccuuaaggggcuguacaauuucgccacaugcggacucgugggccugcuuacguuucugcuccugugugggagauccugcaccgcgucucgguauaaaggaguuuacgaacugcagacacucgagcugaacauggaaacccuuaauaugacaaugccucugagcuguaccaagaacaauucccaucacuauauuauggugggcaacgagacagggcucgagcugacccuuacgaauaccucuaucaucaaccauaaauucugcaaucugagcgacgcucacaagaaaaaccucuacgaucaugcccugauguccauuaucucuacauuucaccugagcauuccgaauuucaaccaguaugaagccauguccugugacuuuaauggaggcaagaucagcguccaguacaaccucucucacuccuaugcuggcgaugccgcuaaucauugcgggaccguggccaacggaguucugcaaacauucaugcgcauggcguggggcgggagcuacauugcccuugacucuggauguggcuccugggauugcaucaugaccagcuaccaguaucugauuauccagaacacgacaugggaggaccacugucaguuuucuagacccuccccuaucggguaccucggacugcuuagccaacggacccgcgauauuuauaucuccagacggcugcucggcacauucaccuggacccugucugacagcgaaggcaaggauacacccgggggauacugccugacgcgcuggaugcucauugaggcugagcugaaauguuuuggcaauaccgccguggcuaagugcaacgaaaaacaugacgaggaguucugcgauaugcuuagacuguuugacuucaauaagcaggccauccagcggcucaaagcggaagcccagauguccauucaacugaucaacaaggcugucaaugcccuuaucaacgaucagcugauuaugaagaaucaccuccgcgacaucauguguauuccuuauugcaacuacagcaaauauugguaccugaaucacacaaccacagggaagaccucucugcccaaauguuggcucguguccaacggaagcuaccugaaugaaacgcauuucucugacgauaucgagcagcaagcugacaacaugauuacagagaugcuucagaaggaauauauggagagacagggcaaaaccccucuggggcucguggaucuguuugucuucagcaccuccuuuuaccugaucucuaucuuccuucaccucguuaagauuccgacacaucggcacaucgugggaaaaagcugccccaagccucaucgccugaaucacaugggcauuuguuccugcggccuguauaagcagcccggggugccugucaaauggaagagaugaggacuaguaauaaggaaacuguaugaaugucugugggcaggaagugaagagauccuucuguaaagguuuuuggaauuaugucugcugaauaauaaacuuuuuugaaauaauaaaucugguagaaaaaugagaucuaaaaaaaaaaaaaaaaaaaaaaaaaaaaaaaaaaaaaaaaaaaaaaaaaaaaaaaaaaaaaaaaaaaaaaaaaaaaaaaaaaaaaaaaaaaaaaaaaaaa

SEQ ID NO: 36124 - RNA, 1788 nt, Artificial Sequence
  mRNA product Design b-4 (A100) comprising derived and/or modified sequence from LASV(G1442-SLE-2011;Clade IV)__AIT17180__GPCmut9 (opt5)
aggagagucccgcagucggcguccagcggcucugcuuguucgugugugugucguugcaggccuuauucaagcuuaccaugggccagaucgugaccuucuuucaagaggucccccacguuauugaagaggugaugaacaucgugcugauugcccucagcauccuggcuguccuuaaggggcuguacaauguggccacaugcggacucauuggccugguuacguuccuucugcucugugggagauccugcaccacaacccuguauaaaggaguguacgaacugcagacacucgagcugaacauggaaacccuuaauaugacaaugccucugucuuguaccaagaacaauagccaucacuauauccgggucggcaacgagacggggcucgagcugacccuuacaaauaccuccaucauuaaccauaaauuuugcaaucugucugacgcgcacaagaaaaaccucuacgaucaugcucugaugagcaucauuuccacauuccaccugucuaucccgaauuuuaaccaguaugaagccaugagcugugacuucaauggaggcaagauuuccgugcaguacaaccucagccacucuuaugccggcgaugcugccaaucauugcgggaccguugcuaacggagugcugcaaacguuuaugcgcauggccuggggcggguccuacaucgcgcuugacagcggauguggcaacugggauugcauuaugacaucuuaccaguaucugaucauccagaauaccacaugggacgaucacugucaguucuccagacccagcccuauuggguaccucggacugcuuucucaacggacccgcgacgucuauaucuccagacggcugcucggcaccuuuacauggacgcugagcgauuccgagggcaaggacacccccgggggauacugccugacacgcuggaugcucauugaagccgagcugaaauguuucggcaacaccgcuguggccaagugcaaugagaaacaugaugaagaguuuugcgacaugcuuagacuguucgauuuuaacaagcaggcuauccagcggcucaaagccgaagcgcagaugucuauucaacugaucaauaaggccgugaacgcucuuaucaaugaccagcugauuaugaagaaccaccuccgcgacaucauguguauuccuuauugcaauuacagcaaauauugguaccugaacaauacagccaccgggaagacgucccugcccaaauguuggcucaucagcaacggaucuuaccugaaugagacacacuucuccgaugacauugaacaggaggcugauaacaugaucaccgagaugcuucaaaaggaauauauggagagacagggcaaaaccccucuggggcucgucgaccuguucguuuuuagcacaucuuucuaccugaucagcauuuuucuucaucucgugaagaucccgacccaccggcauauugugggaaaauccugccccaagccucaccgccugaaucauaugggcaucuguucuugcggccuguauaagcagcccggggucccugugagauggaaacggugaggacuaguaauaaggaaacuguaugaaugucugugggcaggaagugaagagauccuucuguaaagguuuuuggaauuaugucugcugaauaauaaacuuuuuugaaauaauaaaucugguagaaaaaugagaucuaaaaaaaaaaaaaaaaaaaaaaaaaaaaaaaaaaaaaaaaaaaaaaaaaaaaaaaaaaaaaaaaaaaaaaaaaaaaaaaaaaaaaaaaaaaaaaaaaaaa

SEQ ID NO: 36125 - RNA, 1788 nt, Artificial Sequence
  mRNA product Design b-4 (A100) comprising derived and/or modified sequence from LASV(G3010-SLE-2013;Clade IV)__AIT17344__GPCmut9 (opt5)
aggagagucccgcagucggcguccagcggcucugcuuguucgugugugugucguugcaggccuuauucaagcuuaccaugggccagaucgugaccuucuuucaagaggucccccacguuauugaagaggugaugaacaucgugcugauugcccucagcauccuggcuguccuuaaggggcuguacaauuucgccacaugcggacucgugggccugguuacguuucuucugcucugugggagauccugcaccacaucucuguauaaaggaguguacgaacugcagacccucgagcugaacauggaaacacuuaauaugaccaugccucugagcuguacaaagaacaauucccaucacuauauuauggucggcaacgagaccgggcucgagcugacgcuuaccaauacaucuaucaucaaccauaaauucugcaaucugagcgacgcgcacaagaaaaaccucuacaaucaugcucugauguccauuaucucuaccuuucaccugagcauuccgaacuucaaucaguaugaagccauguccugugauuuuaacggaggcaagaucagcgugcaguacaaucucucucacuccuaugccggcgacgcugccagccauugcgggacaguugcuaacggagugcugcaaaccuucaugcggauggccuggggcgggucuuacauugcgcuugauuccggauguggcaagugggacugcaucaugacgagcuaccaguaucugauuauccagaacacaaccugggaggaucacugucaguuuucucgccccuccccuaucggguaccucggacugcuuagccaaagaacacgggacauuuauaucucccgcagacugcucggcaccuucaccuggacacugucugauagcgaaggcaaagacacgcccgggggauacugccugacccgguggaugcucauugaggccgagcugaaguguuuuggcaauacagcugucgccaaaugcaacgaaaagcaugaugaggaguucugcgacaugcuucgccuguuugauuucaauaaacaggcuauccagagacucaagaccgaagcccagauguccauucaacugaucaacaaggcggugaaugcccuuaucaacgaccagcugauuaugaaaaaucaccuccgggauaucauguguauuccuuauugcaacuacagcaaguauugguaccugaaucacacaaccacggggaaaacaucucugcccaaguguuggcucguguccaacggaagcuaccugaaugaaacccauuucucugacgacaucgagcagcaagcugauaacaugauuaccgagaugcuucagaaagaauauauggagcgccagggcaagacaccucuggggcucgucgaccuguuuguuuucagcaccuccuuuuaccugaucucuaucuuccuucaccucgugaaaauuccgacacauagacacaucgugggaaagagcugccccaagccucaucggcugaaucacaugggcauuuguuccugcggccuguauaaacagcccggggucccugugcgcuggaagagaugaggacuaguaauaaggaaacuguaugaaugucugugggcaggaagugaagagauccuucuguaaagguuuuuggaauuaugucugcugaauaauaaacuuuuuugaaauaauaaaucugguagaaaaaugagaucuaaaaaaaaaaaaaaaaaaaaaaaaaaaaaaaaaaaaaaaaaaaaaaaaaaaaaaaaaaaaaaaaaaaaaaaaaaaaaaaaaaaaaaaaaaaaaaaaaaaa

SEQ ID NO: 36126 - RNA, 1788 nt, Artificial Sequence
  mRNA product Design b-4 (A100) comprising derived and/or modified sequence from LASV(G502-SLE-2009;Clade IV)__AIT17126__GPCmut9 (opt5)
aggagagucccgcagucggcguccagcggcucugcuuguucgugugugugucguugcaggccuuauucaagcuuaccaugggccagaucgugaccuucuuucaagaggucccccacguuauugaagaggugaugaacaucgugcugauugcccucagcauccuggcuguccuuaaggggcuguacaauuucgccacaugcggacucgugggccugcuuacguuucugcuccugugugggagauccugcaccacaggacuguauaaaggcguuuacgaacuccagacccuggagcuuaacauggaaacacugaauaugaccaugccucucucuuguacaaagaacaauagccaucacuauauuaugguggggaacgagaccggacuggagcuuacgcugaccaauacauccaucaucaaccauaaauucugcaaucucucugacgcgcacaagaaaaaccuguacgaucaugcucugaugagcauuaucuccaccuuucaccucucuauuccgaauuucaaccaguaugaagccaugagcugugacuuuaauggcggcaagaucuccguccaguacaaccugagccacucuuaugccggggaugcugccgaccauugcggaacaguggcuaauggcguucuucaaaccuucaugcggauggccuggggaggguccuacauugcgcuggauagcggcugugggcgcugggacugcaucaugacgucuuaccaguaucucauuauccagaacacaaccugggaggaucacugucaguuuuccagacccagcccuaucggauaccugggccuucugucucaacggacacgcgacauuuauaucuccagacggcuccugggcaccuucaccuggacacugagcgauuccgaagggaaggacacgcccggaggcuacugccucacccgcuggaugcugauugaggccgagcuuaaauguuuugggaacacagcuguggccaagugcaaugaaaaacaugaugaggaguucugcgacaugcugagacucuuugauuucaacaagcaggcuauccagcggcugaaagccgaagcgcagaugucuauucaacuuaucaauaaggccgucaacgcucugaucaaugaccagcucgugaugaagaaccaucugcgcgacauuauguguaucccuuauugcaauuacagcagauauugguaccugaaccacaccacaaccggacggacgucccuccccaaauguuggcuggugagcaauggcucuuaccuuaacgaaacacacuucuccgaugacauugagcagcaagccgauaauaugaucaccgagaugcugcagaaggaauauauggagcgccaggggaaaaccccucucggacuggucgaccuguuuguuuucagcacaucuuuuuaccuuauuagcaucuuccuccaccuggugaagaucccgacccauagacacauugugggcaaauccugccccaagccucaucggcugaaccacaugggcaucuguucuugcgggcucuauaaacagcccggagucccugugaaguggaagcgcugaggacuaguaauaaggaaacuguaugaaugucugugggcaggaagugaagagauccuucuguaaagguuuuuggaauuaugucugcugaauaauaaacuuuuuugaaauaauaaaucugguagaaaaaugagaucuaaaaaaaaaaaaaaaaaaaaaaaaaaaaaaaaaaaaaaaaaaaaaaaaaaaaaaaaaaaaaaaaaaaaaaaaaaaaaaaaaaaaaaaaaaaaaaaaaaaa

SEQ ID NO: 36127 - RNA, 1788 nt, Artificial Sequence
  mRNA product Design b-4 (A100) comprising derived and/or modified sequence from LASV(G733-SLE-2010;Clade IV)__AIT17154__GPCmut9 (opt5)
aggagagucccgcagucggcguccagcggcucugcuuguucgugugugugucguugcaggccuuauucaagcuuaccaugggccagaucgugaccuucuuucaagaggucccccacguuauugaagaggugaugaacaucgugcugauugcccucagcauccuggcuguccuuaaggggcuguacaauuucgccacaugcggaauugugggccucguuuccuuucugcuucugugugggagaucuugcacgaccagccucuauaaaggaguguacgaacugcagacacuggagcucaacauggaaacccugaauaugacaaugccucuuuccuguaccaagaacaauucucaucacuauaucauggucggcaacgagacagggcuggagcucacccugacgaauaccagcaucauuaaccauaaauucugcaaucuuuccgacgcgcacaagaaaaaccuguacgaucaugcucucaugucuaucauuagcacauuucaccuguccaucccgaauuucaaccaguaugaagccaugagcugugacuuuaauggaggcaagauuucugugcaguacaaccugucccacagcuaugccggcgaugcugccaaucauugcgggaccaucgcuaacggaguucuccaaacauucaugcggauggccuggggcgggucuuacauugcgcuggacuccggaugugaucgcugggacugcaucaugaccagcuaccaguaucuuaucauucagaacacgacaugggaggaucacugucaguuuucuagacccuccccuaucggcuaccuggggcuccugagccaacggacccgcgacauuuauaucuccagacggcuucugggaacauucaccuggacccucucugauagcgaaggcaaggacacacccggcggguacugccugacgcgcuggaugcugauugaggccgagcucaaauguuuuggaaauaccgcuguggccaagugcaacgaaaaacaugaugaggaguucugcgacaugcugagacuuuuugauuucaauaagcaggcuauccagcggcugaaagccgaagcgcagauguccauccaacucauuaacaaggccgucaaugcucugaucaacgaccagcuuauuaugaagaaucaucugcgcgacaucauguguauuccuuauugcaacuacagcaaauauugguaccucaaucacacaaccacaggcaagaccucucugcccaaauguuggcugguguccaacgggagcuaccucaaugaaacgcacuucucugaugacaucgagcagcaagccgauaacaugaucacagagaugcugcagaaggaauauauggagagacagggaaaaaccccucuuggccugguggaccucuuugucuucagcaccuccuuuuaccugauuucuaucuuccugcaccuuguuaagauuccgacacaucggcacgugguggggaaaagcugccccaagccucaucgccucaaucacaugggaaucuguuccugcggccuguauggccagcccggggucccugugaaguggaaaagaugaggacuaguaauaaggaaacuguaugaaugucugugggcaggaagugaagagauccuucuguaaagguuuuuggaauuaugucugcugaauaauaaacuuuuuugaaauaauaaaucugguagaaaaaugagaucuaaaaaaaaaaaaaaaaaaaaaaaaaaaaaaaaaaaaaaaaaaaaaaaaaaaaaaaaaaaaaaaaaaaaaaaaaaaaaaaaaaaaaaaaaaaaaaaaaaaa

SEQ ID NO: 36128 - RNA, 1788 nt, Artificial Sequence
  mRNA product Design b-4 (A100) comprising derived and/or modified sequence from MOPV/LASV reassortant(IGS-1;Clade IV)__AFY05576__GPCmut9 (opt5)
aggagagucccgcagucggcguccagcggcucugcuuguucgugugugugucguugcaggccuuauucaagcuuaccaugggccagaucgugaccuucuuucaagaggucccccacguuauugaagaggugaugaacaucgugcugauugcccucagcguccuggcugugcuuaaggggcuguacaauuucgccacaugcggacucguuggccuggugacguuucuucugcucugugggagauccugcaccacaucucuguauaaaggagucuacgaacugcagacccucgagcugaacauggaaacacuuaauaugaccaugccucugagcuguacaaagaacaauucccaucacuauaucauggugggcaacgagaccgggcucgagcugacgcuuaccaauacaucuauuaucaaccauaaauucugcaaucugagcgacgcgcacaagaaaaaccucuacgaucaugcucugauguccaucauuucuaccuuucaccugagcaucccgaauuucaaccaguaugaagccauguccugugacuuuaauggaggcaagauuagcguucaguacaaccucucucacuccuaugccggcgaugcugccaaucauugcgggacaguggcuaacggaguccugcaaaccuucaugcggauggccuggggcgggagcuacaucgcgcuugacucuggauguggcaacugggauugcauuaugacguccuaccaguaucugaucauucagaauacaaccugggaggaccacugucaguuuagccgccccucuccuaucggguaccucggacugcuuucccaaagaacacgggauaucuauauuagccgcagacugcucggcaccuucaccuggacacuguccgacucugaaggcgaggauacgcccgggggauacugccugacccgguggaugcucaucgaggccgaacugaaguguuuuggcaacacagcuguggccaaaugcaaugagaagcaugacgaagaguucugcgauaugcuucgccuguuugacuucaacaaacaggcuauucagagacucaaggccgaagcgcagaugagcauccaacugauuaauaaagccgugaacgcucuuaucaaugaucagcugaucaugaagaaccaccuccgggacauuauguguaucccuuauugcaauuacuccaaguauugguaccugaaccacaccacaaccgggcgcacgagccugcccaaauguuggcucgucucuaauggauccuaccugaacgagacacauuucagcgacgauauugagcagcaagccgacaauaugaucaccgaaaugcuucagaaggaguauauggaaagacagggcaaaaccccucuggggcucguugaucuguuuguguucucuaccagcuuuuaccugauuuccaucuuccuucaccucgugaagaucccgacacaucggcacauugucggaaaaucuugccccaagccucaucgccugaaccacaugggcaucuguagcugcggccuguauaaacagcccggggugccuguuaaguggaagagaugaggacuaguaauaaggaaacuguaugaaugucugugggcaggaagugaagagauccuucuguaaagguuuuuggaauuaugucugcugaauaauaaacuuuuuugaaauaauaaaucugguagaaaaaugagaucuaaaaaaaaaaaaaaaaaaaaaaaaaaaaaaaaaaaaaaaaaaaaaaaaaaaaaaaaaaaaaaaaaaaaaaaaaaaaaaaaaaaaaaaaaaaaaaaaaaaa

SEQ ID NO: 36129 - RNA, 1788 nt, Artificial Sequence
  mRNA product Design b-4 (A100) comprising derived and/or modified sequence from LASV(LM765-SLE-2012;Clade IV)__AIT17814__GPCmut9 (opt5)
aggagagucccgcagucggcguccagcggcucugcuuguucgugugugugucguugcaggccuuauucaagcuuaccaugggccagaucgugaccuucuuucaagaggucccccacguuauugaagaggugaugaacaucgugcugauugcccucagcauccuggcuguccuuaaggggcuguacaauuucgccacaugcggacucgugggccugguuacguuucuucugcucugugggagauccugcaccacaucucuguauaaaggaguguacgaacugcagacccucgagcugaacauggaaacacuuaauaugaccaugccucugagcuguacaaagaacaauucccaucacuauauuauggucggcaacgagaccgggcucgagcugacgcuuaccaauacaucuaucaucgaccauaaauucugcaaccugagcgaugcgcaccggaagaaucucuacgaccaugcucugauguccauuaucucuaccuuucaccugagcauuccgaacuucaaucaguaugaagccauguccugugauuuuaacggaggcaaaaucagcgugcaguacaaucucucucacuccuaugccaaggacgcugccgaucauugcggcacaguugcuaacggggugcugcaaaccuucaugcgcauggccuggggaggcagcuacauugcgcuugacucuggguguggaagaugggauugcaucaugacguccuaccaguaucugauuauccagaauacaaccugggaggaccacugucaguuuagccggcccucuccuaucggcuaccucgggcugcuuucccaacgcacaagagauauuuauaucagccggcgccugcucggaaccuucaccuggacacuguccgacucugaaggcaaggauacgcccggcggguacugccugaccagauggaugcucauugaggccgagcugaaauguuuuggaaacacagcugucgccaagugcaacgaaaaacaugacgaggaguucugcgauaugcuucggcuguuugacuucaauaagcaggcuauccagcgccucaaagccgaagcgcagaugagcauucaacugaucaacaaggccgugaaugcucuuaucaacgaccagcugauuaugaagaaucaccucagagauaucauguguauuccuuauugcaacuacuccaaauauugguaccugaaucacaccacaaccggcaagacgagccugcccaaauguuggcucgugucuaacggguccuaccugaaugaaacacauuucagcgacgauaucgagcagcaagccgacaacaugauuaccgagaugcuucagaaggaauauauggagcggcagggaaaaaccccucugggccucgucgaucuguuuguuuucucuaccagcuuuuaccugaucuccaucuuccuucaccucgugaagauuccgacacaucgccacaucguggggaaacccugcccuaagccccauagacugaaucacaugggaauuuguucuugcggccuguauaagcagccuggcguccccgugaaauggaagcggugaggacuaguaauaaggaaacuguaugaaugucugugggcaggaagugaagagauccuucuguaaagguuuuuggaauuaugucugcugaauaauaaacuuuuuugaaauaauaaaucugguagaaaaaugagaucuaaaaaaaaaaaaaaaaaaaaaaaaaaaaaaaaaaaaaaaaaaaaaaaaaaaaaaaaaaaaaaaaaaaaaaaaaaaaaaaaaaaaaaaaaaaaaaaaaaaa

SEQ ID NO: 36130 - RNA, 1788 nt, Artificial Sequence
  mRNA product Design b-4 (A100) comprising derived and/or modified sequence from LASV(LM776-SLE-2012;Clade IV)__AIT17824__GPCmut9 (opt5)
aggagagucccgcagucggcguccagcggcucugcuuguucgugugugugucguugcaggccuuauucaagcuuaccaugggccagaucgugaccuucuuucaagaggucccccacguuauugaagaggugaugaacaucgugcugauugcccucagcauccuggcuguccuuaaggggcuguacaauuucgccacaugcggacucgugggccugguuacguuucuucugcucugugggagauccugcaccacaucuguguauaaaggagucuacgaacugcagacccuggagcucaacauggaaacacugaauaugaccaugccucuuagcuguacaaagaacaauucccaucacuauauuauggugggcaacgagaccgggcuggagcucacgcugaccaauacaucuaucaucaaccauaaauucugcaaucuuagcgacgcgcacaagaaaaaccuguacgaucaugcucucauguccauuaucucuaccuuucaccugagcauuccgaauuucaaccaguaugaagccauguccugugacuuuaauggaggcaagaucagcguucaguacaaccugucucacuccuaugccggcgaugcugccaaucauugcgggacaguggcuaacggaguccuccaaaccuucaugcggauggccuggggcgggagcuacauugcgcuggacucuggauguggcaagugggauugcaucaugacguccuaccaguaucuuauuauccagaacacaaccugggaggaccacugucaguuuagccgccccucuccuaucggguaccugggacuccugucccaaagaacacgggauauuuauaucagccgcagacuucugggcaccuucaccuggacacucuccgacucugaaggcaaagauacgcccgggggauacugccugacccgguggaugcugauugaggccgagcucaaguguuuuggcaauacagcuguggccaaaugcaacgaaaagcaugacgaggaguucugcgauaugcugcgccuuuuugacuucaauaaacaggcuauccagagacugaaggccgaagcgcagaugagcauucaacucaucaacaaggccgugaaugcucugaucaacgaucagcuuauuaugaaaaaucaucugcgggacaucauguguauuccuuauugcaacuacuccaaguauugguaccucaaucacaccacaaccgggaaaacgagccugcccaaguguuggcuggucucuaacggauccuaccucaaugaaacacacuucagcgacgauaucgagcagcaagccgacaacaugauuaccgagaugcugcagaaagaauauauggagcgccagggcaagaccccucuugggcugguugaucucuuuguguucucuaccagcuuuuaccugaucuccaucuuccugcaccuugugaaaauuccgacacauagacacaucgucggaaagucuugccccaagccucaucggcucaaucacaugggcauuuguagcugcggccuguauaaacagcccggggugccuguucgcuggaagagaugaggacuaguaauaaggaaacuguaugaaugucugugggcaggaagugaagagauccuucuguaaagguuuuuggaauuaugucugcugaauaauaaacuuuuuugaaauaauaaaucugguagaaaaaugagaucuaaaaaaaaaaaaaaaaaaaaaaaaaaaaaaaaaaaaaaaaaaaaaaaaaaaaaaaaaaaaaaaaaaaaaaaaaaaaaaaaaaaaaaaaaaaaaaaaaaaa

SEQ ID NO: 36131 - RNA, 1788 nt, Artificial Sequence
  mRNA product Design b-4 (A100) comprising derived and/or modified sequence from LASV(Mad39;Clade IV)__ANH09722__GPCmut9 (opt5)
aggagagucccgcagucggcguccagcggcucugcuuguucgugugugugucguugcaggccuuauucaagcuuaccaugggccagaucgugaccuucuuucaagaggucccccacguuauugaagaggugaugaacaucgugcugauugcccucagcauccuggcuguccuuaaggggcuguacaauguggccacaugcggacucauuggccugguuacguuccuucugcucugugggagauccugcaccacaacccuguauaaaggaguguacgaacugcaggcgcucgagcugaacauggaaacacuuaauaugaccaugccucugucuuguacaaagaacaauagccaucacuauauccgggucggcaacgagaccgggcucgagcugacgcuuaccaauacaucccugaucaaccauaaauuuugcaaucucucugacgcucacaagaaaaaccuguacgaucaugcccugaugagcauuaucuccaccuuccaccucucuauuccgaauuuuaaccaguaugaagccaugagcugugacuucaaugauggaaagaucuccgugcaguacaaccugagccacacauaugcuggcgacaccgccaaucauugcggcacgguugcuaacggggugcuucaaacauuuaugcgcauggccuggggaggcucuuacauugcgcuggauuccggguguggaggcugggacugcaucaugaccagcuaccaguaucucauuauccagaacacaaccugggaggaucacugucaguucucuagacccuccccuaucggguaccugggacuucugagccaacggacccgcgacauuuauaucucuagacggcuccugggcacauuuacguggacccuguccgauagcgaaggcaaggacacacccgggggauacugccucacccgcuggaugcugauugaggccgagcuuaaauguuucggcaauacagcugucgccaagugcaacgaaaaacaugaugaggaauuuugcgacaugcugagacucuucgauuuuaauaagcaggcuauccagcggcugaaagccgaggcgcagauguccauucaacuuaucaacaaggccgugaaugcucugaucaacgaccagcucauuaugaagaaucaucugcgcgacaucauguguauuccuuauugcaacuacucuaaauauugguaccugaaucacaccgugacggggaagacaagccuccccaaauguuggcuggucuccaacggaagcuaccuuaaugaaacccacuucucugaugacaucgagcagcaagccgauaacaugauuaccgagaugcugcagaaggaauauauggagagacagggcaaaacaccucucgggcugguugaccuguucguguuuuccaccagcuucuaccuuaucucuaucuuucuccaccuggugaagauuccgacacaucggcacgucgugggaaaacccugcccuaagccccaucgccugaaucacaugggcaucuguagcugcggcuucuauaagcagccugggguucccgugagauggaaacggugaggacuaguaauaaggaaacuguaugaaugucugugggcaggaagugaagagauccuucuguaaagguuuuuggaauuaugucugcugaauaauaaacuuuuuugaaauaauaaaucugguagaaaaaugagaucuaaaaaaaaaaaaaaaaaaaaaaaaaaaaaaaaaaaaaaaaaaaaaaaaaaaaaaaaaaaaaaaaaaaaaaaaaaaaaaaaaaaaaaaaaaaaaaaaaaaa

SEQ ID NO: 36132 - RNA, 1788 nt, Artificial Sequence
  mRNA product Design b-4 (A100) comprising derived and/or modified sequence from LASV(Z0947-SLE-2011;Clade IV)__AIT17840__GPCmut9 (opt5)
aggagagucccgcagucggcguccagcggcucugcuuguucgugugugugucguugcaggccuuauucaagcuuaccaugggccagaucgugaccuucuuucaagaggucccccacguuauugaagaggugaugaacaucgugcugauugcccucagcauccuggcuguccuuaaggggcuguacaauuucgccacaugcggacucgugggccugguuacguuucuucugcucugugggagauccugcaccauuucucuguauaaaggaguguacgaacugcagacacucgagcugaacauggaaacccuuaauaugacaaugccucugagcuguaccaagaacaauucccaucacuauaucauggucggcaacgagacagggcucgagcugacccuuacgaauaccucuaucauuaaccauaaauucugcaaucugagcgacgcgcacaagaaaaaccucuacgaucaugcucugauguccaucauuucuacauuucaccugagcaucccgaauuucaaccaguaugaagccauguccugugacuuuaauggaggcaagauuagcgugcaguacaaccucucucacuccuaugccggcgaugcugccaaucauugcgggaccguugcuaacggagugcugcaaacauucaugcggauggccuggggcgggagcuacaucgcgcuugacucuggaugugaucgcugggacugcauuaugaccuccuaccaguaucugaucauccagaacacgacaugggaggaucacugucaguuuagcagacccucuccuauuggcuaccucgggcugcuuucccaacggacccgcgacaucuauauuagcagacggcugcucggaacauucaccuggacccuguccgauucugaaggcaaggacacacccggcggguacugccugacgcgcuggaugcucaucgaggccgagcugaaauguuuuggaaauaccgcugucgccaagugcaacgaaaaacaugaugaggaguucugcgacaugcuuagacuguuugauuucaauaagcaggcuauucagcggcucaaagccgaagcgcagaugagcauccaacugaucaacaaggccgugaaugcucuuauuaacgaccagcugaucaugaagaaucaccuccgcgacauuauguguaucccuuauugcaacuacuccaaauauugguaccugaaucacacaaccacaggcaagaccagccugcccaaauguuggcucgugucuaacggguccuaccugaaugaaacgcauuucagcgaugacauugagcagcaagccgauaacaugaucacagagaugcuucagaaggaauauauggagagacagggaaaaaccccucugggccucgucgaccuguuuguuuucucuaccagcuuuuaccugaucuccauuuuccuucaccucgugaagaucccgacacaucggcacauuguggggaaacccugcccuaagccccaucgccugaaucacaugggaaucuguucuugcggccuguauaagcagccuggcguccccgugaaauggaagagaugaggacuaguaauaaggaaacuguaugaaugucugugggcaggaagugaagagauccuucuguaaagguuuuuggaauuaugucugcugaauaauaaacuuuuuugaaauaauaaaucugguagaaaaaugagaucuaaaaaaaaaaaaaaaaaaaaaaaaaaaaaaaaaaaaaaaaaaaaaaaaaaaaaaaaaaaaaaaaaaaaaaaaaaaaaaaaaaaaaaaaaaaaaaaaaaaa

SEQ ID NO: 36133 - RNA, 1658 nt, Artificial Sequence
  mRNA product Design i-3 (hSL-A64-N5) comprising derived and/or modified sequence from LASV(Josiah;Clade IV)__NP_694870__GPCmut9 (opt1)
aggagaaagcuuaccaugggccagaucgugaccuucuuccaggaggucccccacgugaucgaggaggugaugaacaucguccugaucgcccucagcgugcuggccgugcugaaggggcucuacaacuucgcgaccugcggccuggucgggcuggugacguuccuccugcugugcggccgcuccugcaccaccagccucuacaaggggguguacgagcugcagacccuggagcucaacauggagacgcugaacaugaccaugccgcuguccugcaccaagaacaacagccaccacuacaucauggucggcaacgagaccggccucgagcugacgcugaccaacaccuccaucaucaaccacaaguucugcaaccucagcgacgcccacaagaagaaccuguacgaccacgcccugauguccaucaucagcaccuuccaccucuccauccccaacuucaaccaguacgaggccaugagcugcgacuucaacgggggcaagaucuccgugcaguacaaccugagccacuccuacgccggggacgcggccaaccacugcggcacgguggccaacgggguccugcagaccuucaugcggauggccuggggcggcagcuacaucgcgcucgacuccgggugcggcaacugggacugcaucaugaccagcuaccaguaccugaucauccagaacaccacgugggaggaccacugccaguucucccggcccagccccaucggguaccugggccuccugucccagcgcacccgggacaucuacaucagccgccggcugcucggcaccuucaccuggacgcugagcgacuccgaggggaaggacaccccgggcggguacugccugacccgcuggaugcucaucgaggccgagcugaagugcuucggcaacaccgccguggccaagugcaacgagaagcacgacgaggaguucugcgacaugcugcggcuguucgacuucaacaagcaggccauccagcgccugaaggcggaggcccagaugagcauccagcugaucaacaaggccgugaacgcccucaucaacgaccagcugaucaugaagaaccaccuccgggacaucaugugcauccccuacugcaacuacuccaaguacugguaccucaaccacacgaccaccggccgcaccagccugcccaagugcuggcuggucuccaacggcagcuaccucaacgagacgcacuucuccgacgacaucgagcagcaggccgacaacaugaucaccgagaugcugcagaaggaguacauggagcggcaggggaagacgccccugggccucguggaccuguucguguucagcaccuccuucuaccugaucagcaucuuccugcaccucgucaagaucccgacccaccgccacaucguggggaaguccugccccaagccccaccggcugaaccacaugggcaucugcagcugcgggcuguacaagcagcccggcgugccggucaaguggaagcgcugaggacuaguuauaagacugacuagcccgaugggccucccaacgggcccuccuccccuccuugcaccgagauuaaucaaaggcucuuuucagagccaccaaaaaaaaaaaaaaaaaaaaaaaaaaaaaaaaaaaaaaaaaaaaaaaaaaaaaaaaaaaaaaaaagaauu

SEQ ID NO: 36134 - RNA, 1655 nt, Artificial Sequence
  mRNA product Design i-3 (hSL-A64-N5) comprising derived and/or modified sequence from LASV(LP;Clade I)__AAF86701__GPCmut9 (opt1)
aggagaaagcuuaccaugggccagaucaucaccuucuuccaggaggugccccacgucaucgaggaggugaugaacaucgugcugaucgcccucagccugcuggccauccucaaggggcuguacaacaucgcgaccugcggcaucaucgggcuggucgccuuccucuuccugugcggcaaguccugcagccugacgcucaagggcggguacgagcugcagacccuggagcucaacauggagacccugaacaugaccaugccgcuguccugcacgaagaacagcucccaccacuacauccgcgugggcaacgagaccgggcucgagcugacccugaccaacacgagcaucaucaaccacaaguucugcaaccucuccgacgcccacaagaagaaccuguacgaccacgcccugaugagcaucaucuccaccuuccaccucagcauccccaacuucaaccaguacgaggccauguccugcgacuucaacggcgggaagaucagcgugcaguacaaccugucccacagcuacgcgggcgacgccgccgagcacugcgggaccgucgccaacggcgugcugcagaccuucaugcggauggcguggggcgggcgcuacaucgcccucgacuccggcugcgggaacugggacugcaucaugacgagcuaccaguaccugaucauccagaacaccaccugggaggaccacugccaguucucccggcccagccccaucggcuaccugggccuccugucccagcgcacccgggacaucuacaucagccgccggcugcucgggacguucaccuggacccugagcgacuccgagggcaacgagacccccgggggcuacugccugacgcgcuggaugcucaucgaggccgagcugaagugcuucgggaacaccgccguggccaagugcaacgagaagcacgacgaggaguucugcgacaugcugcggcuguucgacuucaacaagcaggcgauccgccggcugaaggccgaggcccagaugagcauccagcugaucaacaaggccgucaacgcccucaucaacgaccagcugaucaugaagaaccaccuccgcgacaucaugugcauccccuacugcaacuacuccaaguacugguaccucaaccacaccagcuccggccggaccagccugcccaagugcuggcugaucuccaacgggagcuaccucaacgagacgcaguucuccgacgacaucgagcagcaggcggacaacaugaucaccgagaugcugcagaaggaguacaucgagcgccagggcaagaccccgcuggggcucguggacaucuucaucuucagcaccuccuucuaccugaucagcaucuuccugcaccugaucaagaucccgacgcaccggcacaucgugggcaagcccugccccaagccccaccgccucaaccacaugggggucugcuccugcggccuguacaagcacccgggcgugcccaccaaguggaagcggugaggacuaguuauaagacugacuagcccgaugggccucccaacgggcccuccuccccuccuugcaccgagauuaaucaaaggcucuuuucagagccaccaaaaaaaaaaaaaaaaaaaaaaaaaaaaaaaaaaaaaaaaaaaaaaaaaaaaaaaaaaaaaaaaagaauu

SEQ ID NO: 36135 - RNA, 1655 nt, Artificial Sequence
  mRNA product Design i-3 (hSL-A64-N5) comprising derived and/or modified sequence from LASV(803213;Clade II)__AAF86703__GPCmut9 (opt1)
aggagaaagcuuaccaugggccagaucaucaccuucuuccaggaggugccccacgucaucgaggaggugaugaacaucgugcugaucgcccucagccugcuggccauccucaaggggaucuacaacgucgcgaccugcggccuguucgggcugaucuccuuccuccugcugugcggccgcagcugcuccgugacguacaaggggguguacgagcuccagacccuggagcugaacauggccaaccucaacaugaccaugccgcugagcugcaccaagaacaacucccaccacuacaucauggucggcaacgagacgggccuggagcucacccugaccaacaccagcaucaucaaccacaaguucugcaaccuguccgacgcccacaagaagaaccucuacgaccacgcccugaugagcaucaucuccacguuccaccugagcauccccaacuucaaccaguacgaggccauguccugcgacuucaacgggggcaagaucagcgugcaguacaaccucucccacagcuucgcgguggacgccgccaaccacugcgggaccaucgccaacggcguccugcagaccuucaugcggauggcguggggcggguccuacaucgcccuggacagcggcugcgggaacugggacugcaucaugaccuccuaccaguaccucaucauccagaacacgaccugggaggaccacugccaguucagccgccccucccccaucggcuaccuggggcugcucagccagcggacccgcgacaucuacaucagccggcgccugcugggcaccuucacguggacccucuccgacagcgagggcaacgaggcccccgggggcuacugccugacccgguggaugcugaucgaggccgagcucaagugcuucgggaacaccgccguggcgaagugcaacgagaagcacgacgaggaguucugcgacaugcugcgccuguucgacuucaacaagcaggccaucaagcggcucaagacggaggcccagauguccauccagcugaucaacaaggccgugaacgcccugaucaacgaccagcucaucaugaagaaccaccuccgcgacaucaugugcauccccuacugcaacuacagccgguacugguaccugaaccacaccgucaccgggaagaccucccugccccgcugcuggcuggugagcaacggcuccuaccugaacgagacgcacuucagcgacgacaucgagcagcaggcggacaacaugaucaccgagaugcuccagaaggaguacauggaccggcagggcaagaccccgcuggggcugguggaccucuucgucuucuccaccagcuucuaccugaucuccaucuuccugcaccuggugaagaucccgacgcaccgccacaucgugggcaagcccugccccaagccccaccggcucaaccacauggggaucugcagcugcggccuguacaagcacccggggguccccgugaaguggaagcgcugaggacuaguuauaagacugacuagcccgaugggccucccaacgggcccuccuccccuccuugcaccgagauuaaucaaaggcucuuuucagagccaccaaaaaaaaaaaaaaaaaaaaaaaaaaaaaaaaaaaaaaaaaaaaaaaaaaaaaaaaaaaaaaaaagaauu

SEQ ID NO: 36136 - RNA, 1655 nt, Artificial Sequence
  mRNA product Design i-3 (hSL-A64-N5) comprising derived and/or modified sequence from LASV(GA391;Clade III)__CAA36645__GPCmut9 (opt1)
aggagaaagcuuaccaugggccagaucgugaccuucuuccaggaggucccccacgugaucgaggaggugaugaacaucguccugaucgcccucagcauccuggccauccugaaggggcucuacaacguggcgaccugcggccugaucgggcuggugacguuccuccugcuguccggccgcagcugcucccucaucuacaaggggaccuacgagcugcagacccuggagcucaacauggagacccugaacaugacgaugccgcugagcugcaccaagaacaacucccaccacuacauccgggucggcaacgagaccggccucgagcugacccugacgaacaccagcauccucaaccacaaguucugcaaccuguccgacgcccacaagcgcaaccuguacgaccacagccucauguccaucaucagcaccuuccaccuguccauccccaacuucaaccaguacgaggccaugagcugcgacuucaacgggggcaagaucaccgugcaguacaaccugucccacagcuucgccguggacgccgcggggcacugcggcacgcucgccaacgggguccugcagaccuucaugcggauggccuggggcggcuccuacaucgcccuggacagcgggugcggcaacugggacugcaucaugaccuccuaccaguaccucaucauccagaacaccacgugggacgaccacugccaguucagccggcccucccccaucggguaccugggccugcucagccagcgcacccgggacaucuacaucagccgccggcugcugggcaccuucaccuggacgcucuccgacagcgaggggaacgagaccccgggcggguacugccugacccgcuggaugcugaucgaggcggagcucaagugcuucggcaacaccgccguggccaagugcaacgagaagcacgacgaggaguucugcgacaugcugcggcuguucgacuucaacaagcaggccauccgccggcucaagacggaggcccagauguccauccagcugaucaacaaggcggugaacgcccugaucaacgaccagcucaucaugaagaaccaccuccgcgacaucaugugcauccccuacugcaacuacagccgguacugguaccugaaccacaccuccaccggcaagaccagccugccccgcugcuggcugaucuccaacggcagcuaccugaacgagacgaaguucuccgacgacaucgagcagcaggccgacaacaugaucaccgagaugcuccagaaggaguacaucgaccggcaggggaagacgccccugggccuggucgaccuguucguguucagcaccuccuucuaccucaucagcaucuuccugcaccuggugaagaucccgacccaccgccacaucgucgggaagcccugccccaagccccaccggcucaaccacaugggcaucugcuccugcgggcuguacaagcagccgggcgugcccgugcgcuggaagcggugaggacuaguuauaagacugacuagcccgaugggccucccaacgggcccuccuccccuccuugcaccgagauuaaucaaaggcucuuuucagagccaccaaaaaaaaaaaaaaaaaaaaaaaaaaaaaaaaaaaaaaaaaaaaaaaaaaaaaaaaaaaaaaaaagaauu

SEQ ID NO: 36137 - RNA, 1658 nt, Artificial Sequence
  mRNA product Design i-3 (hSL-A64-N5) comprising derived and/or modified sequence from LASV(AV;Clade V)__CCA30314__GPCmut9 (opt1)
aggagaaagcuuaccaugggccagaucgugaccuucuuccaggaggucccccacgugaucgaggaggugaugaacaucguccugaucgcccucagcauccuggccgugcugaaggggcucuacaacaucgcgaccugcggccugaucgggcugaucacguuccuccugcugugcggccgcuccugcagcuccaaccucuacaaggggguguacgagcugcagagccuggaccucaacauggagacccugaacaugaccaugccgcuguccugcaccaagaacaacagccaccacuacauccgggucggcaacgacacgggccucgagcugacccugaccaacaccuccauccucaaccacaaguucugcaaccugagcgacgcccacaagaaggaccuguacgaccacgcccucauguccaucaucagcacguuccaccuguccauccccaacuucaaccaguacgaggccaugagcugcgacuucaacgggggcaagaucuccgugcaguacaaccugagccacuccuacgccaucgacgcggccaaccacugcgggaccguggccaacggcauccuccagaccuucaugcgcauggccuggggcgggagcuacaucgcgcuggacuccggcugcgggaacugggacugcaucaugaccagcuaccaguaccugaucauccagaacacgaccugggagaaccacugccaguucucccgccccagccccaucggcuaccucgggcugcugagccagcggacccgcgacaucuacaucucccggcgccuccugggcaccuucacguggacccugagcgacuccgagggcaacgccacccccgggggcuacugccucacccgguggaugcugaucgaggccgagcugaagugcuucgggaacacggccgucgccaagugcaacgagaagcacgacgaggaguucugcgacaugcuccgccuguucgacuucaacaagcaggcgaucagccggcugaaguccgaggcccagaugagcauccagcucaucaacaaggccgugaacgcccugaucaacgaccagcugaucaugaagaaccaccuccgcgacaucaugugcauccccuacugcaacuacuccaaguacugguaccugaaccacaccaucaccgggaagaccagccugcccaagugcuggcucguguccaacggcagcuaccugaacgagacgcacuucuccgacgacaucgagcagcaggccgacaacaugaucaccgagaugcugcagaaggaguacauggagcggcagggcaagaccccgcucgggcuggucgaccuguucguguucagcaccuccuucuaccugaucagcaucuuccuccgccuggugaagaucccgacgcaccggcacaucgucggcaagcccugccccaagccccaccgccugaaccacauggggaucugcuccugcggccucuacaagcagccgggggugcccgugcgguggaagcgcugaggacuaguuauaagacugacuagcccgaugggccucccaacgggcccuccuccccuccuugcaccgagauuaaucaaaggcucuuuucagagccaccaaaaaaaaaaaaaaaaaaaaaaaaaaaaaaaaaaaaaaaaaaaaaaaaaaaaaaaaaaaaaaaaagaauu

SEQ ID NO: 36138 - RNA, 1655 nt, Artificial Sequence
  mRNA product Design i-3 (hSL-A64-N5) comprising derived and/or modified sequence from LASV(Togo/2016/7082;Clade VI)__AMR44577__GPCmut9 (opt1)
aggagaaagcuuaccaugggccagaucaucaccuucuuccaggaggugccccacgucaucgaggaggugaugaacaucgugcugaucgcccucagccugcuggccauccucaagggggucuacaacguggcgaccugcggcaucaucgggcuggugacguuccuguuccucugcggccgcuccugcagccugaucuacaagggguccuacgagcugcagacccucgagcugaacauggagacccugaacaugaccaugccgcucagcugcacgaagaacuccagccaccacuacauccgggucggcaacgagaccggccuggagcugacccucaccaacacguccaucaucaaccacaaguucugcaaccugagcgacgcccacaagcgcaaccuguacgaccacgcccucauguccauccugagcaccuuccaccuguccauccccaacuucaaccaguacgaggccaugagcugcgacuucaacgggggcaagaucuccgugcaguacaaccucagccacgccuacgcgguggacgccgccgagcacugcgggaccgucgccaacggcgugcugcagaccuucaugcggauggcguggggcggguccuacaucgcccuggacagcggcugcgggaacugggacugcaucaugacguccuaccaguaccucaucauccagaacaccaccugggaggaccacugccaguucagccggcccucccccaucggcuaccuggggcugcucagccagcgcacccgggacaucuacaucagccgccggcugcugggcacguucaccuggacccucuccgacagcgagggcaacgagacccccgggggcuacugccugacgcgcuggaugcugaucgaggccgagcucaagugcuucgggaacaccgccguggccaagugcaacgagaagcacgacgaggaguucugcgacaugcugcggcuguucgacuucaacaagcaggcgauccagcgccucaaguccgaggcccagaugagcauccagcugaucaacaaggccgucaacgcccugaucaacgaccagcucaucaugaagaaccaccuccgggacaugaugugcauccccuacugcaacuacuccaaguacugguaccugaaccacaccagcuccgggcgcaccagccugcccaagugcuggcugguguccaacggcagcuaccugaacgagacgcacuucuccgacgacaucgagcagcaggccgacaacaugaucaccgagaugcuccagaaggaguacaucgaccggcagggcaagaccccgcuggggcugguggaccucuucgucuucagcaccuccuucuaccugaucagcaucuuccugcaccugaucaagaucccgacgcaccgccacaucgugggcaagcccugccccaagccccaccggcucaaccacauggggaucugcuccugcggccuguacaagcagccgggggugcccacccgcuggaagcggugaggacuaguuauaagacugacuagcccgaugggccucccaacgggcccuccuccccuccuugcaccgagauuaaucaaaggcucuuuucagagccaccaaaaaaaaaaaaaaaaaaaaaaaaaaaaaaaaaaaaaaaaaaaaaaaaaaaaaaaaaaaaaaaaagaauu

SEQ ID NO: 36139 - RNA, 1655 nt, Artificial Sequence
  mRNA product Design i-3 (hSL-A64-N5) comprising derived and/or modified sequence from LASV(KAK-428;Clade n.d. (VII))__ANH09740__GPCmut9 (opt1)
aggagaaagcuuaccaugggccagaucgugaccuucuuccaggaggucccccacgugaucgaggaggugaugaacaucguccugaucgcccucagccugcuggccauccucaaggggcuguacaacuucgcgaccugcggcgugaucgggcugaucacguuccuccugcugugcggccgcuccugcagcgccaccuacaaggggcaguacgagcuccagacccuggagcugaacauggagucccucaacaugaccaugccgcugagcugcacgaagaacaacucccaccacuacauccgggccggcaacaacaccggccuggagcucacccugaccaacacgagcaucaucucccacaaguucugcaaccugagcgacgcccacaagaagaaccucuacgaccacacccugauguccaucaucaccaccuuccaccugagcauccccaacuucaaccaguacgaggccauguccugcgacuucaacgggggcaagaucagcauccaguacaaccucucccacagcuacgcgggggacgccgcccagcacugcggcacgguggccaacgggguccugcagaccuucaugcgcauggcguggggcggcuccuaccuggcccucgacagcgggugccgcggcugggacugcaucaucuccagcuaccaguaccugaucauccagaacaccaccugggacgaccacugccaguucucccggcccagccccaucggguaccugggcuucgugagccagaagacgcgcgacaucuacaucucccggcgccuccugggcaccuucaccuggacccugagcgacuccgaggggcacgacaugccgggcggguacugccucacgcgguggaugcugaucgaggccgaccugaagugcuucggcaacaccgccguggccaagugcaacgagaagcacgacgaggaguucugcgacauguggcgccucuucgacuucaacaagcaggcgauccagcggcugaaggccgaggcccagaugaacauccagcugaucaacaaggccgucaacgcccucaucaacgaccagcugaugaugaagaaccaccuccgcgacaucaugugcauccccuacugcaacuacagcaaguucugguaccugaacaacaccaccacgggccggaccucccugccccgcugcuggcugaucagcaacggcuccuaccucaacgagacccacuucagcgacgacaucgagcagcaggcggacaacaugaucaccgagaugcugcagaaggaguacauggaccggcaggggaagacgccccugggccucguggaccuguucguguucuccaccagcuucuaccugaucaccaucuuccuccaccuggucaagaucccgacccaccgccacaucguggggaagcccugccccaagccccaccggcugaaccacaugggcaucugcuccugcgggcuguacaagcagccgggcgugcccguccgcuggaagcggugaggacuaguuauaagacugacuagcccgaugggccucccaacgggcccuccuccccuccuugcaccgagauuaaucaaaggcucuuuucagagccaccaaaaaaaaaaaaaaaaaaaaaaaaaaaaaaaaaaaaaaaaaaaaaaaaaaaaaaaaaaaaaaaaagaauu

SEQ ID NO: 36140 - RNA, 1655 nt, Artificial Sequence; identical to SEQ ID NO: 36134
  mRNA product Design i-3 (hSL-A64-N5) comprising derived and/or modified sequence from LASV(Pinneo-NIG-1969;Clade I)__AIT17836__GPCmut9 (opt1)

SEQ ID NO: 36141 - RNA, 1655 nt, Artificial Sequence
  mRNA product Design i-3 (hSL-A64-N5) comprising derived and/or modified sequence from LASV(ISTH0009-NIG-2011;Clade II)__AIT17404__GPCmut9 (opt1)
aggagaaagcuuaccaugggccagaucaucaccuucuuccaggaggugccccacgucaucgaggaggugaugaacaucgugcugaucgcccucagccugcuggccauccucaaggggaucuacaacgucgcgaccugcggccuguucgggcugguguccuuccuccugcugugcggccgcagcugcuccacgaccuacaaggggguguacgagcuccagacccuggagcuggacauggccagccucaacaugaccaugccgcuguccugcacgaagaacaacagccaccacuacaucauggucggcaacgagaccggccuggagcucacccugaccaacacguccaucaucaaccacaaguucugcaaccugagcgacgcccacaagaagaaccucuacgaccacgcccugauguccaucaucagcaccuuccaccuguccauccccaacuucaaccaguacgaggccaugagcugcgacuucaacgggggcaagaucuccgugcaguacaaccucagccacgcguacgccguggacgccgccaaccacugcgggaccaucgcgaacggcguccugcagaccuucaugcggauggccuggggcggguccuacaucgcccuggacagcggcugcggguccugggacugcaucaugacgagcuaccaguaccucaucauccagaacaccaccugggaggaccacugccaguucucccgccccagccccaucggcuaccuggggcugcucagccagcggacccgcgacaucuacaucucccggcgccugcugggcacguucaccuggacccucagcgacuccgagggcaacgagacccccgggggcuacugccugacgcgguggaugcugaucgaggccgagcucaagugcuucgggaacaccgccguggcgaagugcaacgagaagcacgacgaggaguucugcgacaugcugcgccuguucgacuucaacaagcaggccauccggcgccucaagaccgaggcccagaugagcauccagcugaucaacaaggccgugaacgcccugaucaacgaccagcucaucaugaagaaccaccuccgggacaucaugugcaucccguacugcaacuacuccaaguacugguaccugaaccacaccgucacggggaagaccagccugccccgcugcuggcugguguccaacggcagcuaccugaacgagacccacuucuccgacgacaucgagcagcaggcggacaacaugaucaccgagcuccugcagaaggaguacauggaccggcagggcaagacgccccuggggcucguggaccuguucgucuucagcaccuccuucuaccugaucagcaucuuccugcaccucaucaagaucccgacccaccgccacaucaccggcaagcccugccccaagccccaccggcugaaccacauggggaucugcuccugcggccuguacaagcacccgggggugcccgugaaguggaagcgcugaggacuaguuauaagacugacuagcccgaugggccucccaacgggcccuccuccccuccuugcaccgagauuaaucaaaggcucuuuucagagccaccaaaaaaaaaaaaaaaaaaaaaaaaaaaaaaaaaaaaaaaaaaaaaaaaaaaaaaaaaaaaaaaaagaauu

SEQ ID NO: 36142 - RNA, 1655 nt, Artificial Sequence
  mRNA product Design i-3 (hSL-A64-N5) comprising derived and/or modified sequence from LASV(ISTH2010-NIG-2012;Clade II)__AIT17482__GPCmut9 (opt1)
aggagaaagcuuaccaugggccagaucaucaccuucuuccaggaggugccccacgucaucgaggaggugaugaacaucgugcugaucgcccucagccugcuggccauccucaaggggaucuacaacgucgcgaccugcggccuguucgggcugguguccuuccuccugcugugcggccgcagcugcuccacgaccuacaaggggguguacgagcuccagacccuggagcuggacauggccagccucaacaugaccaugccgcuguccugcacgaagaacaacagccaccacuacaucauggucggcaacgagaccggccuggagcucacccugaccaacacguccaucaucaaccacaaguucugcaaccugagcgacgcccacaagaagaaccucuacgaccacgcccugauguccaucaucagcaccuuccaccuguccauccccaacuucaaccaguacgaggccaugagcugcgacuucaacgggggcaagaucuccgugcaguacaaccucagccacgcguacgccguggacgccgccaaccacugcgggaccaucgcgaacggcguccugcagaccuucaugcggauggccuggggcggguccuacaucgcccuggacagcggcugcggguccugggacugcaucaugacgagcuaccaguaccucaucauccagaacaucaccugggaggaccacugccaguucucccgccccagccccaucggcuaccuggggcugcucagccagcggacccgcgacaucuacaucucccggcgccugcugggcaccuucacguggacccucagcgacuccgagggcaacgagacccccgggggcuacugccugacccgguggaugcugaucgaggccgagcucaagugcuucgggaacacggccguggcgaagugcaacgagaagcacgacgaggaguucugcgacaugcugcgccuguucgacuucaacaagcaggccauccggcgccucaagaccgaggcccagaugagcauccagcugaucaacaaggccgugaacgcccugaucaacgaccagcucaucaugaagaaccaccuccgggacaucaugugcauccccuacugcaacuacuccaaguacugguaccugaaccacaccgucaccgggaagacgagccugccccgcugcuggcugguguccaacggcagcuaccugaacgagacccacuucuccgacgacaucgagcagcaggcggacaacaugaucaccgagcuccugcagaaggaguacaucgaccggcagggcaagaccccgcuggggcucguggaccuguucgucuucagcacguccuucuaccugaucagcaucuuccugcaccucgugaagaucccgacccaccgccacguggucggcaagcccugccccaagccccaccggcugaaccacauggggaucugcuccugcggccuguacaagcacccgggggugcccgugaaguggaagcgcugaggacuaguuauaagacugacuagcccgaugggccucccaacgggcccuccuccccuccuugcaccgagauuaaucaaaggcucuuuucagagccaccaaaaaaaaaaaaaaaaaaaaaaaaaaaaaaaaaaaaaaaaaaaaaaaaaaaaaaaaaaaaaaaaagaauu

SEQ ID NO: 36143 - RNA, 1655 nt, Artificial Sequence
  mRNA product Design i-3 (hSL-A64-N5) comprising derived and/or modified sequence from LASV(Lassa virus/H.sapiens-wt/NGA/2015/ISTH_0543;Clade II)__AVO03639__GPCmut9 (opt1)
aggagaaagcuuaccaugggccagaucaucaccuucuuccaggaggugccccacgucaucgaggaggugaugaacaucgugcugaucgcccucagccugcuggccauccucaaggggaucuacaacgucgcgaccugcggccuguucgggcugguguccuuccuccugcugugcggccgcagcugcuccacgaccuacaaggggguguacgagcuccagacccuggagcuggacauggccaaccucaacaugaccaugccgcugagcugcacgaagaacaacucccaccacuacaucauggucggcaacgagaccggccuggagcucacccugaccaacacgagcaucaucaaccacaaguucugcaaccuguccgacgcccacaagaagaaccucuacgaccacgcccugaugagcaucaucuccaccuuccaccugagcauccccaacuucaaccaguacgaggccauguccugcgacuucaacgggggcaagaucagcgugcaguacaaccucucccacaccuacgcgguggacgccgccaaccacugcgggaccaucgccaacggcguccugcagacguucaugcggauggcguggggcgggagcuacaucgcccuggacuccggcugcgggagcugggacugcaucaugaccuccuaccaguaccucgugauccagaacaccaccugggaggaccacugccaguucagccgccccucccccaucggcuaccuggggcugcucagccagcggacgcgcgacaucuacaucagccggcgccugcugggcaccuucaccuggacccucuccgacagcgagggcaacgagacgcccgggggcuacugccugacccgguggaugcugaucgaggccgagcucaagugcuucgggaacaccgccguggccaagugcaacgagaagcacgacgaggaguucugcgacaugcugcgccuguucgacuucaacaagcaggcgauccggcgccucaagaccgaggcccagauguccauccagcugaucaacaaggccgucaacgcccugaucaacgaccagcucaucaugaagaaccaccuccgggacaucaugugcauccccuacugcaacuacagcaaguacugguaccugaaccacacggugaccgggaagaccucccugccccgcugcuggcuggugagcaacggcuccuaccugaacgagacccacuucagcgacgacaucgagcagcaggccgacaacaugaucacggagcuccugcagaaggaguacaucgaccggcagggcaagaccccgcuggggcucgucgaccuguucguguucuccaccagcuucuaccugaucuccaucuuccugcaccucgugaagaucccgacccaccgccacaucacgggcaagcccugccccaagccccaccggcugaaccacauggggaucugcagcugcggccuguacaagcacccggggguccccgugaaguggaagcgcugaggacuaguuauaagacugacuagcccgaugggccucccaacgggcccuccuccccuccuugcaccgagauuaaucaaaggcucuuuucagagccaccaaaaaaaaaaaaaaaaaaaaaaaaaaaaaaaaaaaaaaaaaaaaaaaaaaaaaaaaaaaaaaaaagaauu

SEQ ID NO: 36144 - RNA, 1655 nt, Artificial Sequence
  mRNA product Design i-3 (hSL-A64-N5) comprising derived and/or modified sequence from LASV(Lassa virus/H.sapiens-wt/NGA/2016/ISTH_0009;Clade II)__AVO03571__GPCmut9 (opt1)
aggagaaagcuuaccaugggccagaucaucaccuucuuccaggaggugccccacgucaucgaggaggugaugaacaucgugcugaucgcccucagccugcuggccauccucaaggggaucuacaacgucgcgaccugcggccugcuggggcucguguccuuccugcugcucugcggccgcagcugcuccacgaccuacaaggggguguacgagcugcagacccuggagcucgacauggccagccugaacaugaccaugccgcuguccugcacgaagaacaacagccaccacuacaucauggucggcaacgagaccggccucgagcugacccugaccaacacguccaucaucaaccacaaguucugcaaccucagcgacgcccacaagaagaaccuguacgaccacgcccugauguccaucaucagcaccuuccaccucuccauccccaacuucaaccaguacgaggccaugagcugcgacuucaacgggggccggaucuccgugcaguacaaccugagccacuccuacgcgguggacgccgccaaccacugcgggaccaucgccaacggcguccugcagaccuucaugcgcauggcguggggcgggagcuacaucgcccucgacuccggcugcgggagcugggacugcaucaugacguccuaccaguaccugaucauccagaacaccaccugggaggaccacugccaguucagccggcccagccccaucggcuaccuggggcuccugucccagcgcacccgggacaucuacaucagccgccggcugcucggcacguucaccuggacccuguccgacagcgagggcaacgagacccccgggggcuacugccugacgcgcuggaugcucaucgaggccgagcugaagugcuucgggaacaccgccguggccaagugcaacgagaagcacgacgaggaguucugcgacaugcugcggcuguucgacuucaacaagcaggcgauccgccggcugaagaccgaggcccagauguccauccagcugaucaacaaggccgugaacgcccucaucaacgaccagcugaucaugaagaaccaccuccgcgacaucaugugcaucccguacugcaacuacagcaaguacugguaccucaaccacaccgucacggggaagaccucccugccccggugcuggcuggugagcaacggcuccuaccucaacgagacccacuucagcgacgacaucgagcagcaggccgacaacaugaucaccgagcugcugcagaaggaguacaucgaccgccagggcaagacgccccucgggcugguggaccuguucgucuucuccaccagcuucuaccugaucuccaucuuccuccaccuggugaagaucccgacccaccggcacaucaccggcaagcccugccccaagccccaccgccugaaccacauggggaucugcagcugcggccucuacaaccacccgggggugcccgucaaguggaagcggugaggacuaguuauaagacugacuagcccgaugggccucccaacgggcccuccuccccuccuugcaccgagauuaaucaaaggcucuuuucagagccaccaaaaaaaaaaaaaaaaaaaaaaaaaaaaaaaaaaaaaaaaaaaaaaaaaaaaaaaaaaaaaaaaagaauu

SEQ ID NO: 36145 - RNA, 1655 nt, Artificial Sequence
  mRNA product Design i-3 (hSL-A64-N5) comprising derived and/or modified sequence from LASV(Lassa virus/H.sapiens-wt/NGA/2016/ISTH_0017;Clade II)__AVO03567__GPCmut9 (opt1)
aggagaaagcuuaccaugggccagaucaucaccuucuuccaggaggugccccacgucaucgaggaggugaugaacaucgugcugaucgcccucagccugcuggccauccucaaggggaucuacaacgucgcgaccugcggccuguucgggcugguguccuuccuccugcugugcggccgcagcugcuccacgaccuacaaggggguguacgagcuccagacccuggagcuggacauggccagccucaacaugaccaugccgcuguccugcacgaagaacaacagccaccacuacaucauggucggcaacgagaccggccuggagcucacccugaccaacacguccaucaucaaccacaaguucugcaaccugagcgacgcccacaagaagaaccucuacgaccacgcccugauguccaucaucagcaccuuccaccuguccauccccaacuucaaccaguacgaggccaugagcugcgacuucaacgggggcaagaucuccgugcaguacaaccucagccacaccuacgcgaucgacgccgccaaccacugcgggaccaucgccaacggcgugcugcagacguucaugcggauggcguggggcggguccuacaucgcccuggacagcggcugcggguccugggacugcaucaugaccagcuaccaguaccucaucauccagaacaccaccugggaggaccacugccaguucucccgccccagccccaucggcuaccuggggcugcucagccagcggacgcgcgacaucuacaucucccggcgccugcugggcaccuucaccuggacccucagcgacuccgagggcaacgagacgcccgggggcuacugccugacccgguggaugcugaucgaggccgagcucaagugcuucgggaacaccgccgucgccaagugcaacgagaagcacgacgaggaguucugcgacaugcugcgccuguucgacuucaacaagcaggcgauccggcgccucaagaccgaggcccagaugagcauccagcugaucaacaaggccgugaacgcccugaucaacgaccagcucaucaugaagaaccaccuccgggacaucaugugcauccccuacugcaacuacuccaaguacugguaccugaaccacacggugaccgggaagaccagccugccccgcugcuggcuggucuccaacggcagcuaccugaacgagacccacuucuccgacgacaucgagcagcaggccgacaacaugaucacggagcuccugcagaaggaguacauggaccggcagggcaagaccccgcuggggcucguggaccuguucguguucagcaccuccuucuaccugaucagcaucuuccugcaccucguccgcaucccgacccaccggcacgugaucggcaagcccugccccaagccccaccgccugaaccacauggggaucugcuccugcggccuguacaagcacccgggggugcccgucaaguggaagcggugaggacuaguuauaagacugacuagcccgaugggccucccaacgggcccuccuccccuccuugcaccgagauuaaucaaaggcucuuuucagagccaccaaaaaaaaaaaaaaaaaaaaaaaaaaaaaaaaaaaaaaaaaaaaaaaaaaaaaaaaaaaaaaaaagaauu

SEQ ID NO: 36146 - RNA, 1655 nt, Artificial Sequence
  mRNA product Design i-3 (hSL-A64-N5) comprising derived and/or modified sequence from LASV(Lassa virus/H.sapiens-wt/NGA/2018/ISTH_0959;Clade II)__AVV65099__GPCmut9 (opt1)
aggagaaagcuuaccaugggccagaucaucaccuucuuccaggaggugccccacgucaucgaggaggugaugaacaucgugcugaucgcccucagccugcuggccauccucaaggggaucuacaacgucgugaccugcggccuguucgggcugguguccuuccuccugcugugcggccgcagcugcuccacgaccuacaagggggucuacgagcuccagacccuggagcuggacauggcgagccucaacaugaccaugccgcuguccugcacgaagaacaacagccaccacuacaucauggugggcaacgagaccggccuggagcucacccugaccaacacguccaucaucaaccacaaguucugcaaccugagcgacgcccacaagaagaaccucuacgaccacgcccugauguccaucaucagcaccuuccaccuguccauccccaacuucaaccaguacgaggccaugagcugcgacuucaacgggggcaagaucuccgugcaguacaaccucagccacgccuacgcgaucgacgccgccaaccacugcgggaccaucgccaacggcguccugcagaccuucaugcggauggcguggggcggguccuacaucgcccuggacagcggcugcggguccugggacugcaucaugacgagcuaccaguaccucaucauccagaacaccaccugggaggaccacugccaguucucccgccccagccccaucggcuaccuggggcugcucagccagcggacccgcgacaucuacaucucccggcgccugcugggcacguucaccuggacccucagcgacuccgagggcaacgagacccccgggggcuacugccugacgcgguggaugcugaucgaggccgagcucaagugcuucgggaacaccgccguggccaagugcaacgagaagcacgacgaggaguucugcgacaugcugcgccuguucgacuucaacaagcaggcgauccggcgccucaagaccgaggcccagaugagcauccagcugaucaacaaggccgugaacgcccugaucaacgaccagcucaucaugaagaaccaccuccgggacaucaugugcaucccguacugcaacuacuccaaguacugguaccugaaccacaccgucacggggaagaccagccugccccgcugcuggcugguguccaacggcagcuaccugaacgagacccacuucuccgacgacaucgagcagcaggccgacaacaugaucaccgagcuccugcagaaggaguacaucgaccggcagggcaagacgccccuggggcucguggaccuguucgucuucagcaccuccuucuaccugaucagcaucuuccugcaccucgugaagaucccgacccaccgccacgugaucggcaagcccugccccaagccccaccggcugaaccacauggggaucugcuccugcggccuguacaagcacccggggguccccgugaaguggaagcgcugaggacuaguuauaagacugacuagcccgaugggccucccaacgggcccuccuccccuccuugcaccgagauuaaucaaaggcucuuuucagagccaccaaaaaaaaaaaaaaaaaaaaaaaaaaaaaaaaaaaaaaaaaaaaaaaaaaaaaaaaaaaaaaaaagaauu

SEQ ID NO: 36147 - RNA, 1655 nt, Artificial Sequence
  mRNA product Design i-3 (hSL-A64-N5) comprising derived and/or modified sequence from LASV(LASV003-NIG-2008;Clade II)__AIT17580__GPCmut9 (opt1)
aggagaaagcuuaccaugggccagaucaucaccuucuuccaggaggugccccacgucaucgaggaggugaugaacaucgugcugaucgcccucagccugcuggccauccucaaggggaucuacaacgucgcgaccugcggccuguucgggcugguguccuuccuccugcugugcggccgcagcugcuccacgaccuacaaggggguguacgagcuccagacccuggagcuggacauggccagccucaacaugaccaugccgcuguccugcacgaagaacaacagccaccacuacaucauggucggcaacgagaccggccuggagcucacccugaccaacacguccaucaucaaccacaaguucugcaaccugagcgacgcccacaagaagaaccucuacgaccacgcccugauguccaucaucagcaccuuccaccuguccauccccaacuucaaccaguacgaggccaugagcugcgacuucaacgggggcaagaucuccgugcaguacaaccucagccacaccuacgcgguggacgccgccaaccacugcgggaccaucgccaacggcguccugcagacguucaugcggauggcguggggcggguccuacaucgcccuggacagcggcugcggguccugggacugcaucaugaccagcuaccaguaccucaucauccagaacaccaccugggaggaccacugccaguucucccgccccagccccaucggcuaccuggggcugcucagccagcggacgcgcgacaucuacaucucccggcgccugcugggcaccuucaccuggacccucagcgacuccgagagcaacgagacgccgggcggguacugccugacccgguggaugcugaucgaggccgagcucaagugcuucggcaacaccgccguggccaagugcaacgagaagcacgacgaggaguucugcgacaugcugcgccuguucgacuucaacaagcaggcgauccggcgccucaaggccgaggcccagauguccauccagcugaucaacaaggccgugaacgcccugaucaacgaccagcucaucaugaagaaccaccuccgggacaucaugugcauccccuacugcaacuacagcaaguacugguaccugaaccacaccgucacgggccgcaccucccugccccggugcuggcuggugagcaacggguccuaccugaacgagacccacuucagcgacgacaucgagcagcaggcggacaacaugaucaccgagcuccugcagaaggaguacauggaccgccagggcaagacgccccugggccucguggaccuguucgucuucuccaccagcuucuaccugaucuccaucuuccugcaccucgugaagaucccgacccaccggcacgugaucgggaagcccugccccaagccccaccgccugaaccacaugggcaucugcagcugcgggcuguacaagcacccgggcguccccgugaaguggaagcggugaggacuaguuauaagacugacuagcccgaugggccucccaacgggcccuccuccccuccuugcaccgagauuaaucaaaggcucuuuucagagccaccaaaaaaaaaaaaaaaaaaaaaaaaaaaaaaaaaaaaaaaaaaaaaaaaaaaaaaaaaaaaaaaaagaauu

SEQ ID NO: 36148 - RNA, 1655 nt, Artificial Sequence
  mRNA product Design i-3 (hSL-A64-N5) comprising derived and/or modified sequence from LASV(LASV035-NIG-2009;Clade II)__AIT17588__GPCmut9 (opt1)
aggagaaagcuuaccaugggccagaucaucaccuucuuccaggaggugccccacgucaucgaggaggugaugaacaucgugcugaucgcccucagccugcuggccauccucaaggggaucuacaacgucgcgaccugcggccuguucgggcugguguccuuccuccugcugugcggccgcagcugcuccacgaccuacaaggggguguacgagcuccagacccuggagcuggacauggccagccucaacaugaccaugccgcuguccugcacgaagaacaacagccaccacuacaucauggucggcaacgagaccggccuggagcucacccugaccaacacguccaucaucaaccacaaguucugcaaccugagcgacgcccacaagaagaaccucuacgaccacgcccugauguccaucaucagcaccuuccaccuguccauccccaacuucaaccaguacgaggccaugagcugcgacuucaacgggggcaagaucuccgugcaguacaaccucagccacgcguacgccguggacgccgccaaccacugcgggaccaucgcgaacggcguccugcagaccuucaugcggauggccuggggcggguccuacaucgcccuggacagcggcugcggguccugggacugcaucaugacgagcuaccaguaccucaucauccagaacaccaccugggaggaccacugccaguucucccgccccagccccaucggcuaccuggggcugcucagccagcggacccgcgacaucuacaucucccggcgccugcugggcacguucaccuggacccucagcgacuccgagggcaacgagacccccgggggcuacugccugacgcgguggaugcugaucgaggccgagcucaagugcuucgggaacaccgccguggcgaagugcaacgagaagcacgacgaggaguucugcgacaugcugcgccuguucgacuucaacaagcaggccauccggcgccucaaggccgaggcccagaugagcauccagcugaucaacaaggccgugaacgcgcugaucaacgaccagcucaucaugaagaaccaccuccgggacaucaugugcauccccuacugcaacuacuccaaguacugguaccugaaccacaccgucaccgggaagacgagccugccccgcugcuggcugguguccaacggcagcuaccugaacgagacccacuucuccgacgacaucgagcagcaggccgacaacaugaucaccgagcuccugcagaaggaguacaucgaccggcagggcaagaccccgcuggggcucguggaccuguucgucuucagcacguccuucuaccugaucagcaucuuccugcaccucgugaagaucccgacccaccgccacgugaucggcaagcccugccccaagccccaccggcugaaccacauggggaucugcuccugcggccuguacaagcacccggggguccccgugaaguggaagcgcugaggacuaguuauaagacugacuagcccgaugggccucccaacgggcccuccuccccuccuugcaccgagauuaaucaaaggcucuuuucagagccaccaaaaaaaaaaaaaaaaaaaaaaaaaaaaaaaaaaaaaaaaaaaaaaaaaaaaaaaaaaaaaaaaagaauu

SEQ ID NO: 36149 - RNA, 1655 nt, Artificial Sequence
  mRNA product Design i-3 (hSL-A64-N5) comprising derived and/or modified sequence from LASV(LASV1000-NIG-2009;Clade II)__AIT17782__GPCmut9 (opt1)
aggagaaagcuuaccaugggccagaucaucaccuucuuccaggaggugccccacgucaucgaggaggugaugaacaucgugcugaucgcccucagccugcuggccauccucaaggggaucuacaacgucgcgaccugcggccuguucgggcugguguccuuccuccugcugugcggccgcagcugcuccacgaccuacaaggggguguacgagcuccagacccuggagcuggacauggccagccucaacaugaccaugccgcuguccugcacgaagaacaacagccaccacuacaucauggucggcaacgagaccggccuggagcucacccugaccaacacguccaucaucaaccacaaguucugcaaccugagcgacgcccacaagaagaaccucuacgaccacgcccugauguccaucaucagcaccuuccaccuguccauccccaacuucaaccaguacgaggccaugagcugcgacuucaacgggggcaagaucuccgugcaguacaaccucagccacaccuacgcgguggacgccgccaaccacugcgggaccaucgccaacggcguccugcagacguucaugcggauggcguggggcggguccuacaucgcccuggacagcggcugcggguccugggacugcaucaugaccagcuaccaguaccucaucauccagaacaccaccugggaggaccacugccaguucucccgccccagccccaucggcuaccuggggcugcucagccagcggacgcgcgacaucuacaucucccggcgccugcugggcaccuucaccuggacccucagcgacuccgagggcaacgagacgcccgggggcuacugccugacccgguggaugcugaucgaggccgagcucaagugcuucgggaacaccgccguggccaagugcaacgagaagcacgacgaggaguucugcgacaugcugcgccuguucgacuucaacaagcaggcgaucaagcggcucaagaccgaggcccagaugagcauccagcugaucaacaaggccgugaacgcccugaucaacgaccagcucaucaugaagaaccaccuccgcgacaucaugugcauccccuacugcaacuacuccaaguacugguaccugaaccacacggucaccgggaagaccagccugccccggugcuggcugguguccaacggcagcuaccugaacgagacccacuucuccgacgacaucgagcagcaggccgacaacaugaucacggagcuccugcagaaggaguacaucgaccgccagggcaagaccccgcuggggcucguggaccuguucgucuucagcaccuccuucuaccugaucagcaucuuccugcaccucgugaagaucccgacccaccggcacguggucggcaagcccugccccaagccccaccgccugaaccacauggggaucugcuccugcggccuguacaagcacccgggggugcccgugaaguggaagcggugaggacuaguuauaagacugacuagcccgaugggccucccaacgggcccuccuccccuccuugcaccgagauuaaucaaaggcucuuuucagagccaccaaaaaaaaaaaaaaaaaaaaaaaaaaaaaaaaaaaaaaaaaaaaaaaaaaaaaaaaaaaaaaaaagaauu

SEQ ID NO: 36150 - RNA, 1655 nt, Artificial Sequence
  mRNA product Design i-3 (hSL-A64-N5) comprising derived and/or modified sequence from LASV(LASV221-NIG-2010;Clade II)__AIT17624__GPCmut9 (opt1)
aggagaaagcuuaccaugggccagaucaucaccuucuuccaggaggugccccacgucaucgaggaggugaugaacaucgugcugaucgcccucagccugcuggccauccucaaggggaucuacaacgucgcgaccugcggccuguucgggcugguguccuuccuccugcugugcggccgcagcugcuccacgaccuacaaggggguguacgagcuccagacccuggagcuggacauggccagccucaacaugaccaugccgcuguccugcacgaagaacaacagccaccacuacaucauggucggcaacgagaccggccuggagcucacccugaccaacacguccaucaucaaccacaaguucugcaaccugagcgacgcccacaagaagaaccucuacgaccacgcccugauguccaucaucagcaccuuccaccuguccauccccaacuucaaccaguacgaggccaugagcugcgacuucaacgggggcaagaucuccgugcaguacaaccucagccacaccuacgcgaucgacgccgccaaccacugcgggaccaucgccaacggcgugcugcagacguucaugcggauggcguggggcggguccuacaucgcccuggacagcggcugcggguccugggacugcaucaugaccagcuaccaguaccucaucauccagaacaccaccugggaggaccacugccaguucucccgccccagccccaucggcuaccuggggcugcucagccagcggacgcgcgacaucuacaucucccggcgccugcugggcaccuucaccuggacccucagcgacuccgagggcaacgagacgcccgggggcuacugccugacccgguggaugcugaucgaggccgagcucaagugcuucgggaacaccgccgucgccaagugcaacgagaagcacgacgaggaguucugcgacaugcugcgccuguucgacuucaacaagcaggcgauccggcgccucaagaccgaggcccagaugagcauccagcugaucaacaaggccgugaacgcccugaucaacgaccagcucaucaugaagaaccaccuccgggacaucaugugcauccccuacugcaacuacuccaaguacugguaccugaaccacacggugaccgggaagaccagccugccccgcugcuggcuggucuccaacggcagcuaccugaacgagacccacuucuccgacgacaucgagcagcaggccgacaacaugaucacggagaugcuccagaaggaguacauggaccggcagggcaagaccccgcuggggcugguggaccucuucguguucagcaccuccuucuaccugaucagcaucuuccugcaccuggucaagaucccgacccaccgccacgugaucggcaagcccugccccaagccccaccggcucaaccacauggggaucugcuccugcggccuguacaagcacccgggggugcccgucaaguggaagcgcugaggacuaguuauaagacugacuagcccgaugggccucccaacgggcccuccuccccuccuugcaccgagauuaaucaaaggcucuuuucagagccaccaaaaaaaaaaaaaaaaaaaaaaaaaaaaaaaaaaaaaaaaaaaaaaaaaaaaaaaaaaaaaaaaagaauu

SEQ ID NO: 36151 - RNA, 1655 nt, Artificial Sequence
  mRNA product Design i-3 (hSL-A64-N5) comprising derived and/or modified sequence from LASV(LASV237-NIG-2010;Clade II)__AIT17638__GPCmut9 (opt1)
aggagaaagcuuaccaugggccagaucaucaccuucuuccaggaggugccccacgucaucgaggaggugaugaacaucgugcugaucgcccucagccugcuggccauccucaaggggaucuacaacgucgcgaccugcggccuguucgggcugguguccuuccuccugcugugcggccgcagcugcuccacgaccuacaaggggguguacgagcuccagacccuggagcuggacauggccagccucaacaugaccaugccgcuguccugcacgaagaacaacagccaccacuacaucauggucggcaacgagaccggccuggagcucacccugaccaacacguccaucaucaaccacaaguucugcaaccugagcgacgcccacaagaaggaccucuacgaccacgcccugauguccaucaucagcaccuuccaccuguccauccccaacuucaaccaguacgaggccaugagcugcgacuucaacgggggcaagaucuccgugcaguacaaccucagccacaccuacgcgguggacgccgccaaccacugcgggaccaucgccaacggcguccugcagacguucaugcggauggcguggggcggguccuacaucgcccuggacagcggcugcggguccugggacugcaucaugaccagcuaccaguaccucaucauccagaacaccaccugggaggaccacugccaguucucccgccccagccccaucggcuaccuggggcugcucagccagcggacgcgcgacaucuacaucucccggcgccugcugggcaccuucaccuggacccucagcgacuccgagggcaacgagacgcccgggggcuacugccugacccgguggaugcugaucgaggccgagcucaagugcuucgggaacaccgccguggccaagugcaacgagaagcacgacgaggaguucugcgacaugcugcgccuguucgacuucaacaagcaggcgauccggcgccucaagaccgaggcccagaugagcauccagcugaucaacaaggccgugaacgcccugaucaacgaccagcucaucaugaagaaccaccuccgggacaucaugugcauccccuacugcaacuacuccaaguacugguaccugaaccacacggucaccgggaagaccagccugccccgcugcuggcugguguccaacggcagcuaccugaacgagacccacuucuccgacgacaucgagcagcaggccgacaacaugaucacggagcuccugcagaaggaguacauggaccggcagggcaagaccccgcuggggcucguggaccuguucgucuucagcaccuccuucuaccugaucagcaucuuccugcaccucaucaagaucccgacccaccgccacaucacgggcaagcccugccccaagccccaccggcugaaccacauggggaucugcuccugcggccuguacaagcacccgggggugcccgugaaguggaagcgcugaggacuaguuauaagacugacuagcccgaugggccucccaacgggcccuccuccccuccuugcaccgagauuaaucaaaggcucuuuucagagccaccaaaaaaaaaaaaaaaaaaaaaaaaaaaaaaaaaaaaaaaaaaaaaaaaaaaaaaaaaaaaaaaaagaauu

SEQ ID NO: 36152 - RNA, 1655 nt, Artificial Sequence
  mRNA product Design i-3 (hSL-A64-N5) comprising derived and/or modified sequence from LASV(LASV253-NIG-2011;Clade II)__AIT17670__GPCmut9 (opt1)
aggagaaagcuuaccaugggccagaucaucaccuucuuccaggaggugccccacgucaucgaggaggugaugaacaucgugcugaucgcccucagccugcuggccauccucaaggggaucuacaacgucgcgaccugcggccuguucgggcugguguccuuccuccugcugugcggccgcagcugcuccacgaccuacaaggggguguacgagcuccagacccuggagcuggacauggccagccucaacaugaccaugccgcuguccugcacgaagaacaacagccaccacuacaucauggucggcaacgagaccggccuggagcucacccugaccaacacguccaucaucaaccacaaguucugcaaccugagcgacgcccacaagaagaaccucuacgaccacgcccugauguccaucaucagcaccuuccaccuguccauccccaacuucaaccaguacgaggccaugagcugcgacuucaacgggggcaagaucuccgugcaguacaaccucagccacaccuacgcgguggacgccgccaaccacugcgggaccaucgccaacggcguccugcagacguucaugcggauggcguggggcggguccuacaucgcccuggacagcggcugcggguccugggacugcaucaugaccagcuaccaguaccucaucauccagaacaccaccugggaggaccacugccaguucucccgccccagccccaucggcuaccuggggcugcucagccagcggacgcgcgacaucuacaucucccggcgccugcugggcaccuucaccuggacccucagcgacuccgagggcaacgagacgcccgggggcuacugccugacccgguggaugcugaucgaggccgagcucaagugcuucgggaacaccgccguggccaagugcaacgagaagcacgacgaggaguucugcgacaugcugcgccuguucgacuucaacaagcaggcgauccggcgccucaaggccgaggcccagaugagcauccagcugaucaacaaggccgugaacgcccugaucaacgaccagcucaucaugaagaaccaccuccgggacaucaugugcaucccguacugcaacuacuccaaguacugguaccugaaccacaccgucacggggcgcaccagccugccccggugcuggcugguguccaacggcagcuaccugaacgagacccacuucuccgacgacaucgagcagcaggcggacaacaugaucaccgagcuccugcagaaggaguacaucgaccgccagggcaagacgccccuggggcucguggaccuguucgucuucagcaccuccuucuaccugaucagcaucuuccugcaccucgugaagaucccgacccaccggcacaucaucggcaagcccugccccaagccccaccgccugaaccacauggggaucugcuccugcggccuguacaagcacccgggggugcccgucaaguggaagcggugaggacuaguuauaagacugacuagcccgaugggccucccaacgggcccuccuccccuccuugcaccgagauuaaucaaaggcucuuuucagagccaccaaaaaaaaaaaaaaaaaaaaaaaaaaaaaaaaaaaaaaaaaaaaaaaaaaaaaaaaaaaaaaaaagaauu

SEQ ID NO: 36153 - RNA, 1655 nt, Artificial Sequence
  mRNA product Design i-3 (hSL-A64-N5) comprising derived and/or modified sequence from LASV(LASV254-NIG-2011;Clade II)__AIT17674__GPCmut9 (opt1)
aggagaaagcuuaccaugggccagaucaucaccuucuuccaggaggugccccacgucaucgaggaggugaugaacaucgugcugaucgcccucagccugcuggccauccucaaggggaucuacaacgucgcgaccugcggccuguucgggcugguguccuuccuccugcugugcggccgcagcugcuccacgaccuacaaggggguguacgagcuccagacccuggagcuggacaugaccaaccucaacaugacgaugccgcugagcugcaccaagaacaacucccaccacuacaucauggucggcaacgagaccggccuggagcucacccugacgaacaccagcaucaucaaccacaaguucugcaaccuguccgacgcccacaagaagaaccucuacaaccacgcccugaugagcaucaucuccaccuuccaccugagcauccccaacuucaaccaguacgaggccauguccugcgacuucaacgggggcaagaucagcgugcaguacaaccucucccacagcuacgccguggacgcggccaaccacugcgggaccaucgccaacggcguccugcagacguucaugcggauggccuggggcggguccuacaucgcgcuggacagcggcugcgggaacugggacugcaucaugaccuccuaccaguaccucaucauccagaacaccaccugggaggaccacugccaguucagccgccccucccccaucggcuaccuggggcugcucagccagcggacgcgcgacaucuacaucagccggcgccugcugggcaccuucaccuggacccucuccgacagcgagggcaacgagacgcccgggggcuacugccugacccgguggaugcugaucgaggccgagcucaagugcuucgggaacaccgccguggccaagugcaacgagaagcacgacgaggaguucugcgacaugcugcgccuguucgacuucaacaagcaggccauccggcgccucaagaccgaggcgcaggccaacauccagcugaucaacaaggccgugaacgcccugaucaacgaccagcucaucaugaagaaccaccuccgggacaucaugugcauccccuacugcaacuacuccaaguacugguaccugaaccacacggucaccgggaagaccagccugccccgcugcuggcugguguccaacggcagcuaccugaacgagacccacuucuccgacgacaucgagcagcaggccgacaacaugaucacggagcuccugcagaaggaguacauggaccggcagggcaagaccccgcuggggcucguggaccuguucgucuucagcaccuccuucuaccugaucagcaucuuccugcaccucgugaagaucccgacccaccgccacgugaucggcaagcccugccccaagccccaccggcugaaccacauggggaucugcuccugcggccuguacaagcacccggggguccccgugaaguggaagcgcugaggacuaguuauaagacugacuagcccgaugggccucccaacgggcccuccuccccuccuugcaccgagauuaaucaaaggcucuuuucagagccaccaaaaaaaaaaaaaaaaaaaaaaaaaaaaaaaaaaaaaaaaaaaaaaaaaaaaaaaaaaaaaaaaagaauu

SEQ ID NO: 36154 - RNA, 1655 nt, Artificial Sequence
  mRNA product Design i-3 (hSL-A64-N5) comprising derived and/or modified sequence from LASV(Nig08-A19;Clade III)__ADU56618__GPCmut9 (opt1)
aggagaaagcuuaccaugggccagaucgugaccuucuuccaggaggucccccacgugaucgaggaggugaugaacaucguccugaucgcccucagcauccuggccauccugaaggggcucuacaacaucgcgaccugcggccugaucgggcuggugacguuccuccugcuguccggccgcagcugcuccaugaccuacaaggggguguacgagcuccagacccuggagcugaacaugaacacccucaacaugacgaugccgcugagcugcaccaagaacaacucccaccacuacaucauggucggcaacgagaccggccuggagcucacccugacgaacaccagccugcuccaccacaaguucugcaaccuguccgacgcccacaagaagaaccuguacgaccacacccucaugagcaucaucuccaccuuccaccugagcauccccaacuucaaccaguacgaggccauguccugcgacuucaacgggggcaagaucacggugcaguacaaccugagccacuccuacgccaucgacgccgcgaaccacugcgggaccguggccaacggcguccuccagaccuucaugcggauggccuggggcgggagcuacaucgcccuggacuccggcugcgggaagugggacugcaucaugaccagcuaccaguaccugaucauccagaacacgaccugggaggaccacugccaguucucccggcccagccccaucggcuaccucgggcugcugucccagcgcacccgggacaucuacaucagccgccggcuccugggcaccuucacguggacccugagcgacuccgagggcaacgagacccccgggggcuacugccucacccgcuggaugcugaucgaggcggagcugaagugcuucgggaacacggccguggccaagugcaacgagaagcacgacgaggaguucugcgacaugcuccggcuguucgacuucaacaagcaggccauccgccggcugaaggccgaggcgcagaugagcauccagcucaucaacaaggccgugaacgcccugaucaacgaccagcugaucaugaagaaccaccuccgcgacaucaugugcauccccuacugcaacuacuccaaguacugguaccugaaccacaccagcaccgggcggaccucccugccccgcugcuggcucgucagcaacggcuccuaccugaacgagacgcacuucagcgacgacaucgagcagcaggccgacaacaugaucaccgagaugcugcagaaggaguaccucgaccggcagggcaagaccccgcuggggcugguggaccuguucguguucuccaccagcuucuaccucaucuccaucuuccugcaccuggucaagaucccgacgcaccgccacaucgugggcaagcccugccccaagccccaccggcucaaccacauggggaucugcagcugcggccuguacaagcagccgggggugcccguccgcuggaagcggugaggacuaguuauaagacugacuagcccgaugggccucccaacgggcccuccuccccuccuugcaccgagauuaaucaaaggcucuuuucagagccaccaaaaaaaaaaaaaaaaaaaaaaaaaaaaaaaaaaaaaaaaaaaaaaaaaaaaaaaaaaaaaaaaagaauu

SEQ ID NO: 36155 - RNA, 1658 nt, Artificial Sequence
  mRNA product Design i-3 (hSL-A64-N5) comprising derived and/or modified sequence from LASV(G1180-SLE-2010;Clade IV)__AIT17168__GPCmut9 (opt1)
aggagaaagcuuaccaugggccagaucgugaccuucuuccaggaggucccccacgugaucgaggaggugaugaacaucguccugaucgcccucagcauccuggccgugcugaaggggcucuacaacuucgcgaccugcggccugguggggcugcucaccuuccugcugcucugcggccgcuccugcaccgccagccgguacaagggggucuacgagcugcagacccuggagcucaacauggagacccugaacaugacgaugccgcuguccugcaccaagaacaacagccaccacuacaucauggugggcaacgagaccggccucgagcugacccugacgaacaccuccaucaucaaccacaaguucugcaaccucagcgacgcccacaagaagaaccuguacgaccacgcccugauguccaucaucagcaccuuccaccucuccauccccaacuucaaccaguacgaggccaugagcugcgacuucaacgggggcaagaucuccgugcaguacaaccugagccacuccuacgcgggggacgccgccaaccacugcggcaccgucgccaacggggugcugcagacguucaugcgcauggcguggggcggcagcuacaucgcccucgacuccgggugcggcagcugggacugcaucaugaccuccuaccaguaccugaucauccagaacaccaccugggaggaccacugccaguucagccggcccucccccaucggguaccugggccuccugagccagcgcacgcgggacaucuacaucagccgccggcugcucggcaccuucaccuggacccuguccgacagcgaggggaaggacacgccgggcggguacugccugacccgcuggaugcucaucgaggccgagcugaagugcuucggcaacaccgccguggccaagugcaacgagaagcacgacgaggaguucugcgacaugcugcggcuguucgacuucaacaagcaggcgauccagcgccugaaggccgaggcccagauguccauccagcugaucaacaaggccgucaacgcccucaucaacgaccagcugaucaugaagaaccaccuccgggacaucaugugcauccccuacugcaacuacagcaaguacugguaccucaaccacaccacgaccggcaagaccucccugcccaagugcuggcuggugagcaacggcuccuaccucaacgagacccacuucagcgacgacaucgagcagcaggcggacaacaugaucacggagaugcugcagaaggaguacauggagcgccaggggaagacgccccugggccucguggaccuguucgucuucuccaccagcuucuaccugaucuccaucuuccugcaccucgugaagaucccgacccaccggcacaucgugggcaagagcugccccaagccccaccgccugaaccacauggggaucugcuccugcgggcuguacaagcagcccggcgucccggugaaguggaagcggugaggacuaguuauaagacugacuagcccgaugggccucccaacgggcccuccuccccuccuugcaccgagauuaaucaaaggcucuuuucagagccaccaaaaaaaaaaaaaaaaaaaaaaaaaaaaaaaaaaaaaaaaaaaaaaaaaaaaaaaaaaaaaaaaagaauu

SEQ ID NO: 36156 - RNA, 1658 nt, Artificial Sequence
  mRNA product Design i-3 (hSL-A64-N5) comprising derived and/or modified sequence from LASV(G1442-SLE-2011;Clade IV)__AIT17180__GPCmut9 (opt1)
aggagaaagcuuaccaugggccagaucgugaccuucuuccaggaggucccccacgugaucgaggaggugaugaacaucguccugaucgcccucagcauccuggccgugcugaaggggcucuacaacguggcgaccugcggccugaucgggcuggucacguuccuccugcugugcggccgcuccugcaccaccacccucuacaaggggguguacgagcugcagacgcuggagcucaacauggagacccugaacaugaccaugccgcugagcugcaccaagaacaacucccaccacuacauccgggugggcaacgagacgggccucgagcugacccugaccaacaccagcaucaucaaccacaaguucugcaaccucuccgacgcccacaagaagaaccuguacgaccacgcccugaugagcaucaucuccacguuccaccucagcauccccaacuucaaccaguacgaggccauguccugcgacuucaacgggggcaagaucagcguccaguacaaccugucccacagcuacgccggggacgcggccaaccacugcggcaccguggccaacggggugcugcagaccuucaugcgcauggccuggggcggcuccuacaucgcgcucgacagcgggugcggcaacugggacugcaucaugaccuccuaccaguaccugaucauccagaacacgaccugggacgaccacugccaguucagccgccccucccccaucggguaccugggccuccugagccagcggacccgcgacgucuacaucucccggcgccugcucggcaccuucacguggacccugagcgacagcgaggggaaggacaccccgggcggguacugccugacccgguggaugcucaucgaggccgagcugaagugcuucggcaacacggccguggccaagugcaacgagaagcacgacgaggaguucugcgacaugcugcgccucuucgacuucaacaagcaggccauccagcggcugaaggcggaggcccagauguccauccagcugaucaacaaggccgugaacgcccucaucaacgaccagcugaucaugaagaaccaccuccgcgacaucaugugcauccccuacugcaacuacagcaaguacugguaccugaacaacaccgccaccggcaagaccucccugcccaagugcuggcugaucagcaacggcuccuaccucaacgagacgcacuucagcgacgacaucgagcaggaggcggacaacaugaucaccgagaugcugcagaaggaguacauggagcggcaggggaagacgccccugggccucgucgaccuguucguguucuccaccagcuucuaccugaucuccaucuuccugcaccucgugaagaucccgacccaccgccacaucgucggcaagagcugccccaagccccaccggcugaaccacauggggaucugcuccugcgggcuguacaagcagcccggcgugccggugcgcuggaagcggugaggacuaguuauaagacugacuagcccgaugggccucccaacgggcccuccuccccuccuugcaccgagauuaaucaaaggcucuuuucagagccaccaaaaaaaaaaaaaaaaaaaaaaaaaaaaaaaaaaaaaaaaaaaaaaaaaaaaaaaaaaaaaaaaagaauu

SEQ ID NO: 36157 - RNA, 1658 nt, Artificial Sequence
  mRNA product Design i-3 (hSL-A64-N5) comprising derived and/or modified sequence from LASV(G3010-SLE-2013;Clade IV)__AIT17344__GPCmut9 (opt1)
aggagaaagcuuaccaugggccagaucgugaccuucuuccaggaggucccccacgugaucgaggaggugaugaacaucguccugaucgcccucagcauccuggccgugcugaaggggcucuacaacuucgcgaccugcggccugguggggcuggucacguuccuccugcugugcggccgcuccugcaccaccagccucuacaaggggguguacgagcugcagacccuggagcucaacauggagacgcugaacaugaccaugccgcuguccugcaccaagaacaacagccaccacuacaucauggugggcaacgagaccggccucgagcugacgcugaccaacaccuccaucaucaaccacaaguucugcaaccucagcgacgcccacaagaagaaccuguacaaccacgcccugauguccaucaucagcaccuuccaccucuccauccccaacuucaaccaguacgaggccaugagcugcgacuucaacgggggcaagaucuccguccaguacaaccugagccacuccuacgccggggacgcggccagccacugcggcacgguggccaacggggugcugcagaccuucaugcggauggccuggggcggcuccuacaucgcgcucgacagcgggugcggcaagugggacugcaucaugaccuccuaccaguaccugaucauccagaacaccacgugggaggaccacugccaguucagccgccccucccccaucggguaccugggccuccugagccagcggacccgcgacaucuacaucagccggcgccugcucggcaccuucaccuggacgcuguccgacagcgaggggaaggacaccccgggcggguacugccugacccgguggaugcucaucgaggccgagcugaagugcuucggcaacaccgccgucgccaagugcaacgagaagcacgacgaggaguucugcgacaugcugcgccucuucgacuucaacaagcaggccauccagcggcugaagacggaggcgcagauguccauccagcugaucaacaaggccgugaacgcccucaucaacgaccagcugaucaugaagaaccaccuccgcgacaucaugugcauccccuacugcaacuacagcaaguacugguaccugaaccacaccaccaccggcaagacgucccugcccaagugcuggcuggugagcaacggcuccuaccucaacgagacccacuucagcgacgacaucgagcagcaggccgacaacaugaucaccgagaugcugcagaaggaguacauggagcggcaggggaagacgccccugggccucgucgaccuguucguguucuccaccagcuucuaccugaucuccaucuuccugcaccucgugaagaucccgacccaccgccacaucgucggcaagagcugccccaagccccaccggcugaaccacauggggaucugcuccugcgggcuguacaagcagcccggcgugccggugcgcuggaagcggugaggacuaguuauaagacugacuagcccgaugggccucccaacgggcccuccuccccuccuugcaccgagauuaaucaaaggcucuuuucagagccaccaaaaaaaaaaaaaaaaaaaaaaaaaaaaaaaaaaaaaaaaaaaaaaaaaaaaaaaaaaaaaaaaagaauu

SEQ ID NO: 36158 - RNA, 1658 nt, Artificial Sequence
  mRNA product Design i-3 (hSL-A64-N5) comprising derived and/or modified sequence from LASV(G502-SLE-2009;Clade IV)__AIT17126__GPCmut9 (opt1)
aggagaaagcuuaccaugggccagaucgugaccuucuuccaggaggucccccacgugaucgaggaggugaugaacaucguccugaucgcccucagcauccuggccgugcugaaggggcucuacaacuucgcgaccugcggccugguggggcugcucacguuccugcugcucugcggccgcuccugcaccaccgggcuguacaagggcgucuacgagcugcagacccucgagcugaacauggagacgcugaacaugaccaugccgcucagcugcaccaagaacaacucccaccacuacaucauggugggcaacgagaccgggcuggagcugacgcucaccaacaccagcaucaucaaccacaaguucugcaaccuguccgacgcccacaagaagaaccuguacgaccacgcccucaugagcaucaucuccaccuuccaccugagcauccccaacuucaaccaguacgaggccauguccugcgacuucaacggcgggaagaucagcgugcaguacaaccugucccacagcuacgccggcgacgcggccgaccacugcgggacggucgccaacggcgugcuccagaccuucaugcggauggccuggggcggguccuacaucgcgcuggacagcggcugcgggcggugggacugcaucaugaccuccuaccaguaccugaucauccagaacaccacgugggaggaccacugccaguucagccgccccucccccaucggcuaccucggccugcugagccagcggacccgcgacaucuacaucucccggcgccuccuggggaccuucaccuggacgcugagcgacagcgagggcaaggacacccccgggggcuacugccucacccgguggaugcugaucgaggccgagcugaagugcuucgggaacaccgccguggccaagugcaacgagaagcacgacgaggaguucugcgacaugcuccgccuguucgacuucaacaagcaggccauccagcggcugaaggcggaggcccagauguccauccagcucaucaacaaggccgucaacgcccugaucaacgaccagcuggugaugaagaaccaccuccgcgacaucaugugcauccccuacugcaacuacagccgguacugguaccugaaccacacgaccaccggccgcaccucccugcccaagugcuggcucgugagcaacggguccuaccugaacgagacgcacuucagcgacgacaucgagcagcaggccgacaacaugaucaccgagaugcugcagaaggaguacauggagcggcagggcaagaccccgcucgggcuggucgaccuguucguguucuccaccagcuucuaccugaucuccaucuuccuccaccuggugaagaucccgacgcaccgccacaucgucggcaagagcugccccaagccccaccggcugaaccacauggggaucugcuccugcggccucuacaagcagcccggcgugccggugaaguggaagcgcugaggacuaguuauaagacugacuagcccgaugggccucccaacgggcccuccuccccuccuugcaccgagauuaaucaaaggcucuuuucagagccaccaaaaaaaaaaaaaaaaaaaaaaaaaaaaaaaaaaaaaaaaaaaaaaaaaaaaaaaaaaaaaaaaagaauu

SEQ ID NO: 36159 - RNA, 1658 nt, Artificial Sequence
  mRNA product Design i-3 (hSL-A64-N5) comprising derived and/or modified sequence from LASV(G733-SLE-2010;Clade IV)__AIT17154__GPCmut9 (opt1)
aggagaaagcuuaccaugggccagaucgugaccuucuuccaggaggucccccacgugaucgaggaggugaugaacaucguccugaucgcccucagcauccuggccgugcugaaggggcucuacaacuucgcgaccugcggcaucguggggcuggucuccuuccugcuccugugcggccgcagcugcacgaccucccuguacaaggggguguacgagcuccagacccuggagcugaacauggagacccucaacaugacgaugccgcugagcugcaccaagaacaacucccaccacuacaucauggugggcaacgagaccggccuggagcucacccugacgaacaccagcaucaucaaccacaaguucugcaaccuguccgacgcccacaagaagaaccucuacgaccacgcccugaugagcaucaucuccaccuuccaccugagcauccccaacuucaaccaguacgaggccauguccugcgacuucaacgggggcaagaucagcguccaguacaaccucucccacagcuacgccggggacgcggccaaccacugcggcaccaucgccaacggggugcugcagacguucaugcggauggccuggggcggcuccuacaucgcgcuggacagcgggugcgaccggugggacugcaucaugaccuccuaccaguaccucaucauccagaacaccaccugggaggaccacugccaguucagccgccccucccccaucggcuaccuggggcugcucagccagcggacgcgcgacaucuacaucagccggcgccugcugggcaccuucaccuggacccucuccgacagcgagggcaaggacacgcccgggggcuacugccugacccgguggaugcugaucgaggccgagcucaagugcuucgggaacaccgccguggccaagugcaacgagaagcacgacgaggaguucugcgacaugcugcgccuguucgacuucaacaagcaggccauccagcggcucaaggcggaggcccagauguccauccagcugaucaacaaggccgucaacgcccugaucaacgaccagcucaucaugaagaaccaccuccgcgacaucaugugcauccccuacugcaacuacagcaaguacugguaccugaaccacaccacgaccgggaagaccucccugcccaagugcuggcuggugagcaacggcuccuaccugaacgagacccacuucagcgacgacaucgagcagcaggccgacaacaugaucacggagaugcuccagaaggaguacauggagcggcagggcaagaccccgcuggggcugguggaccucuucgucuucuccaccagcuucuaccugaucuccaucuuccugcaccuggugaagaucccgacccaccgccacguggucggcaagagcugccccaagccccaccggcucaaccacauggggaucugcuccugcggccuguacgggcagcccggcgugccggugaaguggaagcgcugaggacuaguuauaagacugacuagcccgaugggccucccaacgggcccuccuccccuccuugcaccgagauuaaucaaaggcucuuuucagagccaccaaaaaaaaaaaaaaaaaaaaaaaaaaaaaaaaaaaaaaaaaaaaaaaaaaaaaaaaaaaaaaaaagaauu

SEQ ID NO: 36160 - RNA, 1658 nt, Artificial Sequence
  mRNA product Design i-3 (hSL-A64-N5) comprising derived and/or modified sequence from MOPV/LASV reassortant(IGS-1;Clade IV)__AFY05576__GPCmut9 (opt1)
aggagaaagcuuaccaugggccagaucgugaccuucuuccaggaggucccccacgugaucgaggaggugaugaacaucguccugaucgcccucagcgugcuggccgugcugaaggggcucuacaacuucgcgaccugcggccuggucgggcuggugacguuccuccugcugugcggccgcuccugcaccaccagccucuacaaggggguguacgagcugcagacccuggagcucaacauggagacgcugaacaugaccaugccgcuguccugcaccaagaacaacagccaccacuacaucauggucggcaacgagaccggccucgagcugacgcugaccaacaccuccaucaucaaccacaaguucugcaaccucagcgacgcccacaagaagaaccuguacgaccacgcccugauguccaucaucagcaccuuccaccucuccauccccaacuucaaccaguacgaggccaugagcugcgacuucaacgggggcaagaucuccgugcaguacaaccugagccacuccuacgccggggacgcggccaaccacugcggcacgguggccaacgggguccugcagaccuucaugcggauggccuggggcggcagcuacaucgcgcucgacuccgggugcggcaacugggacugcaucaugaccagcuaccaguaccugaucauccagaacaccacgugggaggaccacugccaguucucccggcccagccccaucggguaccugggccuccugucccagcgcacccgggacaucuacaucagccgccggcugcucggcaccuucaccuggacgcugagcgacuccgagggggaggacaccccgggcggguacugccugacccgcuggaugcucaucgaggccgagcugaagugcuucggcaacaccgccguggccaagugcaacgagaagcacgacgaggaguucugcgacaugcugcggcuguucgacuucaacaagcaggccauccagcgccugaaggcggaggcccagaugagcauccagcugaucaacaaggccgugaacgcccucaucaacgaccagcugaucaugaagaaccaccuccgggacaucaugugcauccccuacugcaacuacuccaaguacugguaccucaaccacacgaccaccggccgcaccagccugcccaagugcuggcuggucuccaacggcagcuaccucaacgagacgcacuucuccgacgacaucgagcagcaggccgacaacaugaucaccgagaugcugcagaaggaguacauggagcggcaggggaagacgccccugggccucguggaccuguucguguucagcaccuccuucuaccugaucagcaucuuccugcaccucgucaagaucccgacccaccgccacaucguggggaaguccugccccaagccccaccggcugaaccacaugggcaucugcagcugcgggcuguacaagcagcccggcgugccggucaaguggaagcgcugaggacuaguuauaagacugacuagcccgaugggccucccaacgggcccuccuccccuccuugcaccgagauuaaucaaaggcucuuuucagagccaccaaaaaaaaaaaaaaaaaaaaaaaaaaaaaaaaaaaaaaaaaaaaaaaaaaaaaaaaaaaaaaaaagaauu

SEQ ID NO: 36161 - RNA, 1658 nt, Artificial Sequence
  mRNA product Design i-3 (hSL-A64-N5) comprising derived and/or modified sequence from LASV(LM765-SLE-2012;Clade IV)__AIT17814__GPCmut9 (opt1)
aggagaaagcuuaccaugggccagaucgugaccuucuuccaggaggucccccacgugaucgaggaggugaugaacaucguccugaucgcccucagcauccuggccgugcugaaggggcucuacaacuucgcgaccugcggccugguggggcuggucacguuccuccugcugugcggccgcuccugcaccaccagccucuacaaggggguguacgagcugcagacccuggagcucaacauggagacgcugaacaugaccaugccgcuguccugcaccaagaacaacagccaccacuacaucauggugggcaacgagaccggccucgagcugacgcugaccaacaccuccaucaucgaccacaaguucugcaaccucagcgacgcccaccggaagaaccuguacgaccacgcccugauguccaucaucagcaccuuccaccucuccauccccaacuucaaccaguacgaggccaugagcugcgacuucaacgggggcaagaucuccguccaguacaaccugagccacuccuacgccaaggacgcggccgaccacugcgggacgguggccaacggcgugcugcagaccuucaugcgcauggccuggggcgggagcuacaucgcgcucgacuccggcugcgggcgcugggacugcaucaugaccagcuaccaguaccugaucauccagaacaccacgugggaggaccacugccaguucucccggcccagccccaucggcuaccuggggcuccugucccagcgcacccgggacaucuacaucagccgccggcugcucggcaccuucaccuggacgcugagcgacuccgagggcaaggacacccccgggggcuacugccugacccgcuggaugcucaucgaggccgagcugaagugcuucgggaacaccgccgucgccaagugcaacgagaagcacgacgaggaguucugcgacaugcugcggcuguucgacuucaacaagcaggccauccagcgccugaaggcggaggcccagaugagcauccagcugaucaacaaggccgugaacgcccucaucaacgaccagcugaucaugaagaaccaccuccgggacaucaugugcauccccuacugcaacuacuccaaguacugguaccucaaccacacgaccaccgggaagaccagccugcccaagugcuggcugguguccaacggcagcuaccucaacgagacgcacuucuccgacgacaucgagcagcaggccgacaacaugaucaccgagaugcugcagaaggaguacauggagcgccagggcaagaccccgcuggggcucgucgaccuguucguguucagcaccuccuucuaccugaucagcaucuuccugcaccucgugaagaucccgacgcaccggcacaucgucggcaagcccugccccaagccccaccgccugaaccacauggggaucugcuccugcggccuguacaagcagccgggggugcccgugaaguggaagcggugaggacuaguuauaagacugacuagcccgaugggccucccaacgggcccuccuccccuccuugcaccgagauuaaucaaaggcucuuuucagagccaccaaaaaaaaaaaaaaaaaaaaaaaaaaaaaaaaaaaaaaaaaaaaaaaaaaaaaaaaaaaaaaaaagaauu

SEQ ID NO: 36162 - RNA, 1658 nt, Artificial Sequence
  mRNA product Design i-3 (hSL-A64-N5) comprising derived and/or modified sequence from LASV(LM776-SLE-2012;Clade IV)__AIT17824__GPCmut9 (opt1)
aggagaaagcuuaccaugggccagaucgugaccuucuuccaggaggucccccacgugaucgaggaggugaugaacaucguccugaucgcccucagcauccuggccgugcugaaggggcucuacaacuucgcgaccugcggccugguggggcuggucacguuccuccugcugugcggccgcuccugcaccaccagcguguacaaggggguguacgagcuccagacccuggagcugaacauggagacgcucaacaugaccaugccgcuguccugcaccaagaacaacagccaccacuacaucauggucggcaacgagaccggccuggagcucacgcugaccaacaccuccaucaucaaccacaaguucugcaaccugagcgacgcccacaagaagaaccucuacgaccacgcccugauguccaucaucagcaccuuccaccuguccauccccaacuucaaccaguacgaggccaugagcugcgacuucaacgggggcaagaucuccgugcaguacaaccucagccacuccuacgccggggacgcggccaaccacugcggcacgguggccaacgggguccugcagaccuucaugcggauggccuggggcggcagcuacaucgcgcuggacuccgggugcggcaagugggacugcaucaugaccagcuaccaguaccucaucauccagaacaccacgugggaggaccacugccaguucucccgccccagccccaucggguaccugggccugcucucccagcggacccgcgacaucuacaucagccggcgccugcugggcaccuucaccuggacgcucagcgacuccgaggggaaggacaccccgggcggguacugccugacccgguggaugcugaucgaggccgagcucaagugcuucggcaacaccgccguggccaagugcaacgagaagcacgacgaggaguucugcgacaugcugcgccuguucgacuucaacaagcaggccauccagcggcucaaggcggaggcccagaugagcauccagcugaucaacaaggccgugaacgcccugaucaacgaccagcucaucaugaagaaccaccuccgcgacaucaugugcauccccuacugcaacuacuccaaguacugguaccugaaccacacgaccaccggcaagaccagccugcccaagugcuggcuggucuccaacggcagcuaccugaacgagacgcacuucuccgacgacaucgagcagcaggccgacaacaugaucaccgagaugcuccagaaggaguacauggagcggcaggggaagacgccccugggccugguggaccucuucguguucagcaccuccuucuaccugaucagcaucuuccugcaccuggucaagaucccgacccaccgccacaucguggggaaguccugccccaagccccaccggcucaaccacaugggcaucugcagcugcgggcuguacaagcagcccggcgugccgguccgcuggaagcggugaggacuaguuauaagacugacuagcccgaugggccucccaacgggcccuccuccccuccuugcaccgagauuaaucaaaggcucuuuucagagccaccaaaaaaaaaaaaaaaaaaaaaaaaaaaaaaaaaaaaaaaaaaaaaaaaaaaaaaaaaaaaaaaaagaauu

SEQ ID NO: 36163 - RNA, 1658 nt, Artificial Sequence
  mRNA product Design i-3 (hSL-A64-N5) comprising derived and/or modified sequence from LASV(Mad39;Clade IV)__ANH09722__GPCmut9 (opt1)
aggagaaagcuuaccaugggccagaucgugaccuucuuccaggaggucccccacgugaucgaggaggugaugaacaucguccugaucgcccucagcauccuggccgugcugaaggggcucuacaacguggcgaccugcggccugaucgggcuggucacguuccuccugcugugcggccgcuccugcaccaccacccucuacaaggggguguacgagcugcaggcccuggagcucaacauggagacgcugaacaugaccaugccgcugagcugcaccaagaacaacucccaccacuacauccgggugggcaacgagaccggccucgagcugacgcugaccaacaccagccucaucaaccacaaguucugcaaccuguccgacgcccacaagaagaaccuguacgaccacgcccucaugagcaucaucuccaccuuccaccugagcauccccaacuucaaccaguacgaggccauguccugcgacuucaacgacgggaagaucagcguccaguacaaccugucccacacguacgcgggcgacaccgccaaccacugcgggaccguggccaacggcgugcuccagaccuucaugcgcauggccuggggcgggagcuacaucgcgcuggacuccggcugcgggggcugggacugcaucaugacgagcuaccaguaccugaucauccagaacaccaccugggaggaccacugccaguucucccggcccagccccaucggguaccucggccugcugucccagcggacccgcgacaucuacaucagccggcgccuccugggcacguucaccuggacccuguccgacagcgaggggaaggacaccccgggcggguacugccucacgcgguggaugcugaucgaggccgagcugaagugcuucggcaacaccgccgucgccaagugcaacgagaagcacgacgaggaguucugcgacaugcuccgccuguucgacuucaacaagcaggccauccagcggcugaaggcggaggcccagaugagcauccagcucaucaacaaggccgugaacgcccugaucaacgaccagcugaucaugaagaaccaccuccgcgacaucaugugcauccccuacugcaacuacuccaaguacugguaccugaaccacaccgugaccggcaagacgagccugcccaagugcuggcucgucuccaacggcagcuaccugaacgagacccacuucuccgacgacaucgagcagcaggccgacaacaugaucaccgagaugcugcagaaggaguacauggagcggcaggggaagacgccccucggccugguggaccuguucguguucagcaccuccuucuaccugaucagcaucuuccuccaccuggucaagaucccgacccaccgccacgugguggggaagcccugccccaagccccaccggcugaaccacaugggcaucugcuccugcggguucuacaagcagccgggcguccccgugcgcuggaagcggugaggacuaguuauaagacugacuagcccgaugggccucccaacgggcccuccuccccuccuugcaccgagauuaaucaaaggcucuuuucagagccaccaaaaaaaaaaaaaaaaaaaaaaaaaaaaaaaaaaaaaaaaaaaaaaaaaaaaaaaaaaaaaaaaagaauu

SEQ ID NO: 36164 - RNA, 1658 nt, Artificial Sequence
  mRNA product Design i-3 (hSL-A64-N5) comprising derived and/or modified sequence from LASV(Z0947-SLE-2011;Clade IV)__AIT17840__GPCmut9 (opt1)
aggagaaagcuuaccaugggccagaucgugaccuucuuccaggaggucccccacgugaucgaggaggugaugaacaucguccugaucgcccucagcauccuggccgugcugaaggggcucuacaacuucgcgaccugcggccugguggggcuggucacguuccuccugcugugcggccgcuccugcaccaucagccucuacaaggggguguacgagcugcagacccuggagcucaacauggagacccugaacaugacgaugccgcuguccugcaccaagaacaacagccaccacuacaucauggugggcaacgagaccggccucgagcugacccugacgaacaccuccaucaucaaccacaaguucugcaaccucagcgacgcccacaagaagaaccuguacgaccacgcccugauguccaucaucagcaccuuccaccucuccauccccaacuucaaccaguacgaggccaugagcugcgacuucaacgggggcaagaucuccguccaguacaaccugagccacuccuacgccggggacgcggccaaccacugcggcaccguggccaacggggugcugcagacguucaugcggauggccuggggcggcagcuacaucgcgcucgacuccgggugcgaccggugggacugcaucaugaccagcuaccaguaccugaucauccagaacaccaccugggaggaccacugccaguucucccgccccagccccaucggcuaccuggggcuccugucccagcggacgcgcgacaucuacaucagccggcgccugcucggcaccuucaccuggacccugagcgacuccgagggcaaggacacgcccgggggcuacugccugacccgguggaugcucaucgaggccgagcugaagugcuucgggaacaccgccgucgccaagugcaacgagaagcacgacgaggaguucugcgacaugcugcgccucuucgacuucaacaagcaggccauccagcggcugaaggcggaggcccagaugagcauccagcugaucaacaaggccgugaacgcccucaucaacgaccagcugaucaugaagaaccaccuccgcgacaucaugugcauccccuacugcaacuacuccaaguacugguaccugaaccacaccacgaccgggaagaccagccugcccaagugcuggcugguguccaacggcagcuaccucaacgagacccacuucuccgacgacaucgagcagcaggccgacaacaugaucacggagaugcugcagaaggaguacauggagcggcagggcaagaccccgcuggggcucgucgaccuguucguguucagcaccuccuucuaccugaucagcaucuuccugcaccucgugaagaucccgacccaccgccacaucgucggcaagcccugccccaagccccaccggcugaaccacauggggaucugcuccugcggccuguacaagcagccgggggugcccgugaaguggaagcgcugaggacuaguuauaagacugacuagcccgaugggccucccaacgggcccuccuccccuccuugcaccgagauuaaucaaaggcucuuuucagagccaccaaaaaaaaaaaaaaaaaaaaaaaaaaaaaaaaaaaaaaaaaaaaaaaaaaaaaaaaaaaaaaaaagaauu

SEQ ID NO: 36165 - RNA, 1658 nt, Artificial Sequence
  mRNA product Design i-3 (hSL-A64-N5) comprising derived and/or modified sequence from LASV(Josiah;Clade IV)__NP_694870__GPCmut9 (opt1)
aggagaaagcuuaccaugggccagaucgugaccuucuuccaggaggucccccacgugaucgaggaggugaugaacaucguccugaucgcccucagcgugcuggccgugcugaaggggcucuacaacuucgcgaccugcggccuggucgggcuggugacguuccuccugcugugcggccgcuccugcaccaccagccucuacaaggggguguacgagcugcagacccuggagcucaacauggagacgcugaacaugaccaugccgcuguccugcaccaagaacaacagccaccacuacaucauggucggcaacgagaccggccucgagcugacgcugaccaacaccuccaucaucaaccacaaguucugcaaccucagcgacgcccacaagaagaaccuguacgaccacgcccugauguccaucaucagcaccuuccaccucuccauccccaacuucaaccaguacgaggccaugagcugcgacuucaacgggggcaagaucuccgugcaguacaaccugagccacuccuacgccggggacgcggccaaccacugcggcacgguggccaacgggguccugcagaccuucaugcggauggccuggggcggcagcuacaucgcgcucgacuccgggugcggcaacugggacugcaucaugaccagcuaccaguaccugaucauccagaacaccacgugggaggaccacugccaguucucccgccccagccccaucggguaccugggccuccugucccagcggacccgcgacaucuacaucagccggcgccugcucggcaccuucaccuggacgcugagcgacuccgaggggaaggacaccccgggcggguacugccugacccgguggaugcucaucgaggccgagcugaagugcuucggcaacaccgccguggccaagugcaacgagaagcacgacgaggaguucugcgacaugcugcgccucuucgacuucaacaagcaggccauccagcggcugaaggcggaggcccagaugagcauccagcugaucaacaaggccgugaacgcccucaucaacgaccagcugaucaugaagaaccaccuccgcgacaucaugugcauccccuacugcaacuacuccaaguacugguaccugaaccacacgaccaccgggcggaccagccugcccaagugcuggcuggucuccaacggcagcuaccucaacgagacgcacuucuccgacgacaucgagcagcaggccgacaacaugaucaccgagaugcugcagaaggaguacauggagcgccagggcaagacgccccuggggcugguggaccucuucguguucagcaccuccuucuaccugaucagcaucuuccugcaccucgucaagaucccgacccaccggcacaucgugggcaaguccugccccaagccccaccgccugaaccacauggggaucugcagcugcggccuguacaagcagcccggggugccggucaaguggaagcggugaggacuaguuauaagacugacuagcccgaugggccucccaacgggcccuccuccccuccuugcaccgagauuaaucaaaggcucuuuucagagccaccaaaaaaaaaaaaaaaaaaaaaaaaaaaaaaaaaaaaaaaaaaaaaaaaaaaaaaaaaaaaaaaaagaauu

SEQ ID NO: 36166 - RNA, 1655 nt, Artificial Sequence
  mRNA product Design i-3 (hSL-A64-N5) comprising derived and/or modified sequence from LASV(LP;Clade I)__AAF86701__GPCmut9 (opt1)
aggagaaagcuuaccaugggccagaucaucaccuucuuccaggaggugccccacgucaucgaggaggugaugaacaucgugcugaucgcccucagccugcuggccauccucaaggggcuguacaacaucgcgaccugcggcaucaucgggcuggucgccuuccucuuccugugcggcaaguccugcagccugacgcucaagggcggguacgagcugcagacccuggagcucaacauggagacccugaacaugaccaugccgcuguccugcacgaagaacagcucccaccacuacauccgcgugggcaacgagaccgggcucgagcugacccugaccaacacgagcaucaucaaccacaaguucugcaaccucuccgacgcccacaagaagaaccuguacgaccacgcccugaugagcaucaucuccaccuuccaccucagcauccccaacuucaaccaguacgaggccauguccugcgacuucaacggcgggaagaucagcgugcaguacaaccugucccacagcuacgcgggcgacgccgccgagcacugcgggaccgucgccaacggcgugcugcagaccuucaugcggauggcguggggcgggcgcuacaucgcccucgacuccggcugcgggaacugggacugcaucaugacgagcuaccaguaccugaucauccagaacaccaccugggaggaccacugccaguucucccggcccagccccaucggcuaccugggccuccugucccagcgcacccgggacaucuacaucagccgccggcugcucgggacguucaccuggacccugagcgacuccgagggcaacgagacccccgggggcuacugccugacgcgcuggaugcucaucgaggccgagcugaagugcuucgggaacaccgccguggccaagugcaacgagaagcacgacgaggaguucugcgacaugcugcggcuguucgacuucaacaagcaggcgauccgccggcugaaggccgaggcccagaugagcauccagcugaucaacaaggccgucaacgcccucaucaacgaccagcugaucaugaagaaccaccuccgcgacaucaugugcauccccuacugcaacuacuccaaguacugguaccucaaccacaccagcuccggccggaccagccugcccaagugcuggcugaucuccaacggcagcuaccucaacgagacgcaguucuccgacgacaucgagcagcaggcggacaacaugaucaccgagaugcugcagaaggaguacaucgagcgccaggggaagaccccgcugggccugguggacaucuucaucuucagcaccuccuucuaccucaucagcaucuuccugcaccugaucaagaucccgacgcaccggcacaucguggggaagcccugccccaagccccaccgccucaaccacaugggcgucugcuccugcgggcuguacaagcacccgggcgugcccaccaaguggaagcggugaggacuaguuauaagacugacuagcccgaugggccucccaacgggcccuccuccccuccuugcaccgagauuaaucaaaggcucuuuucagagccaccaaaaaaaaaaaaaaaaaaaaaaaaaaaaaaaaaaaaaaaaaaaaaaaaaaaaaaaaaaaaaaaaagaauu

SEQ ID NO: 36167 - RNA, 1655 nt, Artificial Sequence
  mRNA product Design i-3 (hSL-A64-N5) comprising derived and/or modified sequence from LASV(803213;Clade II)__AAF86703__GPCmut9 (opt1)
aggagaaagcuuaccaugggccagaucaucaccuucuuccaggaggugccccacgucaucgaggaggugaugaacaucgugcugaucgcccucagccugcuggccauccucaaggggaucuacaacgucgcgaccugcggccuguucgggcugaucuccuuccuccugcugugcggccgcagcugcuccgugacguacaaggggguguacgagcuccagacccuggagcugaacauggccaaccucaacaugaccaugccgcugagcugcaccaagaacaacucccaccacuacaucauggucggcaacgagacgggccuggagcucacccugaccaacaccagcaucaucaaccacaaguucugcaaccuguccgacgcccacaagaagaaccucuacgaccacgcccugaugagcaucaucuccacguuccaccugagcauccccaacuucaaccaguacgaggccauguccugcgacuucaacgggggcaagaucagcgugcaguacaaccucucccacagcuucgcgguggacgccgccaaccacugcgggaccaucgccaacggcguccugcagaccuucaugcggauggcguggggcggguccuacaucgcccuggacagcggcugcgggaacugggacugcaucaugaccuccuaccaguaccucaucauccagaacacgaccugggaggaccacugccaguucagccgccccucccccaucggcuaccuggggcugcucagccagcggacccgcgacaucuacaucagccggcgccugcugggcaccuucacguggacccucuccgacagcgagggcaacgaggcccccgggggcuacugccugacccgguggaugcugaucgaggccgagcucaagugcuucgggaacaccgccguggcgaagugcaacgagaagcacgacgaggaguucugcgacaugcugcgccuguucgacuucaacaagcaggccaucaagcggcucaagacggaggcccagauguccauccagcugaucaacaaggccgugaacgcccugaucaacgaccagcucaucaugaagaaccaccuccgcgacaucaugugcauccccuacugcaacuacagccgguacugguaccugaaccacaccgucaccggcaagaccucccugccccgcugcuggcuggugagcaacggguccuaccugaacgagacgcacuucagcgacgacaucgagcagcaggcggacaacaugaucaccgagaugcuccagaaggaguacauggaccggcagggcaagaccccgcugggccugguggaccuguucgucuucuccaccagcuucuaccucaucuccaucuuccugcaccuggugaagaucccgacgcaccgccacaucguggggaagcccugccccaagccccaccggcucaaccacaugggcaucugcagcugcgggcuguacaagcacccgggcguccccgugaaguggaagcgcugaggacuaguuauaagacugacuagcccgaugggccucccaacgggcccuccuccccuccuugcaccgagauuaaucaaaggcucuuuucagagccaccaaaaaaaaaaaaaaaaaaaaaaaaaaaaaaaaaaaaaaaaaaaaaaaaaaaaaaaaaaaaaaaaagaauu

SEQ ID NO: 36168 - RNA, 1655 nt, Artificial Sequence
  mRNA product Design i-3 (hSL-A64-N5) comprising derived and/or modified sequence from LASV(GA391;Clade III)__CAA36645__GPCmut9 (opt1)
aggagaaagcuuaccaugggccagaucgugaccuucuuccaggaggucccccacgugaucgaggaggugaugaacaucguccugaucgcccucagcauccuggccauccugaaggggcucuacaacguggcgaccugcggccugaucgggcuggugacguuccuccugcuguccggccgcagcugcucccucaucuacaaggggaccuacgagcugcagacccuggagcucaacauggagacccugaacaugacgaugccgcugagcugcaccaagaacaacucccaccacuacauccgggucggcaacgagaccggccucgagcugacccugacgaacaccagcauccucaaccacaaguucugcaaccuguccgacgcccacaagcgcaaccuguacgaccacagccucauguccaucaucagcaccuuccaccuguccauccccaacuucaaccaguacgaggccaugagcugcgacuucaacgggggcaagaucaccgugcaguacaaccugucccacagcuucgccguggacgccgcggggcacugcggcacgcucgccaacgggguccugcagaccuucaugcggauggccuggggcggcuccuacaucgcccuggacagcgggugcggcaacugggacugcaucaugaccuccuaccaguaccucaucauccagaacaccacgugggacgaccacugccaguucagccgccccucccccaucggguaccugggccugcucagccagcggacccgcgacaucuacaucagccggcgccugcugggcaccuucaccuggacgcucuccgacagcgaggggaacgagaccccgggcggguacugccugacccgguggaugcugaucgaggcggagcucaagugcuucggcaacaccgccguggccaagugcaacgagaagcacgacgaggaguucugcgacaugcugcgccuguucgacuucaacaagcaggccauccggcgccucaagacggaggcccagauguccauccagcugaucaacaaggcggugaacgcccugaucaacgaccagcucaucaugaagaaccaccuccgggacaucaugugcauccccuacugcaacuacagccgcuacugguaccugaaccacaccuccaccgggaagaccagccugccccggugcuggcugaucuccaacggcagcuaccugaacgagacgaaguucuccgacgacaucgagcagcaggccgacaacaugaucaccgagaugcugcagaaggaguacaucgaccgccagggcaagacgccccucgggcuggucgaccuguucguguucagcaccuccuucuaccucaucagcaucuuccugcaccuggugaagaucccgacccaccggcacaucgucggcaagcccugccccaagccccaccgccucaaccacauggggaucugcuccugcggccuguacaagcagccgggggugcccgugcgguggaagcgcugaggacuaguuauaagacugacuagcccgaugggccucccaacgggcccuccuccccuccuugcaccgagauuaaucaaaggcucuuuucagagccaccaaaaaaaaaaaaaaaaaaaaaaaaaaaaaaaaaaaaaaaaaaaaaaaaaaaaaaaaaaaaaaaaagaauu

SEQ ID NO: 36169 - RNA, 1658 nt, Artificial Sequence
  mRNA product Design i-3 (hSL-A64-N5) comprising derived and/or modified sequence from LASV(AV;Clade V)__CCA30314__GPCmut9 (opt1)
aggagaaagcuuaccaugggccagaucgugaccuucuuccaggaggucccccacgugaucgaggaggugaugaacaucguccugaucgcccucagcauccuggccgugcugaaggggcucuacaacaucgcgaccugcggccugaucgggcugaucacguuccuccugcugugcggccgcuccugcagcuccaaccucuacaaggggguguacgagcugcagagccuggaccucaacauggagacccugaacaugaccaugccgcuguccugcaccaagaacaacagccaccacuacauccgggucggcaacgacacgggccucgagcugacccugaccaacaccuccauccucaaccacaaguucugcaaccugagcgacgcccacaagaaggaccuguacgaccacgcccucauguccaucaucagcacguuccaccuguccauccccaacuucaaccaguacgaggccaugagcugcgacuucaacgggggcaagaucuccgugcaguacaaccugagccacuccuacgccaucgacgcggccaaccacugcgggaccguggccaacggcauccuccagaccuucaugcgcauggccuggggcgggagcuacaucgcgcuggacuccggcugcgggaacugggacugcaucaugaccagcuaccaguaccugaucauccagaacacgaccugggagaaccacugccaguucucccggcccagccccaucggcuaccucgggcugcugagccagcgcacccgggacaucuacaucucccgccggcuccugggcaccuucacguggacccugagcgacuccgagggcaacgccacccccgggggcuacugccucacccgcuggaugcugaucgaggccgagcugaagugcuucgggaacacggccgucgccaagugcaacgagaagcacgacgaggaguucugcgacaugcuccggcuguucgacuucaacaagcaggcgaucagccgccugaaguccgaggcccagaugagcauccagcucaucaacaaggccgugaacgcccugaucaacgaccagcugaucaugaagaaccaccuccgggacaucaugugcauccccuacugcaacuacuccaaguacugguaccugaaccacaccaucaccggcaagaccagccugcccaagugcuggcucguguccaacgggagcuaccugaacgagacgcacuucuccgacgacaucgagcagcaggccgacaacaugaucaccgagaugcugcagaaggaguacauggagcgccagggcaagaccccgcugggccucgucgaccuguucguguucagcaccuccuucuaccugaucagcaucuuccuccggcuggugaagaucccgacgcaccgccacaucgucgggaagcccugccccaagccccaccggcugaaccacaugggcaucugcuccugcgggcucuacaagcagccgggcgugcccgugcgcuggaagcggugaggacuaguuauaagacugacuagcccgaugggccucccaacgggcccuccuccccuccuugcaccgagauuaaucaaaggcucuuuucagagccaccaaaaaaaaaaaaaaaaaaaaaaaaaaaaaaaaaaaaaaaaaaaaaaaaaaaaaaaaaaaaaaaaagaauu

SEQ ID NO: 36170 - RNA, 1655 nt, Artificial Sequence
  mRNA product Design i-3 (hSL-A64-N5) comprising derived and/or modified sequence from LASV(Togo/2016/7082;Clade VI)__AMR44577__GPCmut9 (opt1)
aggagaaagcuuaccaugggccagaucaucaccuucuuccaggaggugccccacgucaucgaggaggugaugaacaucgugcugaucgcccucagccugcuggccauccucaagggggucuacaacguggcgaccugcggcaucaucgggcuggugacguuccuguuccucugcggccgcuccugcagccugaucuacaagggguccuacgagcugcagacccucgagcugaacauggagacccugaacaugaccaugccgcucagcugcacgaagaacuccagccaccacuacauccgggucggcaacgagaccggccuggagcugacccucaccaacacguccaucaucaaccacaaguucugcaaccugagcgacgcccacaagcgcaaccuguacgaccacgcccucauguccauccugagcaccuuccaccuguccauccccaacuucaaccaguacgaggccaugagcugcgacuucaacgggggcaagaucuccgugcaguacaaccucagccacgccuacgcgguggacgccgccgagcacugcgggaccgucgccaacggcgugcugcagaccuucaugcggauggcguggggcggguccuacaucgcccuggacagcggcugcgggaacugggacugcaucaugacguccuaccaguaccucaucauccagaacaccaccugggaggaccacugccaguucagccgccccucccccaucggcuaccuggggcugcucagccagcggacccgcgacaucuacaucagccggcgccugcugggcacguucaccuggacccucuccgacagcgagggcaacgagacccccgggggcuacugccugacgcgguggaugcugaucgaggccgagcucaagugcuucgggaacaccgccguggccaagugcaacgagaagcacgacgaggaguucugcgacaugcugcgccuguucgacuucaacaagcaggcgauccagcggcucaaguccgaggcccagaugagcauccagcugaucaacaaggccgucaacgcccugaucaacgaccagcucaucaugaagaaccaccuccgcgacaugaugugcauccccuacugcaacuacuccaaguacugguaccugaaccacaccagcuccggccggaccagccugcccaagugcuggcugguguccaacgggagcuaccugaacgagacgcacuucuccgacgacaucgagcagcaggccgacaacaugaucaccgagaugcuccagaaggaguacaucgaccgccagggcaagaccccgcugggccugguggaccuguucgucuucagcaccuccuucuaccucaucagcaucuuccugcaccugaucaagaucccgacgcaccggcacaucguggggaagcccugccccaagccccaccgccucaaccacaugggcaucugcuccugcgggcuguacaagcagccgggcgugcccacccgguggaagcgcugaggacuaguuauaagacugacuagcccgaugggccucccaacgggcccuccuccccuccuugcaccgagauuaaucaaaggcucuuuucagagccaccaaaaaaaaaaaaaaaaaaaaaaaaaaaaaaaaaaaaaaaaaaaaaaaaaaaaaaaaaaaaaaaaagaauu

SEQ ID NO: 36171 - RNA, 1655 nt, Artificial Sequence
  mRNA product Design i-3 (hSL-A64-N5) comprising derived and/or modified sequence from LASV(KAK-428;Clade n.d. (VII))__ANH09740__GPCmut9 (opt1)
aggagaaagcuuaccaugggccagaucgugaccuucuuccaggaggucccccacgugaucgaggaggugaugaacaucguccugaucgcccucagccugcuggccauccucaaggggcuguacaacuucgcgaccugcggcgugaucgggcugaucacguuccuccugcugugcggccgcuccugcagcgccaccuacaaggggcaguacgagcuccagacccuggagcugaacauggagucccucaacaugaccaugccgcugagcugcacgaagaacaacucccaccacuacauccgggccggcaacaacaccggccuggagcucacccugaccaacacgagcaucaucucccacaaguucugcaaccugagcgacgcccacaagaagaaccucuacgaccacacccugauguccaucaucaccaccuuccaccugagcauccccaacuucaaccaguacgaggccauguccugcgacuucaacgggggcaagaucagcauccaguacaaccucucccacagcuacgcgggggacgccgcccagcacugcggcacgguggccaacgggguccugcagaccuucaugcgcauggcguggggcggcuccuaccuggcccucgacagcgggugccggggcugggacugcaucaucuccagcuaccaguaccugaucauccagaacaccaccugggacgaccacugccaguucucccgccccagccccaucggguaccugggcuucgugagccagaagacgcgggacaucuacaucucccgccggcuccugggcaccuucaccuggacccugagcgacuccgaggggcacgacaugccgggcggguacugccucacgcgcuggaugcugaucgaggccgaccugaagugcuucggcaacaccgccguggccaagugcaacgagaagcacgacgaggaguucugcgacauguggcggcuguucgacuucaacaagcaggcgauccagcgccugaaggccgaggcccagaugaacauccagcugaucaacaaggccgucaacgcccucaucaacgaccagcugaugaugaagaaccaccuccgggacaucaugugcauccccuacugcaacuacagcaaguucugguaccucaacaacaccaccacggggcgcaccucccugccccggugcuggcugaucagcaacggcuccuaccucaacgagacccacuucagcgacgacaucgagcagcaggcggacaacaugaucaccgagaugcugcagaaggaguacauggaccgccagggcaagacgccccuggggcucguggaccuguucguguucuccaccagcuucuaccugaucaccaucuuccugcaccucgucaagaucccgacccaccggcacaucgugggcaagcccugccccaagccccaccgccugaaccacauggggaucugcuccugcggccuguacaagcagccgggggugcccguccgguggaagcgcugaggacuaguuauaagacugacuagcccgaugggccucccaacgggcccuccuccccuccuugcaccgagauuaaucaaaggcucuuuucagagccaccaaaaaaaaaaaaaaaaaaaaaaaaaaaaaaaaaaaaaaaaaaaaaaaaaaaaaaaaaaaaaaaaagaauu

SEQ ID NO: 36172 - RNA, 1655 nt, Artificial Sequence; identical to SEQ ID NO: 36166
  mRNA product Design i-3 (hSL-A64-N5) comprising derived and/or modified sequence from LASV(Pinneo-NIG-1969;Clade I)__AIT17836__GPCmut9 (opt1)

SEQ ID NO: 36173 - RNA, 1655 nt, Artificial Sequence
  mRNA product Design i-3 (hSL-A64-N5) comprising derived and/or modified sequence from LASV(ISTH0009-NIG-2011;Clade II)__AIT17404__GPCmut9 (opt1)
aggagaaagcuuaccaugggccagaucaucaccuucuuccaggaggugccccacgucaucgaggaggugaugaacaucgugcugaucgcccucagccugcuggccauccucaaggggaucuacaacgucgcgaccugcggccuguucgggcugguguccuuccuccugcugugcggccgcagcugcuccacgaccuacaaggggguguacgagcuccagacccuggagcuggacauggccagccucaacaugaccaugccgcuguccugcacgaagaacaacagccaccacuacaucauggucggcaacgagaccggccuggagcucacccugaccaacacguccaucaucaaccacaaguucugcaaccugagcgacgcccacaagaagaaccucuacgaccacgcccugauguccaucaucagcaccuuccaccuguccauccccaacuucaaccaguacgaggccaugagcugcgacuucaacgggggcaagaucuccgugcaguacaaccucagccacgcguacgccguggacgccgccaaccacugcgggaccaucgcgaacggcguccugcagaccuucaugcggauggccuggggcggguccuacaucgcccuggacagcggcugcggguccugggacugcaucaugacgagcuaccaguaccucaucauccagaacaccaccugggaggaccacugccaguucucccgccccagccccaucggcuaccuggggcugcucagccagcggacccgcgacaucuacaucucccggcgccugcugggcacguucaccuggacccucagcgacuccgagggcaacgagacccccgggggcuacugccugacgcgguggaugcugaucgaggccgagcucaagugcuucgggaacaccgccguggcgaagugcaacgagaagcacgacgaggaguucugcgacaugcugcgccuguucgacuucaacaagcaggccauccggcgccucaagaccgaggcccagaugagcauccagcugaucaacaaggccgugaacgcccugaucaacgaccagcucaucaugaagaaccaccuccgggacaucaugugcaucccguacugcaacuacuccaaguacugguaccugaaccacaccgucacgggcaagaccagccugccccgcugcuggcugguguccaacgggagcuaccugaacgagacccacuucuccgacgacaucgagcagcaggcggacaacaugaucaccgagcuccugcagaaggaguacauggaccggcagggcaagacgccccugggccugguggaccucuucgucuucagcaccuccuucuaccugaucagcaucuuccugcaccucaucaagaucccgacccaccgccacaucaccgggaagcccugccccaagccccaccggcugaaccacaugggcaucugcuccugcgggcuguacaagcacccgggcgugcccgugaaguggaagcgcugaggacuaguuauaagacugacuagcccgaugggccucccaacgggcccuccuccccuccuugcaccgagauuaaucaaaggcucuuuucagagccaccaaaaaaaaaaaaaaaaaaaaaaaaaaaaaaaaaaaaaaaaaaaaaaaaaaaaaaaaaaaaaaaaagaauu

SEQ ID NO: 36174 - RNA, 1655 nt, Artificial Sequence
  mRNA product Design i-3 (hSL-A64-N5) comprising derived and/or modified sequence from LASV(ISTH2010-NIG-2012;Clade II)__AIT17482__GPCmut9 (opt1)
aggagaaagcuuaccaugggccagaucaucaccuucuuccaggaggugccccacgucaucgaggaggugaugaacaucgugcugaucgcccucagccugcuggccauccucaaggggaucuacaacgucgcgaccugcggccuguucgggcugguguccuuccuccugcugugcggccgcagcugcuccacgaccuacaaggggguguacgagcuccagacccuggagcuggacauggccagccucaacaugaccaugccgcuguccugcacgaagaacaacagccaccacuacaucauggucggcaacgagaccggccuggagcucacccugaccaacacguccaucaucaaccacaaguucugcaaccugagcgacgcccacaagaagaaccucuacgaccacgcccugauguccaucaucagcaccuuccaccuguccauccccaacuucaaccaguacgaggccaugagcugcgacuucaacgggggcaagaucuccgugcaguacaaccucagccacgcguacgccguggacgccgccaaccacugcgggaccaucgcgaacggcguccugcagaccuucaugcggauggccuggggcggguccuacaucgcccuggacagcggcugcggguccugggacugcaucaugacgagcuaccaguaccucaucauccagaacaucaccugggaggaccacugccaguucucccgccccagccccaucggcuaccuggggcugcucagccagcggacccgcgacaucuacaucucccggcgccugcugggcaccuucacguggacccucagcgacuccgagggcaacgagacccccgggggcuacugccugacccgguggaugcugaucgaggccgagcucaagugcuucgggaacacggccguggcgaagugcaacgagaagcacgacgaggaguucugcgacaugcugcgccuguucgacuucaacaagcaggccauccggcgccucaagaccgaggcccagaugagcauccagcugaucaacaaggccgugaacgcccugaucaacgaccagcucaucaugaagaaccaccuccgggacaucaugugcauccccuacugcaacuacuccaaguacugguaccugaaccacaccgucaccggcaagacgagccugccccgcugcuggcugguguccaacgggagcuaccugaacgagacccacuucuccgacgacaucgagcagcaggcggacaacaugaucaccgagcuccugcagaaggaguacaucgaccggcagggcaagaccccgcugggccugguggaccucuucgucuucagcacguccuucuaccugaucagcaucuuccugcaccucgugaagaucccgacccaccgccacguggucgggaagcccugccccaagccccaccggcugaaccacaugggcaucugcuccugcgggcuguacaagcacccgggcgugcccgugaaguggaagcgcugaggacuaguuauaagacugacuagcccgaugggccucccaacgggcccuccuccccuccuugcaccgagauuaaucaaaggcucuuuucagagccaccaaaaaaaaaaaaaaaaaaaaaaaaaaaaaaaaaaaaaaaaaaaaaaaaaaaaaaaaaaaaaaaaagaauu

SEQ ID NO: 36175 - RNA, 1655 nt, Artificial Sequence
  mRNA product Design i-3 (hSL-A64-N5) comprising derived and/or modified sequence from LASV(Lassa virus/H.sapiens-wt/NGA/2015/ISTH_0543;Clade II)__AVO03639__GPCmut9 (opt1)
aggagaaagcuuaccaugggccagaucaucaccuucuuccaggaggugccccacgucaucgaggaggugaugaacaucgugcugaucgcccucagccugcuggccauccucaaggggaucuacaacgucgcgaccugcggccuguucgggcugguguccuuccuccugcugugcggccgcagcugcuccacgaccuacaaggggguguacgagcuccagacccuggagcuggacauggccaaccucaacaugaccaugccgcugagcugcacgaagaacaacucccaccacuacaucauggucggcaacgagaccggccuggagcucacccugaccaacacgagcaucaucaaccacaaguucugcaaccuguccgacgcccacaagaagaaccucuacgaccacgcccugaugagcaucaucuccaccuuccaccugagcauccccaacuucaaccaguacgaggccauguccugcgacuucaacgggggcaagaucagcgugcaguacaaccucucccacaccuacgcgguggacgccgccaaccacugcgggaccaucgccaacggcguccugcagacguucaugcggauggcguggggcgggagcuacaucgcccuggacuccggcugcgggagcugggacugcaucaugaccuccuaccaguaccucgugauccagaacaccaccugggaggaccacugccaguucagccgccccucccccaucggcuaccuggggcugcucagccagcggacgcgcgacaucuacaucagccggcgccugcugggcaccuucaccuggacccucuccgacagcgagggcaacgagacgcccgggggcuacugccugacccgguggaugcugaucgaggccgagcucaagugcuucgggaacaccgccguggccaagugcaacgagaagcacgacgaggaguucugcgacaugcugcgccuguucgacuucaacaagcaggcgauccggcgccucaagaccgaggcccagauguccauccagcugaucaacaaggccgucaacgcccugaucaacgaccagcucaucaugaagaaccaccuccgggacaucaugugcauccccuacugcaacuacagcaaguacugguaccugaaccacacggugaccggcaagaccucccugccccgcugcuggcuggugagcaacggguccuaccugaacgagacccacuucagcgacgacaucgagcagcaggccgacaacaugaucacggagcuccugcagaaggaguacaucgaccggcagggcaagaccccgcugggccuggucgaccucuucguguucuccaccagcuucuaccugaucuccaucuuccugcaccucgugaagaucccgacccaccgccacaucacggggaagcccugccccaagccccaccggcugaaccacaugggcaucugcagcugcgggcuguacaagcacccgggcguccccgugaaguggaagcgcugaggacuaguuauaagacugacuagcccgaugggccucccaacgggcccuccuccccuccuugcaccgagauuaaucaaaggcucuuuucagagccaccaaaaaaaaaaaaaaaaaaaaaaaaaaaaaaaaaaaaaaaaaaaaaaaaaaaaaaaaaaaaaaaaagaauu

SEQ ID NO: 36176 - RNA, 1655 nt, Artificial Sequence
  mRNA product Design i-3 (hSL-A64-N5) comprising derived and/or modified sequence from LASV(Lassa virus/H.sapiens-wt/NGA/2016/ISTH_0009;Clade II)__AVO03571__GPCmut9 (opt1)
aggagaaagcuuaccaugggccagaucaucaccuucuuccaggaggugccccacgucaucgaggaggugaugaacaucgugcugaucgcccucagccugcuggccauccucaaggggaucuacaacgucgcgaccugcggccugcuggggcucguguccuuccugcugcucugcggccgcagcugcuccacgaccuacaaggggguguacgagcugcagacccuggagcucgacauggccagccugaacaugaccaugccgcuguccugcacgaagaacaacagccaccacuacaucauggucggcaacgagaccggccucgagcugacccugaccaacacguccaucaucaaccacaaguucugcaaccucagcgacgcccacaagaagaaccuguacgaccacgcccugauguccaucaucagcaccuuccaccucuccauccccaacuucaaccaguacgaggccaugagcugcgacuucaacgggggccggaucuccgugcaguacaaccugagccacuccuacgcgguggacgccgccaaccacugcgggaccaucgccaacggcguccugcagaccuucaugcgcauggcguggggcgggagcuacaucgcccucgacuccggcugcgggagcugggacugcaucaugacguccuaccaguaccugaucauccagaacaccaccugggaggaccacugccaguucagccggcccagccccaucggcuaccuggggcuccugucccagcgcacccgggacaucuacaucagccgccggcugcucggcacguucaccuggacccuguccgacagcgagggcaacgagacccccgggggcuacugccugacgcgcuggaugcucaucgaggccgagcugaagugcuucgggaacaccgccguggccaagugcaacgagaagcacgacgaggaguucugcgacaugcugcggcuguucgacuucaacaagcaggcgauccgccggcugaagaccgaggcccagauguccauccagcugaucaacaaggccgugaacgcccucaucaacgaccagcugaucaugaagaaccaccuccgcgacaucaugugcaucccguacugcaacuacagcaaguacugguaccucaaccacaccgucacgggcaagaccucccugccccggugcuggcuggugagcaacggguccuaccucaacgagacccacuucagcgacgacaucgagcagcaggccgacaacaugaucaccgagcugcugcagaaggaguacaucgaccgccagggcaagacgccccugggccucguggaccuguucgucuucuccaccagcuucuaccugaucuccaucuuccuccaccuggugaagaucccgacccaccggcacaucaccgggaagcccugccccaagccccaccgccugaaccacaugggcaucugcagcugcgggcucuacaaccacccgggcgugcccgucaaguggaagcggugaggacuaguuauaagacugacuagcccgaugggccucccaacgggcccuccuccccuccuugcaccgagauuaaucaaaggcucuuuucagagccaccaaaaaaaaaaaaaaaaaaaaaaaaaaaaaaaaaaaaaaaaaaaaaaaaaaaaaaaaaaaaaaaaagaauu

SEQ ID NO: 36177 - RNA, 1655 nt, Artificial Sequence
  mRNA product Design i-3 (hSL-A64-N5) comprising derived and/or modified sequence from LASV(Lassa virus/H.sapiens-wt/NGA/2016/ISTH_0017;Clade II)__AVO03567__GPCmut9 (opt1)
aggagaaagcuuaccaugggccagaucaucaccuucuuccaggaggugccccacgucaucgaggaggugaugaacaucgugcugaucgcccucagccugcuggccauccucaaggggaucuacaacgucgcgaccugcggccuguucgggcugguguccuuccuccugcugugcggccgcagcugcuccacgaccuacaaggggguguacgagcuccagacccuggagcuggacauggccagccucaacaugaccaugccgcuguccugcacgaagaacaacagccaccacuacaucauggucggcaacgagaccggccuggagcucacccugaccaacacguccaucaucaaccacaaguucugcaaccugagcgacgcccacaagaagaaccucuacgaccacgcccugauguccaucaucagcaccuuccaccuguccauccccaacuucaaccaguacgaggccaugagcugcgacuucaacgggggcaagaucuccgugcaguacaaccucagccacaccuacgcgaucgacgccgccaaccacugcgggaccaucgccaacggcgugcugcagacguucaugcggauggcguggggcggguccuacaucgcccuggacagcggcugcggguccugggacugcaucaugaccagcuaccaguaccucaucauccagaacaccaccugggaggaccacugccaguucucccgccccagccccaucggcuaccuggggcugcucagccagcggacgcgcgacaucuacaucucccggcgccugcugggcaccuucaccuggacccucagcgacuccgagggcaacgagacgcccgggggcuacugccugacccgguggaugcugaucgaggccgagcucaagugcuucgggaacaccgccgucgccaagugcaacgagaagcacgacgaggaguucugcgacaugcugcgccuguucgacuucaacaagcaggcgauccggcgccucaagaccgaggcccagaugagcauccagcugaucaacaaggccgugaacgcccugaucaacgaccagcucaucaugaagaaccaccuccgggacaucaugugcauccccuacugcaacuacuccaaguacugguaccugaaccacacggugaccggcaagaccagccugccccgcugcuggcuggucuccaacgggagcuaccugaacgagacccacuucuccgacgacaucgagcagcaggccgacaacaugaucacggagcuccugcagaaggaguacauggaccggcagggcaagaccccgcugggccugguggaccucuucguguucagcaccuccuucuaccugaucagcaucuuccugcaccucguccgcaucccgacccaccggcacgugaucgggaagcccugccccaagccccaccgccugaaccacaugggcaucugcuccugcgggcuguacaagcacccgggcgugcccgucaaguggaagcggugaggacuaguuauaagacugacuagcccgaugggccucccaacgggcccuccuccccuccuugcaccgagauuaaucaaaggcucuuuucagagccaccaaaaaaaaaaaaaaaaaaaaaaaaaaaaaaaaaaaaaaaaaaaaaaaaaaaaaaaaaaaaaaaaagaauu

SEQ ID NO: 36178 - RNA, 1655 nt, Artificial Sequence
  mRNA product Design i-3 (hSL-A64-N5) comprising derived and/or modified sequence from LASV(Lassa virus/H.sapiens-wt/NGA/2018/ISTH_0959;Clade II)__AVV65099__GPCmut9 (opt1)
aggagaaagcuuaccaugggccagaucaucaccuucuuccaggaggugccccacgucaucgaggaggugaugaacaucgugcugaucgcccucagccugcuggccauccucaaggggaucuacaacgucgugaccugcggccuguucgggcugguguccuuccuccugcugugcggccgcagcugcuccacgaccuacaagggggucuacgagcuccagacccuggagcuggacauggcgagccucaacaugaccaugccgcuguccugcacgaagaacaacagccaccacuacaucauggugggcaacgagaccggccuggagcucacccugaccaacacguccaucaucaaccacaaguucugcaaccugagcgacgcccacaagaagaaccucuacgaccacgcccugauguccaucaucagcaccuuccaccuguccauccccaacuucaaccaguacgaggccaugagcugcgacuucaacgggggcaagaucuccgugcaguacaaccucagccacgccuacgcgaucgacgccgccaaccacugcgggaccaucgccaacggcguccugcagaccuucaugcggauggcguggggcggguccuacaucgcccuggacagcggcugcggguccugggacugcaucaugacgagcuaccaguaccucaucauccagaacaccaccugggaggaccacugccaguucucccgccccagccccaucggcuaccuggggcugcucagccagcggacccgcgacaucuacaucucccggcgccugcugggcacguucaccuggacccucagcgacuccgagggcaacgagacccccgggggcuacugccugacgcgguggaugcugaucgaggccgagcucaagugcuucgggaacaccgccguggccaagugcaacgagaagcacgacgaggaguucugcgacaugcugcgccuguucgacuucaacaagcaggcgauccggcgccucaagaccgaggcccagaugagcauccagcugaucaacaaggccgugaacgcccugaucaacgaccagcucaucaugaagaaccaccuccgggacaucaugugcaucccguacugcaacuacuccaaguacugguaccugaaccacaccgucacgggcaagaccagccugccccgcugcuggcugguguccaacgggagcuaccugaacgagacccacuucuccgacgacaucgagcagcaggccgacaacaugaucaccgagcuccugcagaaggaguacaucgaccggcagggcaagacgccccugggccugguggaccucuucgucuucagcaccuccuucuaccugaucagcaucuuccugcaccucgugaagaucccgacccaccgccacgugaucgggaagcccugccccaagccccaccggcugaaccacaugggcaucugcuccugcgggcuguacaagcacccgggcguccccgugaaguggaagcgcugaggacuaguuauaagacugacuagcccgaugggccucccaacgggcccuccuccccuccuugcaccgagauuaaucaaaggcucuuuucagagccaccaaaaaaaaaaaaaaaaaaaaaaaaaaaaaaaaaaaaaaaaaaaaaaaaaaaaaaaaaaaaaaaaagaauu

SEQ ID NO: 36179 - RNA, 1655 nt, Artificial Sequence
  mRNA product Design i-3 (hSL-A64-N5) comprising derived and/or modified sequence from LASV(LASV003-NIG-2008;Clade II)__AIT17580__GPCmut9 (opt1)
aggagaaagcuuaccaugggccagaucaucaccuucuuccaggaggugccccacgucaucgaggaggugaugaacaucgugcugaucgcccucagccugcuggccauccucaaggggaucuacaacgucgcgaccugcggccuguucgggcugguguccuuccuccugcugugcggccgcagcugcuccacgaccuacaaggggguguacgagcuccagacccuggagcuggacauggccagccucaacaugaccaugccgcuguccugcacgaagaacaacagccaccacuacaucauggucggcaacgagaccggccuggagcucacccugaccaacacguccaucaucaaccacaaguucugcaaccugagcgacgcccacaagaagaaccucuacgaccacgcccugauguccaucaucagcaccuuccaccuguccauccccaacuucaaccaguacgaggccaugagcugcgacuucaacgggggcaagaucuccgugcaguacaaccucagccacaccuacgcgguggacgccgccaaccacugcgggaccaucgccaacggcguccugcagacguucaugcggauggcguggggcggguccuacaucgcccuggacagcggcugcggguccugggacugcaucaugaccagcuaccaguaccucaucauccagaacaccaccugggaggaccacugccaguucucccgccccagccccaucggcuaccuggggcugcucagccagcggacgcgcgacaucuacaucucccggcgccugcugggcaccuucaccuggacccucagcgacuccgagagcaacgagacgccgggcggguacugccugacccgguggaugcugaucgaggccgagcucaagugcuucggcaacaccgccguggccaagugcaacgagaagcacgacgaggaguucugcgacaugcugcgccuguucgacuucaacaagcaggcgauccggcgccucaaggccgaggcccagauguccauccagcugaucaacaaggccgugaacgcccugaucaacgaccagcucaucaugaagaaccaccuccgggacaucaugugcauccccuacugcaacuacagcaaguacugguaccugaaccacaccgucacggggcgcaccucccugccccggugcuggcuggugagcaacggcuccuaccugaacgagacccacuucagcgacgacaucgagcagcaggcggacaacaugaucaccgagcuccugcagaaggaguacauggaccgccaggggaagacgccccugggccugguggaccucuucgucuucuccaccagcuucuaccugaucuccaucuuccugcaccucgugaagaucccgacccaccggcacgugaucggcaagcccugccccaagccccaccgccugaaccacauggggaucugcagcugcggccuguacaagcacccggggguccccgugaaguggaagcggugaggacuaguuauaagacugacuagcccgaugggccucccaacgggcccuccuccccuccuugcaccgagauuaaucaaaggcucuuuucagagccaccaaaaaaaaaaaaaaaaaaaaaaaaaaaaaaaaaaaaaaaaaaaaaaaaaaaaaaaaaaaaaaaaagaauu

SEQ ID NO: 36180 - RNA, 1655 nt, Artificial Sequence
  mRNA product Design i-3 (hSL-A64-N5) comprising derived and/or modified sequence from LASV(LASV035-NIG-2009;Clade II)__AIT17588__GPCmut9 (opt1)
aggagaaagcuuaccaugggccagaucaucaccuucuuccaggaggugccccacgucaucgaggaggugaugaacaucgugcugaucgcccucagccugcuggccauccucaaggggaucuacaacgucgcgaccugcggccuguucgggcugguguccuuccuccugcugugcggccgcagcugcuccacgaccuacaaggggguguacgagcuccagacccuggagcuggacauggccagccucaacaugaccaugccgcuguccugcacgaagaacaacagccaccacuacaucauggucggcaacgagaccggccuggagcucacccugaccaacacguccaucaucaaccacaaguucugcaaccugagcgacgcccacaagaagaaccucuacgaccacgcccugauguccaucaucagcaccuuccaccuguccauccccaacuucaaccaguacgaggccaugagcugcgacuucaacgggggcaagaucuccgugcaguacaaccucagccacgcguacgccguggacgccgccaaccacugcgggaccaucgcgaacggcguccugcagaccuucaugcggauggccuggggcggguccuacaucgcccuggacagcggcugcggguccugggacugcaucaugacgagcuaccaguaccucaucauccagaacaccaccugggaggaccacugccaguucucccgccccagccccaucggcuaccuggggcugcucagccagcggacccgcgacaucuacaucucccggcgccugcugggcacguucaccuggacccucagcgacuccgagggcaacgagacccccgggggcuacugccugacgcgguggaugcugaucgaggccgagcucaagugcuucgggaacaccgccguggcgaagugcaacgagaagcacgacgaggaguucugcgacaugcugcgccuguucgacuucaacaagcaggccauccggcgccucaaggccgaggcccagaugagcauccagcugaucaacaaggccgugaacgcgcugaucaacgaccagcucaucaugaagaaccaccuccgggacaucaugugcauccccuacugcaacuacuccaaguacugguaccugaaccacaccgucaccggcaagacgagccugccccgcugcuggcugguguccaacgggagcuaccugaacgagacccacuucuccgacgacaucgagcagcaggccgacaacaugaucaccgagcuccugcagaaggaguacaucgaccggcagggcaagaccccgcugggccugguggaccucuucgucuucagcacguccuucuaccugaucagcaucuuccugcaccucgugaagaucccgacccaccgccacgugaucgggaagcccugccccaagccccaccggcugaaccacaugggcaucugcuccugcgggcuguacaagcacccgggcguccccgugaaguggaagcgcugaggacuaguuauaagacugacuagcccgaugggccucccaacgggcccuccuccccuccuugcaccgagauuaaucaaaggcucuuuucagagccaccaaaaaaaaaaaaaaaaaaaaaaaaaaaaaaaaaaaaaaaaaaaaaaaaaaaaaaaaaaaaaaaaagaauu

SEQ ID NO: 36181 - RNA, 1655 nt, Artificial Sequence
  mRNA product Design i-3 (hSL-A64-N5) comprising derived and/or modified sequence from LASV(LASV1000-NIG-2009;Clade II)__AIT17782__GPCmut9 (opt1)
aggagaaagcuuaccaugggccagaucaucaccuucuuccaggaggugccccacgucaucgaggaggugaugaacaucgugcugaucgcccucagccugcuggccauccucaaggggaucuacaacgucgcgaccugcggccuguucgggcugguguccuuccuccugcugugcggccgcagcugcuccacgaccuacaaggggguguacgagcuccagacccuggagcuggacauggccagccucaacaugaccaugccgcuguccugcacgaagaacaacagccaccacuacaucauggucggcaacgagaccggccuggagcucacccugaccaacacguccaucaucaaccacaaguucugcaaccugagcgacgcccacaagaagaaccucuacgaccacgcccugauguccaucaucagcaccuuccaccuguccauccccaacuucaaccaguacgaggccaugagcugcgacuucaacgggggcaagaucuccgugcaguacaaccucagccacaccuacgcgguggacgccgccaaccacugcgggaccaucgccaacggcguccugcagacguucaugcggauggcguggggcggguccuacaucgcccuggacagcggcugcggguccugggacugcaucaugaccagcuaccaguaccucaucauccagaacaccaccugggaggaccacugccaguucucccgccccagccccaucggcuaccuggggcugcucagccagcggacgcgcgacaucuacaucucccggcgccugcugggcaccuucaccuggacccucagcgacuccgagggcaacgagacgcccgggggcuacugccugacccgguggaugcugaucgaggccgagcucaagugcuucgggaacaccgccguggccaagugcaacgagaagcacgacgaggaguucugcgacaugcugcgccuguucgacuucaacaagcaggcgaucaagcggcucaagaccgaggcccagaugagcauccagcugaucaacaaggccgugaacgcccugaucaacgaccagcucaucaugaagaaccaccuccgcgacaucaugugcauccccuacugcaacuacuccaaguacugguaccugaaccacacggucaccggcaagaccagccugccccggugcuggcugguguccaacgggagcuaccugaacgagacccacuucuccgacgacaucgagcagcaggccgacaacaugaucacggagcuccugcagaaggaguacaucgaccgccagggcaagaccccgcugggccugguggaccucuucgucuucagcaccuccuucuaccugaucagcaucuuccugcaccucgugaagaucccgacccaccggcacguggucgggaagcccugccccaagccccaccgccugaaccacaugggcaucugcuccugcgggcuguacaagcacccgggcgugcccgugaaguggaagcggugaggacuaguuauaagacugacuagcccgaugggccucccaacgggcccuccuccccuccuugcaccgagauuaaucaaaggcucuuuucagagccaccaaaaaaaaaaaaaaaaaaaaaaaaaaaaaaaaaaaaaaaaaaaaaaaaaaaaaaaaaaaaaaaaagaauu

SEQ ID NO: 36182 - RNA, 1655 nt, Artificial Sequence
  mRNA product Design i-3 (hSL-A64-N5) comprising derived and/or modified sequence from LASV(LASV221-NIG-2010;Clade II)__AIT17624__GPCmut9 (opt1)
aggagaaagcuuaccaugggccagaucaucaccuucuuccaggaggugccccacgucaucgaggaggugaugaacaucgugcugaucgcccucagccugcuggccauccucaaggggaucuacaacgucgcgaccugcggccuguucgggcugguguccuuccuccugcugugcggccgcagcugcuccacgaccuacaaggggguguacgagcuccagacccuggagcuggacauggccagccucaacaugaccaugccgcuguccugcacgaagaacaacagccaccacuacaucauggucggcaacgagaccggccuggagcucacccugaccaacacguccaucaucaaccacaaguucugcaaccugagcgacgcccacaagaagaaccucuacgaccacgcccugauguccaucaucagcaccuuccaccuguccauccccaacuucaaccaguacgaggccaugagcugcgacuucaacgggggcaagaucuccgugcaguacaaccucagccacaccuacgcgaucgacgccgccaaccacugcgggaccaucgccaacggcgugcugcagacguucaugcggauggcguggggcggguccuacaucgcccuggacagcggcugcggguccugggacugcaucaugaccagcuaccaguaccucaucauccagaacaccaccugggaggaccacugccaguucucccgccccagccccaucggcuaccuggggcugcucagccagcggacgcgcgacaucuacaucucccggcgccugcugggcaccuucaccuggacccucagcgacuccgagggcaacgagacgcccgggggcuacugccugacccgguggaugcugaucgaggccgagcucaagugcuucgggaacaccgccgucgccaagugcaacgagaagcacgacgaggaguucugcgacaugcugcgccuguucgacuucaacaagcaggcgauccggcgccucaagaccgaggcccagaugagcauccagcugaucaacaaggccgugaacgcccugaucaacgaccagcucaucaugaagaaccaccuccgggacaucaugugcauccccuacugcaacuacuccaaguacugguaccugaaccacacggugaccggcaagaccagccugccccgcugcuggcuggucuccaacgggagcuaccugaacgagacccacuucuccgacgacaucgagcagcaggccgacaacaugaucacggagaugcuccagaaggaguacauggaccggcagggcaagaccccgcugggccugguggaccuguucguguucagcaccuccuucuaccucaucagcaucuuccugcaccuggucaagaucccgacccaccgccacgugaucgggaagcccugccccaagccccaccggcucaaccacaugggcaucugcuccugcgggcuguacaagcacccgggcgugcccgucaaguggaagcgcugaggacuaguuauaagacugacuagcccgaugggccucccaacgggcccuccuccccuccuugcaccgagauuaaucaaaggcucuuuucagagccaccaaaaaaaaaaaaaaaaaaaaaaaaaaaaaaaaaaaaaaaaaaaaaaaaaaaaaaaaaaaaaaaaagaauu

SEQ ID NO: 36183 - RNA, 1655 nt, Artificial Sequence
  mRNA product Design i-3 (hSL-A64-N5) comprising derived and/or modified sequence from LASV(LASV237-NIG-2010;Clade II)__AIT17638__GPCmut9 (opt1)
aggagaaagcuuaccaugggccagaucaucaccuucuuccaggaggugccccacgucaucgaggaggugaugaacaucgugcugaucgcccucagccugcuggccauccucaaggggaucuacaacgucgcgaccugcggccuguucgggcugguguccuuccuccugcugugcggccgcagcugcuccacgaccuacaaggggguguacgagcuccagacccuggagcuggacauggccagccucaacaugaccaugccgcuguccugcacgaagaacaacagccaccacuacaucauggucggcaacgagaccggccuggagcucacccugaccaacacguccaucaucaaccacaaguucugcaaccugagcgacgcccacaagaaggaccucuacgaccacgcccugauguccaucaucagcaccuuccaccuguccauccccaacuucaaccaguacgaggccaugagcugcgacuucaacgggggcaagaucuccgugcaguacaaccucagccacaccuacgcgguggacgccgccaaccacugcgggaccaucgccaacggcguccugcagacguucaugcggauggcguggggcggguccuacaucgcccuggacagcggcugcggguccugggacugcaucaugaccagcuaccaguaccucaucauccagaacaccaccugggaggaccacugccaguucucccgccccagccccaucggcuaccuggggcugcucagccagcggacgcgcgacaucuacaucucccggcgccugcugggcaccuucaccuggacccucagcgacuccgagggcaacgagacgcccgggggcuacugccugacccgguggaugcugaucgaggccgagcucaagugcuucgggaacaccgccguggccaagugcaacgagaagcacgacgaggaguucugcgacaugcugcgccuguucgacuucaacaagcaggcgauccggcgccucaagaccgaggcccagaugagcauccagcugaucaacaaggccgugaacgcccugaucaacgaccagcucaucaugaagaaccaccuccgggacaucaugugcauccccuacugcaacuacuccaaguacugguaccugaaccacacggucaccggcaagaccagccugccccgcugcuggcugguguccaacgggagcuaccugaacgagacccacuucuccgacgacaucgagcagcaggccgacaacaugaucacggagcuccugcagaaggaguacauggaccggcagggcaagaccccgcugggccugguggaccucuucgucuucagcaccuccuucuaccugaucagcaucuuccugcaccucaucaagaucccgacccaccgccacaucacggggaagcccugccccaagccccaccggcugaaccacaugggcaucugcuccugcgggcuguacaagcacccgggcgugcccgugaaguggaagcgcugaggacuaguuauaagacugacuagcccgaugggccucccaacgggcccuccuccccuccuugcaccgagauuaaucaaaggcucuuuucagagccaccaaaaaaaaaaaaaaaaaaaaaaaaaaaaaaaaaaaaaaaaaaaaaaaaaaaaaaaaaaaaaaaaagaauu

SEQ ID NO: 36184 - RNA, 1655 nt, Artificial Sequence
  mRNA product Design i-3 (hSL-A64-N5) comprising derived and/or modified sequence from LASV(LASV253-NIG-2011;Clade II)__AIT17670__GPCmut9 (opt1)
aggagaaagcuuaccaugggccagaucaucaccuucuuccaggaggugccccacgucaucgaggaggugaugaacaucgugcugaucgcccucagccugcuggccauccucaaggggaucuacaacgucgcgaccugcggccuguucgggcugguguccuuccuccugcugugcggccgcagcugcuccacgaccuacaaggggguguacgagcuccagacccuggagcuggacauggccagccucaacaugaccaugccgcuguccugcacgaagaacaacagccaccacuacaucauggucggcaacgagaccggccuggagcucacccugaccaacacguccaucaucaaccacaaguucugcaaccugagcgacgcccacaagaagaaccucuacgaccacgcccugauguccaucaucagcaccuuccaccuguccauccccaacuucaaccaguacgaggccaugagcugcgacuucaacgggggcaagaucuccgugcaguacaaccucagccacaccuacgcgguggacgccgccaaccacugcgggaccaucgccaacggcguccugcagacguucaugcggauggcguggggcggguccuacaucgcccuggacagcggcugcggguccugggacugcaucaugaccagcuaccaguaccucaucauccagaacaccaccugggaggaccacugccaguucucccgccccagccccaucggcuaccuggggcugcucagccagcggacgcgcgacaucuacaucucccggcgccugcugggcaccuucaccuggacccucagcgacuccgagggcaacgagacgcccgggggcuacugccugacccgguggaugcugaucgaggccgagcucaagugcuucgggaacaccgccguggccaagugcaacgagaagcacgacgaggaguucugcgacaugcugcgccuguucgacuucaacaagcaggcgauccggcgccucaaggccgaggcccagaugagcauccagcugaucaacaaggccgugaacgcccugaucaacgaccagcucaucaugaagaaccaccuccgggacaucaugugcaucccguacugcaacuacuccaaguacugguaccugaaccacaccgucacgggccgcaccagccugccccggugcuggcugguguccaacgggagcuaccugaacgagacccacuucuccgacgacaucgagcagcaggcggacaacaugaucaccgagcuccugcagaaggaguacaucgaccgccagggcaagacgccccugggccugguggaccucuucgucuucagcaccuccuucuaccugaucagcaucuuccugcaccucgugaagaucccgacccaccggcacaucaucgggaagcccugccccaagccccaccgccugaaccacaugggcaucugcuccugcgggcuguacaagcacccgggcgugcccgucaaguggaagcggugaggacuaguuauaagacugacuagcccgaugggccucccaacgggcccuccuccccuccuugcaccgagauuaaucaaaggcucuuuucagagccaccaaaaaaaaaaaaaaaaaaaaaaaaaaaaaaaaaaaaaaaaaaaaaaaaaaaaaaaaaaaaaaaaagaauu

SEQ ID NO: 36185 - RNA, 1655 nt, Artificial Sequence
  mRNA product Design i-3 (hSL-A64-N5) comprising derived and/or modified sequence from LASV(LASV254-NIG-2011;Clade II)__AIT17674__GPCmut9 (opt1)
aggagaaagcuuaccaugggccagaucaucaccuucuuccaggaggugccccacgucaucgaggaggugaugaacaucgugcugaucgcccucagccugcuggccauccucaaggggaucuacaacgucgcgaccugcggccuguucgggcugguguccuuccuccugcugugcggccgcagcugcuccacgaccuacaaggggguguacgagcuccagacccuggagcuggacaugaccaaccucaacaugacgaugccgcugagcugcaccaagaacaacucccaccacuacaucauggucggcaacgagaccggccuggagcucacccugacgaacaccagcaucaucaaccacaaguucugcaaccuguccgacgcccacaagaagaaccucuacaaccacgcccugaugagcaucaucuccaccuuccaccugagcauccccaacuucaaccaguacgaggccauguccugcgacuucaacgggggcaagaucagcgugcaguacaaccucucccacagcuacgccguggacgcggccaaccacugcgggaccaucgccaacggcguccugcagacguucaugcggauggccuggggcggguccuacaucgcgcuggacagcggcugcgggaacugggacugcaucaugaccuccuaccaguaccucaucauccagaacaccaccugggaggaccacugccaguucagccgccccucccccaucggcuaccuggggcugcucagccagcggacgcgcgacaucuacaucagccggcgccugcugggcaccuucaccuggacccucuccgacagcgagggcaacgagacgcccgggggcuacugccugacccgguggaugcugaucgaggccgagcucaagugcuucgggaacaccgccguggccaagugcaacgagaagcacgacgaggaguucugcgacaugcugcgccuguucgacuucaacaagcaggccauccggcgccucaagaccgaggcgcaggccaacauccagcugaucaacaaggccgugaacgcccugaucaacgaccagcucaucaugaagaaccaccuccgggacaucaugugcauccccuacugcaacuacuccaaguacugguaccugaaccacacggucaccggcaagaccagccugccccgcugcuggcugguguccaacgggagcuaccugaacgagacccacuucuccgacgacaucgagcagcaggccgacaacaugaucacggagcuccugcagaaggaguacauggaccggcagggcaagaccccgcugggccugguggaccucuucgucuucagcaccuccuucuaccugaucagcaucuuccugcaccucgugaagaucccgacccaccgccacgugaucgggaagcccugccccaagccccaccggcugaaccacaugggcaucugcuccugcgggcuguacaagcacccgggcguccccgugaaguggaagcgcugaggacuaguuauaagacugacuagcccgaugggccucccaacgggcccuccuccccuccuugcaccgagauuaaucaaaggcucuuuucagagccaccaaaaaaaaaaaaaaaaaaaaaaaaaaaaaaaaaaaaaaaaaaaaaaaaaaaaaaaaaaaaaaaaagaauu

SEQ ID NO: 36186 - RNA, 1655 nt, Artificial Sequence
  mRNA product Design i-3 (hSL-A64-N5) comprising derived and/or modified sequence from LASV(Nig08-A19;Clade III)__ADU56618__GPCmut9 (opt1)
aggagaaagcuuaccaugggccagaucgugaccuucuuccaggaggucccccacgugaucgaggaggugaugaacaucguccugaucgcccucagcauccuggccauccugaaggggcucuacaacaucgcgaccugcggccugaucgggcuggugacguuccuccugcuguccggccgcagcugcuccaugaccuacaaggggguguacgagcuccagacccuggagcugaacaugaacacccucaacaugacgaugccgcugagcugcaccaagaacaacucccaccacuacaucauggucggcaacgagaccggccuggagcucacccugacgaacaccagccugcuccaccacaaguucugcaaccuguccgacgcccacaagaagaaccuguacgaccacacccucaugagcaucaucuccaccuuccaccugagcauccccaacuucaaccaguacgaggccauguccugcgacuucaacgggggcaagaucacggugcaguacaaccugagccacuccuacgccaucgacgccgcgaaccacugcgggaccguggccaacggcguccuccagaccuucaugcggauggccuggggcgggagcuacaucgcccuggacuccggcugcgggaagugggacugcaucaugaccagcuaccaguaccugaucauccagaacacgaccugggaggaccacugccaguucucccgccccagccccaucggcuaccucgggcugcugucccagcggacccgcgacaucuacaucagccggcgccuccugggcaccuucacguggacccugagcgacuccgagggcaacgagacccccgggggcuacugccucacccgguggaugcugaucgaggcggagcugaagugcuucgggaacacggccguggccaagugcaacgagaagcacgacgaggaguucugcgacaugcuccgccuguucgacuucaacaagcaggccauccggcgccugaaggccgaggcgcagaugagcauccagcucaucaacaaggccgugaacgcccugaucaacgaccagcugaucaugaagaaccaccuccgggacaucaugugcauccccuacugcaacuacuccaaguacugguaccugaaccacaccagcaccggccgcaccucccugccccggugcuggcucgucagcaacggguccuaccugaacgagacgcacuucagcgacgacaucgagcagcaggccgacaacaugaucaccgagaugcugcagaaggaguaccuggaccgccagggcaagaccccgcucggccugguggaccuguucguguucuccaccagcuucuaccucaucuccaucuuccugcaccuggucaagaucccgacgcaccggcacaucguggggaagcccugccccaagccccaccgccucaaccacaugggcaucugcagcugcgggcuguacaagcagccgggcgugcccguccgguggaagcgcugaggacuaguuauaagacugacuagcccgaugggccucccaacgggcccuccuccccuccuugcaccgagauuaaucaaaggcucuuuucagagccaccaaaaaaaaaaaaaaaaaaaaaaaaaaaaaaaaaaaaaaaaaaaaaaaaaaaaaaaaaaaaaaaaagaauu

SEQ ID NO: 36187 - RNA, 1658 nt, Artificial Sequence
  mRNA product Design i-3 (hSL-A64-N5) comprising derived and/or modified sequence from LASV(G1180-SLE-2010;Clade IV)__AIT17168__GPCmut9 (opt1)
aggagaaagcuuaccaugggccagaucgugaccuucuuccaggaggucccccacgugaucgaggaggugaugaacaucguccugaucgcccucagcauccuggccgugcugaaggggcucuacaacuucgcgaccugcggccugguggggcugcucaccuuccugcugcucugcggccgcuccugcaccgccagccgguacaagggggucuacgagcugcagacccuggagcucaacauggagacccugaacaugacgaugccgcuguccugcaccaagaacaacagccaccacuacaucauggugggcaacgagaccggccucgagcugacccugacgaacaccuccaucaucaaccacaaguucugcaaccucagcgacgcccacaagaagaaccuguacgaccacgcccugauguccaucaucagcaccuuccaccucuccauccccaacuucaaccaguacgaggccaugagcugcgacuucaacgggggcaagaucuccgugcaguacaaccugagccacuccuacgcgggggacgccgccaaccacugcggcaccgucgccaacggggugcugcagacguucaugcgcauggcguggggcggcagcuacaucgcccucgacuccgggugcggcagcugggacugcaucaugaccuccuaccaguaccugaucauccagaacaccaccugggaggaccacugccaguucagccggcccucccccaucggguaccugggccuccugagccagcgcacgcgggacaucuacaucagccgccggcugcucggcaccuucaccuggacccuguccgacagcgaggggaaggacacgccgggcggguacugccugacccgcuggaugcucaucgaggccgagcugaagugcuucggcaacaccgccguggccaagugcaacgagaagcacgacgaggaguucugcgacaugcugcggcuguucgacuucaacaagcaggcgauccagcgccugaaggccgaggcccagauguccauccagcugaucaacaaggccgucaacgcccucaucaacgaccagcugaucaugaagaaccaccuccgggacaucaugugcauccccuacugcaacuacagcaaguacugguaccucaaccacaccacgaccgggaagaccucccugcccaagugcuggcuggugagcaacggcuccuaccucaacgagacccacuucagcgacgacaucgagcagcaggcggacaacaugaucacggagaugcugcagaaggaguacauggagcgccagggcaagacgccccuggggcugguggaccucuucgucuucuccaccagcuucuaccugaucuccaucuuccugcaccucgugaagaucccgacccaccggcacaucgugggcaagagcugccccaagccccaccgccugaaccacauggggaucugcuccugcggccuguacaagcagcccggggucccggugaaguggaagcggugaggacuaguuauaagacugacuagcccgaugggccucccaacgggcccuccuccccuccuugcaccgagauuaaucaaaggcucuuuucagagccaccaaaaaaaaaaaaaaaaaaaaaaaaaaaaaaaaaaaaaaaaaaaaaaaaaaaaaaaaaaaaaaaaagaauu

SEQ ID NO: 36188 - RNA, 1658 nt, Artificial Sequence
  mRNA product Design i-3 (hSL-A64-N5) comprising derived and/or modified sequence from LASV(G1442-SLE-2011;Clade IV)__AIT17180__GPCmut9 (opt1)
aggagaaagcuuaccaugggccagaucgugaccuucuuccaggaggucccccacgugaucgaggaggugaugaacaucguccugaucgcccucagcauccuggccgugcugaaggggcucuacaacguggcgaccugcggccugaucgggcuggucacguuccuccugcugugcggccgcuccugcaccaccacccucuacaaggggguguacgagcugcagacgcuggagcucaacauggagacccugaacaugaccaugccgcugagcugcaccaagaacaacucccaccacuacauccgggugggcaacgagacgggccucgagcugacccugaccaacaccagcaucaucaaccacaaguucugcaaccucuccgacgcccacaagaagaaccuguacgaccacgcccugaugagcaucaucuccacguuccaccucagcauccccaacuucaaccaguacgaggccauguccugcgacuucaacgggggcaagaucagcguccaguacaaccugucccacagcuacgccggggacgcggccaaccacugcggcaccguggccaacggggugcugcagaccuucaugcgcauggccuggggcggcuccuacaucgcgcucgacagcgggugcggcaacugggacugcaucaugaccuccuaccaguaccugaucauccagaacacgaccugggacgaccacugccaguucagccggcccucccccaucggguaccugggccuccugagccagcgcacccgggacgucuacaucucccgccggcugcucggcaccuucacguggacccugagcgacagcgaggggaaggacaccccgggcggguacugccugacccgcuggaugcucaucgaggccgagcugaagugcuucggcaacacggccguggccaagugcaacgagaagcacgacgaggaguucugcgacaugcugcggcuguucgacuucaacaagcaggccauccagcgccugaaggcggaggcccagauguccauccagcugaucaacaaggccgugaacgcccucaucaacgaccagcugaucaugaagaaccaccuccgggacaucaugugcauccccuacugcaacuacagcaaguacugguaccucaacaacaccgccaccgggaagaccucccugcccaagugcuggcugaucagcaacggcuccuaccucaacgagacgcacuucagcgacgacaucgagcaggaggcggacaacaugaucaccgagaugcugcagaaggaguacauggagcgccagggcaagacgccccuggggcuggucgaccucuucguguucuccaccagcuucuaccugaucuccaucuuccugcaccucgugaagaucccgacccaccggcacaucgucggcaagagcugccccaagccccaccgccugaaccacauggggaucugcuccugcggccuguacaagcagcccggggugccggugcgguggaagcgcugaggacuaguuauaagacugacuagcccgaugggccucccaacgggcccuccuccccuccuugcaccgagauuaaucaaaggcucuuuucagagccaccaaaaaaaaaaaaaaaaaaaaaaaaaaaaaaaaaaaaaaaaaaaaaaaaaaaaaaaaaaaaaaaaagaauu

SEQ ID NO: 36189 - RNA, 1658 nt, Artificial Sequence
  mRNA product Design i-3 (hSL-A64-N5) comprising derived and/or modified sequence from LASV(G3010-SLE-2013;Clade IV)__AIT17344__GPCmut9 (opt1)
aggagaaagcuuaccaugggccagaucgugaccuucuuccaggaggucccccacgugaucgaggaggugaugaacaucguccugaucgcccucagcauccuggccgugcugaaggggcucuacaacuucgcgaccugcggccugguggggcuggucacguuccuccugcugugcggccgcuccugcaccaccagccucuacaaggggguguacgagcugcagacccuggagcucaacauggagacgcugaacaugaccaugccgcuguccugcaccaagaacaacagccaccacuacaucauggugggcaacgagaccggccucgagcugacgcugaccaacaccuccaucaucaaccacaaguucugcaaccucagcgacgcccacaagaagaaccuguacaaccacgcccugauguccaucaucagcaccuuccaccucuccauccccaacuucaaccaguacgaggccaugagcugcgacuucaacgggggcaagaucuccguccaguacaaccugagccacuccuacgccggggacgcggccagccacugcggcacgguggccaacggggugcugcagaccuucaugcggauggccuggggcggcuccuacaucgcgcucgacagcgggugcggcaagugggacugcaucaugaccuccuaccaguaccugaucauccagaacaccacgugggaggaccacugccaguucagccgccccucccccaucggguaccugggccuccugagccagcggacccgcgacaucuacaucagccggcgccugcucggcaccuucaccuggacgcuguccgacagcgaggggaaggacaccccgggcggguacugccugacccgguggaugcucaucgaggccgagcugaagugcuucggcaacaccgccgucgccaagugcaacgagaagcacgacgaggaguucugcgacaugcugcgccucuucgacuucaacaagcaggccauccagcggcugaagacggaggcgcagauguccauccagcugaucaacaaggccgugaacgcccucaucaacgaccagcugaucaugaagaaccaccuccgcgacaucaugugcauccccuacugcaacuacagcaaguacugguaccugaaccacaccaccaccgggaagacgucccugcccaagugcuggcuggugagcaacggcuccuaccucaacgagacccacuucagcgacgacaucgagcagcaggccgacaacaugaucaccgagaugcugcagaaggaguacauggagcggcagggcaagacgccccuggggcuggucgaccucuucguguucuccaccagcuucuaccugaucuccaucuuccugcaccucgugaagaucccgacccaccgccacaucgucggcaagagcugccccaagccccaccggcugaaccacauggggaucugcuccugcggccuguacaagcagcccggggugccggugcgcuggaagcggugaggacuaguuauaagacugacuagcccgaugggccucccaacgggcccuccuccccuccuugcaccgagauuaaucaaaggcucuuuucagagccaccaaaaaaaaaaaaaaaaaaaaaaaaaaaaaaaaaaaaaaaaaaaaaaaaaaaaaaaaaaaaaaaaagaauu

SEQ ID NO: 36190 - RNA, 1658 nt, Artificial Sequence
  mRNA product Design i-3 (hSL-A64-N5) comprising derived and/or modified sequence from LASV(G502-SLE-2009;Clade IV)__AIT17126__GPCmut9 (opt1)
aggagaaagcuuaccaugggccagaucgugaccuucuuccaggaggucccccacgugaucgaggaggugaugaacaucguccugaucgcccucagcauccuggccgugcugaaggggcucuacaacuucgcgaccugcggccugguggggcugcucacguuccugcugcucugcggccgcuccugcaccaccgggcuguacaagggcgucuacgagcugcagacccucgagcugaacauggagacgcugaacaugaccaugccgcucagcugcaccaagaacaacucccaccacuacaucauggugggcaacgagaccgggcuggagcugacgcucaccaacaccagcaucaucaaccacaaguucugcaaccuguccgacgcccacaagaagaaccuguacgaccacgcccucaugagcaucaucuccaccuuccaccugagcauccccaacuucaaccaguacgaggccauguccugcgacuucaacggcgggaagaucagcgugcaguacaaccugucccacagcuacgccggcgacgcggccgaccacugcgggacggucgccaacggcgugcuccagaccuucaugcggauggccuggggcggguccuacaucgcgcuggacagcggcugcgggcgcugggacugcaucaugaccuccuaccaguaccugaucauccagaacaccacgugggaggaccacugccaguucagccggcccucccccaucggcuaccucggccugcugagccagcgcacccgggacaucuacaucucccgccggcuccuggggaccuucaccuggacgcugagcgacagcgagggcaaggacacccccgggggcuacugccucacccgcuggaugcugaucgaggccgagcugaagugcuucgggaacaccgccguggccaagugcaacgagaagcacgacgaggaguucugcgacaugcuccggcuguucgacuucaacaagcaggccauccagcgccugaaggcggaggcccagauguccauccagcucaucaacaaggccgucaacgcccugaucaacgaccagcuggugaugaagaaccaccuccgggacaucaugugcauccccuacugcaacuacagccgcuacugguaccugaaccacacgaccaccggccggaccucccugcccaagugcuggcucgugagcaacggcuccuaccugaacgagacgcacuucagcgacgacaucgagcagcaggccgacaacaugaucaccgagaugcugcagaaggaguacauggagcgccaggggaagaccccgcugggccucgucgaccuguucguguucuccaccagcuucuaccugaucuccaucuuccuccaccuggugaagaucccgacgcaccggcacaucgucggcaagagcugccccaagccccaccgccugaaccacauggggaucugcuccugcgggcucuacaagcagcccggcgugccggugaaguggaagcggugaggacuaguuauaagacugacuagcccgaugggccucccaacgggcccuccuccccuccuugcaccgagauuaaucaaaggcucuuuucagagccaccaaaaaaaaaaaaaaaaaaaaaaaaaaaaaaaaaaaaaaaaaaaaaaaaaaaaaaaaaaaaaaaaagaauu

SEQ ID NO: 36191 - RNA, 1658 nt, Artificial Sequence
  mRNA product Design i-3 (hSL-A64-N5) comprising derived and/or modified sequence from LASV(G733-SLE-2010;Clade IV)__AIT17154__GPCmut9 (opt1)
aggagaaagcuuaccaugggccagaucgugaccuucuuccaggaggucccccacgugaucgaggaggugaugaacaucguccugaucgcccucagcauccuggccgugcugaaggggcucuacaacuucgcgaccugcggcaucguggggcuggucuccuuccugcuccugugcggccgcagcugcacgaccucccuguacaaggggguguacgagcuccagacccuggagcugaacauggagacccucaacaugacgaugccgcugagcugcaccaagaacaacucccaccacuacaucauggugggcaacgagaccggccuggagcucacccugacgaacaccagcaucaucaaccacaaguucugcaaccuguccgacgcccacaagaagaaccucuacgaccacgcccugaugagcaucaucuccaccuuccaccugagcauccccaacuucaaccaguacgaggccauguccugcgacuucaacgggggcaagaucagcguccaguacaaccucucccacagcuacgccggggacgcggccaaccacugcggcaccaucgccaacggggugcugcagacguucaugcggauggccuggggcggcuccuacaucgcgcuggacagcgggugcgaccgcugggacugcaucaugaccuccuaccaguaccucaucauccagaacaccaccugggaggaccacugccaguucagccggcccucccccaucggcuaccuggggcugcucagccagcgcacgcgggacaucuacaucagccgccggcugcugggcaccuucaccuggacccucuccgacagcgagggcaaggacacgcccgggggcuacugccugacccgcuggaugcugaucgaggccgagcucaagugcuucgggaacaccgccguggccaagugcaacgagaagcacgacgaggaguucugcgacaugcugcggcuguucgacuucaacaagcaggccauccagcgccucaaggcggaggcccagauguccauccagcugaucaacaaggccgucaacgcccugaucaacgaccagcucaucaugaagaaccaccuccgggacaucaugugcauccccuacugcaacuacagcaaguacugguaccugaaccacaccacgaccggcaagaccucccugcccaagugcuggcuggugagcaacggguccuaccugaacgagacccacuucagcgacgacaucgagcagcaggccgacaacaugaucacggagaugcuccagaaggaguacauggagcgccagggcaagaccccgcugggccugguggaccuguucgucuucuccaccagcuucuaccucaucuccaucuuccugcaccuggugaagaucccgacccaccggcacguggucggcaagagcugccccaagccccaccgccucaaccacauggggaucugcuccugcgggcuguacggccagcccggggugccggugaaguggaagcggugaggacuaguuauaagacugacuagcccgaugggccucccaacgggcccuccuccccuccuugcaccgagauuaaucaaaggcucuuuucagagccaccaaaaaaaaaaaaaaaaaaaaaaaaaaaaaaaaaaaaaaaaaaaaaaaaaaaaaaaaaaaaaaaaagaauu

SEQ ID NO: 36192 - RNA, 1658 nt, Artificial Sequence
  mRNA product Design i-3 (hSL-A64-N5) comprising derived and/or modified sequence from MOPV/LASV reassortant(IGS-1;Clade IV)__AFY05576__GPCmut9 (opt1)
aggagaaagcuuaccaugggccagaucgugaccuucuuccaggaggucccccacgugaucgaggaggugaugaacaucguccugaucgcccucagcgugcuggccgugcugaaggggcucuacaacuucgcgaccugcggccuggucgggcuggugacguuccuccugcugugcggccgcuccugcaccaccagccucuacaaggggguguacgagcugcagacccuggagcucaacauggagacgcugaacaugaccaugccgcuguccugcaccaagaacaacagccaccacuacaucauggucggcaacgagaccggccucgagcugacgcugaccaacaccuccaucaucaaccacaaguucugcaaccucagcgacgcccacaagaagaaccuguacgaccacgcccugauguccaucaucagcaccuuccaccucuccauccccaacuucaaccaguacgaggccaugagcugcgacuucaacgggggcaagaucuccgugcaguacaaccugagccacuccuacgccggggacgcggccaaccacugcggcacgguggccaacgggguccugcagaccuucaugcggauggccuggggcggcagcuacaucgcgcucgacuccgggugcggcaacugggacugcaucaugaccagcuaccaguaccugaucauccagaacaccacgugggaggaccacugccaguucucccgccccagccccaucggguaccugggccuccugucccagcggacccgcgacaucuacaucagccggcgccugcucggcaccuucaccuggacgcugagcgacuccgagggggaggacaccccgggcggguacugccugacccgguggaugcucaucgaggccgagcugaagugcuucggcaacaccgccguggccaagugcaacgagaagcacgacgaggaguucugcgacaugcugcgccucuucgacuucaacaagcaggccauccagcggcugaaggcggaggcccagaugagcauccagcugaucaacaaggccgugaacgcccucaucaacgaccagcugaucaugaagaaccaccuccgcgacaucaugugcauccccuacugcaacuacuccaaguacugguaccugaaccacacgaccaccgggcggaccagccugcccaagugcuggcuggucuccaacggcagcuaccucaacgagacgcacuucuccgacgacaucgagcagcaggccgacaacaugaucaccgagaugcugcagaaggaguacauggagcgccagggcaagacgccccuggggcugguggaccucuucguguucagcaccuccuucuaccugaucagcaucuuccugcaccucgucaagaucccgacccaccggcacaucgugggcaaguccugccccaagccccaccgccugaaccacauggggaucugcagcugcggccuguacaagcagcccggggugccggucaaguggaagcggugaggacuaguuauaagacugacuagcccgaugggccucccaacgggcccuccuccccuccuugcaccgagauuaaucaaaggcucuuuucagagccaccaaaaaaaaaaaaaaaaaaaaaaaaaaaaaaaaaaaaaaaaaaaaaaaaaaaaaaaaaaaaaaaaagaauu

SEQ ID NO: 36193 - RNA, 1658 nt, Artificial Sequence
  mRNA product Design i-3 (hSL-A64-N5) comprising derived and/or modified sequence from LASV(LM765-SLE-2012;Clade IV)__AIT17814__GPCmut9 (opt1)
aggagaaagcuuaccaugggccagaucgugaccuucuuccaggaggucccccacgugaucgaggaggugaugaacaucguccugaucgcccucagcauccuggccgugcugaaggggcucuacaacuucgcgaccugcggccugguggggcuggucacguuccuccugcugugcggccgcuccugcaccaccagccucuacaaggggguguacgagcugcagacccuggagcucaacauggagacgcugaacaugaccaugccgcuguccugcaccaagaacaacagccaccacuacaucauggugggcaacgagaccggccucgagcugacgcugaccaacaccuccaucaucgaccacaaguucugcaaccucagcgacgcccaccggaagaaccuguacgaccacgcccugauguccaucaucagcaccuuccaccucuccauccccaacuucaaccaguacgaggccaugagcugcgacuucaacgggggcaagaucuccguccaguacaaccugagccacuccuacgccaaggacgcggccgaccacugcgggacgguggccaacggcgugcugcagaccuucaugcgcauggccuggggcgggagcuacaucgcgcucgacuccggcugcgggcggugggacugcaucaugaccagcuaccaguaccugaucauccagaacaccacgugggaggaccacugccaguucucccgccccagccccaucggcuaccuggggcuccugucccagcggacccgcgacaucuacaucagccggcgccugcucggcaccuucaccuggacgcugagcgacuccgagggcaaggacacccccgggggcuacugccugacccgguggaugcucaucgaggccgagcugaagugcuucgggaacaccgccgucgccaagugcaacgagaagcacgacgaggaguucugcgacaugcugcgccucuucgacuucaacaagcaggccauccagcggcugaaggcggaggcccagaugagcauccagcugaucaacaaggccgugaacgcccucaucaacgaccagcugaucaugaagaaccaccuccgcgacaucaugugcauccccuacugcaacuacuccaaguacugguaccugaaccacacgaccaccggcaagaccagccugcccaagugcuggcugguguccaacgggagcuaccucaacgagacgcacuucuccgacgacaucgagcagcaggccgacaacaugaucaccgagaugcugcagaaggaguacauggagcggcagggcaagaccccgcugggccuggucgaccucuucguguucagcaccuccuucuaccugaucagcaucuuccugcaccucgugaagaucccgacgcaccgccacaucgucgggaagcccugccccaagccccaccggcugaaccacaugggcaucugcuccugcgggcuguacaagcagccgggcgugcccgugaaguggaagcgcugaggacuaguuauaagacugacuagcccgaugggccucccaacgggcccuccuccccuccuugcaccgagauuaaucaaaggcucuuuucagagccaccaaaaaaaaaaaaaaaaaaaaaaaaaaaaaaaaaaaaaaaaaaaaaaaaaaaaaaaaaaaaaaaaagaauu

SEQ ID NO: 36194 - RNA, 1658 nt, Artificial Sequence
  mRNA product Design i-3 (hSL-A64-N5) comprising derived and/or modified sequence from LASV(LM776-SLE-2012;Clade IV)__AIT17824__GPCmut9 (opt1)
aggagaaagcuuaccaugggccagaucgugaccuucuuccaggaggucccccacgugaucgaggaggugaugaacaucguccugaucgcccucagcauccuggccgugcugaaggggcucuacaacuucgcgaccugcggccugguggggcuggucacguuccuccugcugugcggccgcuccugcaccaccagcguguacaaggggguguacgagcuccagacccuggagcugaacauggagacgcucaacaugaccaugccgcuguccugcaccaagaacaacagccaccacuacaucauggucggcaacgagaccggccuggagcucacgcugaccaacaccuccaucaucaaccacaaguucugcaaccugagcgacgcccacaagaagaaccucuacgaccacgcccugauguccaucaucagcaccuuccaccuguccauccccaacuucaaccaguacgaggccaugagcugcgacuucaacgggggcaagaucuccgugcaguacaaccucagccacuccuacgccggggacgcggccaaccacugcggcacgguggccaacgggguccugcagaccuucaugcggauggccuggggcggcagcuacaucgcgcuggacuccgggugcggcaagugggacugcaucaugaccagcuaccaguaccucaucauccagaacaccacgugggaggaccacugccaguucucccgccccagccccaucggguaccugggccugcucucccagcggacccgcgacaucuacaucagccggcgccugcugggcaccuucaccuggacgcucagcgacuccgaggggaaggacaccccgggcggguacugccugacccgguggaugcugaucgaggccgagcucaagugcuucggcaacaccgccguggccaagugcaacgagaagcacgacgaggaguucugcgacaugcugcgccuguucgacuucaacaagcaggccauccagcggcucaaggcggaggcccagaugagcauccagcugaucaacaaggccgugaacgcccugaucaacgaccagcucaucaugaagaaccaccuccgcgacaucaugugcauccccuacugcaacuacuccaaguacugguaccugaaccacacgaccaccgggaagaccagccugcccaagugcuggcuggucuccaacggcagcuaccugaacgagacgcacuucuccgacgacaucgagcagcaggccgacaacaugaucaccgagaugcuccagaaggaguacauggagcggcagggcaagacgccccuggggcugguggaccuguucguguucagcaccuccuucuaccucaucagcaucuuccugcaccuggucaagaucccgacccaccgccacaucgugggcaaguccugccccaagccccaccggcucaaccacauggggaucugcagcugcggccuguacaagcagcccggggugccgguccgcuggaagcggugaggacuaguuauaagacugacuagcccgaugggccucccaacgggcccuccuccccuccuugcaccgagauuaaucaaaggcucuuuucagagccaccaaaaaaaaaaaaaaaaaaaaaaaaaaaaaaaaaaaaaaaaaaaaaaaaaaaaaaaaaaaaaaaaagaauu

SEQ ID NO: 36195 - RNA, 1658 nt, Artificial Sequence
  mRNA product Design i-3 (hSL-A64-N5) comprising derived and/or modified sequence from LASV(Mad39;Clade IV)__ANH09722__GPCmut9 (opt1)
aggagaaagcuuaccaugggccagaucgugaccuucuuccaggaggucccccacgugaucgaggaggugaugaacaucguccugaucgcccucagcauccuggccgugcugaaggggcucuacaacguggcgaccugcggccugaucgggcuggucacguuccuccugcugugcggccgcuccugcaccaccacccucuacaaggggguguacgagcugcaggcccuggagcucaacauggagacgcugaacaugaccaugccgcugagcugcaccaagaacaacucccaccacuacauccgggugggcaacgagaccggccucgagcugacgcugaccaacaccagccucaucaaccacaaguucugcaaccuguccgacgcccacaagaagaaccuguacgaccacgcccucaugagcaucaucuccaccuuccaccugagcauccccaacuucaaccaguacgaggccauguccugcgacuucaacgacgggaagaucagcguccaguacaaccugucccacacguacgcgggcgacaccgccaaccacugcgggaccguggccaacggcgugcuccagaccuucaugcgcauggccuggggcgggagcuacaucgcgcuggacuccggcugcgggggcugggacugcaucaugacgagcuaccaguaccugaucauccagaacaccaccugggaggaccacugccaguucucccggcccagccccaucggguaccucggccugcugucccagcgcacccgggacaucuacaucagccgccggcuccugggcacguucaccuggacccuguccgacagcgaggggaaggacaccccgggcggguacugccucacgcgcuggaugcugaucgaggccgagcugaagugcuucggcaacaccgccgucgccaagugcaacgagaagcacgacgaggaguucugcgacaugcuccggcuguucgacuucaacaagcaggccauccagcgccugaaggcggaggcccagaugagcauccagcucaucaacaaggccgugaacgcccugaucaacgaccagcugaucaugaagaaccaccuccgggacaucaugugcauccccuacugcaacuacuccaaguacugguaccugaaccacaccgugaccgggaagacgagccugcccaagugcuggcucgucuccaacggcagcuaccugaacgagacccacuucuccgacgacaucgagcagcaggccgacaacaugaucaccgagaugcugcagaaggaguacauggagcgccagggcaagacgccccuggggcucguggaccuguucguguucagcaccuccuucuaccugaucagcaucuuccuccaccuggucaagaucccgacccaccggcacguggugggcaagcccugccccaagccccaccgccugaaccacauggggaucugcuccugcggcuucuacaagcagccggggguccccgugcgguggaagcgcugaggacuaguuauaagacugacuagcccgaugggccucccaacgggcccuccuccccuccuugcaccgagauuaaucaaaggcucuuuucagagccaccaaaaaaaaaaaaaaaaaaaaaaaaaaaaaaaaaaaaaaaaaaaaaaaaaaaaaaaaaaaaaaaaagaauu

SEQ ID NO: 36196 - RNA, 1658 nt, Artificial Sequence
  mRNA product Design i-3 (hSL-A64-N5) comprising derived and/or modified sequence from LASV(Z0947-SLE-2011;Clade IV)__AIT17840__GPCmut9 (opt1)
aggagaaagcuuaccaugggccagaucgugaccuucuuccaggaggucccccacgugaucgaggaggugaugaacaucguccugaucgcccucagcauccuggccgugcugaaggggcucuacaacuucgcgaccugcggccugguggggcuggucacguuccuccugcugugcggccgcuccugcaccaucagccucuacaaggggguguacgagcugcagacccuggagcucaacauggagacccugaacaugacgaugccgcuguccugcaccaagaacaacagccaccacuacaucauggugggcaacgagaccggccucgagcugacccugacgaacaccuccaucaucaaccacaaguucugcaaccucagcgacgcccacaagaagaaccuguacgaccacgcccugauguccaucaucagcaccuuccaccucuccauccccaacuucaaccaguacgaggccaugagcugcgacuucaacgggggcaagaucuccguccaguacaaccugagccacuccuacgccggggacgcggccaaccacugcggcaccguggccaacggggugcugcagacguucaugcggauggccuggggcggcagcuacaucgcgcucgacuccgggugcgaccgcugggacugcaucaugaccagcuaccaguaccugaucauccagaacaccaccugggaggaccacugccaguucucccggcccagccccaucggcuaccuggggcuccugucccagcgcacgcgggacaucuacaucagccgccggcugcucggcaccuucaccuggacccugagcgacuccgagggcaaggacacgcccgggggcuacugccugacccgcuggaugcucaucgaggccgagcugaagugcuucgggaacaccgccgucgccaagugcaacgagaagcacgacgaggaguucugcgacaugcugcggcuguucgacuucaacaagcaggccauccagcgccugaaggcggaggcccagaugagcauccagcugaucaacaaggccgugaacgcccucaucaacgaccagcugaucaugaagaaccaccuccgggacaucaugugcauccccuacugcaacuacuccaaguacugguaccucaaccacaccacgaccggcaagaccagccugcccaagugcuggcugguguccaacgggagcuaccucaacgagacccacuucuccgacgacaucgagcagcaggccgacaacaugaucacggagaugcugcagaaggaguacauggagcgccagggcaagaccccgcugggccuggucgaccucuucguguucagcaccuccuucuaccugaucagcaucuuccugcaccucgugaagaucccgacccaccggcacaucgucgggaagcccugccccaagccccaccgccugaaccacaugggcaucugcuccugcgggcuguacaagcagccgggcgugcccgugaaguggaagcggugaggacuaguuauaagacugacuagcccgaugggccucccaacgggcccuccuccccuccuugcaccgagauuaaucaaaggcucuuuucagagccaccaaaaaaaaaaaaaaaaaaaaaaaaaaaaaaaaaaaaaaaaaaaaaaaaaaaaaaaaaaaaaaaaagaauu

SEQ ID NO: 36197 - RNA, 1658 nt, Artificial Sequence
  mRNA product Design i-3 (hSL-A64-N5) comprising derived and/or modified sequence from LASV(Josiah;Clade IV)__NP_694870__GPCmut9 (opt4)
aggagaaagcuuaccaugggccagaucgugaccuucuuccaggaggugccccacgugaucgaggaggugaugaacaucgugcugaucgcccugagcgugcuggccgugcugaagggccuguacaacuucgccaccugcggccuggugggccuggugaccuuccugcugcugugcggcagaagcugcaccaccagccuguacaagggcguguacgagcugcagacccuggagcugaacauggagacccugaacaugaccaugccccugagcugcaccaagaacaacagccaccacuacaucauggugggcaacgagaccggccuggagcugacccugaccaacaccagcaucaucaaccacaaguucugcaaccugagcgacgcccacaagaagaaccuguacgaccacgcccugaugagcaucaucagcaccuuccaccugagcauccccaacuucaaccaguacgaggccaugagcugcgacuucaacggcggcaagaucagcgugcaguacaaccugagccacagcuacgccggcgacgccgccaaccacugcggcaccguggccaacggcgugcugcagaccuucaugagaauggccuggggcggcagcuacaucgcccuggacagcggcugcggcaacugggacugcaucaugaccagcuaccaguaccugaucauccagaacaccaccugggaggaccacugccaguucagcagacccagccccaucggcuaccugggccugcugagccagagaaccagagacaucuacaucagcagaagacugcugggcaccuucaccuggacccugagcgacagcgagggcaaggacacccccggcggcuacugccugaccagauggaugcugaucgaggccgagcugaagugcuucggcaacaccgccguggccaagugcaacgagaagcacgacgaggaguucugcgacaugcugagacuguucgacuucaacaagcaggccauccagagacugaaggccgaggcccagaugagcauccagcugaucaacaaggccgugaacgcccugaucaacgaccagcugaucaugaagaaccaccugagagacaucaugugcauccccuacugcaacuacagcaaguacugguaccugaaccacaccaccaccggcagaaccagccugcccaagugcuggcuggugagcaacggcagcuaccugaacgagacccacuucagcgacgacaucgagcagcaggccgacaacaugaucaccgagaugcugcagaaggaguacauggagagacagggcaagaccccccugggccugguggaccuguucguguucagcaccagcuucuaccugaucagcaucuuccugcaccuggugaagauccccacccacagacacaucgugggcaagagcugccccaagccccacagacugaaccacaugggcaucugcagcugcggccuguacaagcagcccggcgugcccgugaaguggaagagaugaggacuaguuauaagacugacuagcccgaugggccucccaacgggcccuccuccccuccuugcaccgagauuaaucaaaggcucuuuucagagccaccaaaaaaaaaaaaaaaaaaaaaaaaaaaaaaaaaaaaaaaaaaaaaaaaaaaaaaaaaaaaaaaaagaauu

SEQ ID NO: 36198 - RNA, 1655 nt, Artificial Sequence
  mRNA product Design i-3 (hSL-A64-N5) comprising derived and/or modified sequence from LASV(LP;Clade I)__AAF86701__GPCmut9 (opt4)
aggagaaagcuuaccaugggccagaucaucaccuucuuccaggaggugccccacgugaucgaggaggugaugaacaucgugcugaucgcccugagccugcuggccauccugaagggccuguacaacaucgccaccugcggcaucaucggccugguggccuuccuguuccugugcggcaagagcugcagccugacccugaagggcggcuacgagcugcagacccuggagcugaacauggagacccugaacaugaccaugccccugagcugcaccaagaacagcagccaccacuacaucagagugggcaacgagaccggccuggagcugacccugaccaacaccagcaucaucaaccacaaguucugcaaccugagcgacgcccacaagaagaaccuguacgaccacgcccugaugagcaucaucagcaccuuccaccugagcauccccaacuucaaccaguacgaggccaugagcugcgacuucaacggcggcaagaucagcgugcaguacaaccugagccacagcuacgccggcgacgccgccgagcacugcggcaccguggccaacggcgugcugcagaccuucaugagaauggccuggggcggcagauacaucgcccuggacagcggcugcggcaacugggacugcaucaugaccagcuaccaguaccugaucauccagaacaccaccugggaggaccacugccaguucagcagacccagccccaucggcuaccugggccugcugagccagagaaccagagacaucuacaucagcagaagacugcugggcaccuucaccuggacccugagcgacagcgagggcaacgagacccccggcggcuacugccugaccagauggaugcugaucgaggccgagcugaagugcuucggcaacaccgccguggccaagugcaacgagaagcacgacgaggaguucugcgacaugcugagacuguucgacuucaacaagcaggccaucagaagacugaaggccgaggcccagaugagcauccagcugaucaacaaggccgugaacgcccugaucaacgaccagcugaucaugaagaaccaccugagagacaucaugugcauccccuacugcaacuacagcaaguacugguaccugaaccacaccagcagcggcagaaccagccugcccaagugcuggcugaucagcaacggcagcuaccugaacgagacccaguucagcgacgacaucgagcagcaggccgacaacaugaucaccgagaugcugcagaaggaguacaucgagagacagggcaagaccccccugggccugguggacaucuucaucuucagcaccagcuucuaccugaucagcaucuuccugcaccugaucaagauccccacccacagacacaucgugggcaagcccugccccaagccccacagacugaaccacaugggcgugugcagcugcggccuguacaagcaccccggcgugcccaccaaguggaagagaugaggacuaguuauaagacugacuagcccgaugggccucccaacgggcccuccuccccuccuugcaccgagauuaaucaaaggcucuuuucagagccaccaaaaaaaaaaaaaaaaaaaaaaaaaaaaaaaaaaaaaaaaaaaaaaaaaaaaaaaaaaaaaaaaagaauu

SEQ ID NO: 36199 - RNA, 1655 nt, Artificial Sequence
  mRNA product Design i-3 (hSL-A64-N5) comprising derived and/or modified sequence from LASV(803213;Clade II)__AAF86703__GPCmut9 (opt4)
aggagaaagcuuaccaugggccagaucaucaccuucuuccaggaggugccccacgugaucgaggaggugaugaacaucgugcugaucgcccugagccugcuggccauccugaagggcaucuacaacguggccaccugcggccuguucggccugaucagcuuccugcugcugugcggcagaagcugcagcgugaccuacaagggcguguacgagcugcagacccuggagcugaacauggccaaccugaacaugaccaugccccugagcugcaccaagaacaacagccaccacuacaucauggugggcaacgagaccggccuggagcugacccugaccaacaccagcaucaucaaccacaaguucugcaaccugagcgacgcccacaagaagaaccuguacgaccacgcccugaugagcaucaucagcaccuuccaccugagcauccccaacuucaaccaguacgaggccaugagcugcgacuucaacggcggcaagaucagcgugcaguacaaccugagccacagcuucgccguggacgccgccaaccacugcggcaccaucgccaacggcgugcugcagaccuucaugagaauggccuggggcggcagcuacaucgcccuggacagcggcugcggcaacugggacugcaucaugaccagcuaccaguaccugaucauccagaacaccaccugggaggaccacugccaguucagcagacccagccccaucggcuaccugggccugcugagccagagaaccagagacaucuacaucagcagaagacugcugggcaccuucaccuggacccugagcgacagcgagggcaacgaggcccccggcggcuacugccugaccagauggaugcugaucgaggccgagcugaagugcuucggcaacaccgccguggccaagugcaacgagaagcacgacgaggaguucugcgacaugcugagacuguucgacuucaacaagcaggccaucaagagacugaagaccgaggcccagaugagcauccagcugaucaacaaggccgugaacgcccugaucaacgaccagcugaucaugaagaaccaccugagagacaucaugugcauccccuacugcaacuacagcagauacugguaccugaaccacaccgugaccggcaagaccagccugcccagaugcuggcuggugagcaacggcagcuaccugaacgagacccacuucagcgacgacaucgagcagcaggccgacaacaugaucaccgagaugcugcagaaggaguacauggacagacagggcaagaccccccugggccugguggaccuguucguguucagcaccagcuucuaccugaucagcaucuuccugcaccuggugaagauccccacccacagacacaucgugggcaagcccugccccaagccccacagacugaaccacaugggcaucugcagcugcggccuguacaagcaccccggcgugcccgugaaguggaagagaugaggacuaguuauaagacugacuagcccgaugggccucccaacgggcccuccuccccuccuugcaccgagauuaaucaaaggcucuuuucagagccaccaaaaaaaaaaaaaaaaaaaaaaaaaaaaaaaaaaaaaaaaaaaaaaaaaaaaaaaaaaaaaaaaagaauu

SEQ ID NO: 36200 - RNA, 1655 nt, Artificial Sequence
  mRNA product Design i-3 (hSL-A64-N5) comprising derived and/or modified sequence from LASV(GA391;Clade III)__CAA36645__GPCmut9 (opt4)
aggagaaagcuuaccaugggccagaucgugaccuucuuccaggaggugccccacgugaucgaggaggugaugaacaucgugcugaucgcccugagcauccuggccauccugaagggccuguacaacguggccaccugcggccugaucggccuggugaccuuccugcugcugagcggcagaagcugcagccugaucuacaagggcaccuacgagcugcagacccuggagcugaacauggagacccugaacaugaccaugccccugagcugcaccaagaacaacagccaccacuacaucagagugggcaacgagaccggccuggagcugacccugaccaacaccagcauccugaaccacaaguucugcaaccugagcgacgcccacaagagaaaccuguacgaccacagccugaugagcaucaucagcaccuuccaccugagcauccccaacuucaaccaguacgaggccaugagcugcgacuucaacggcggcaagaucaccgugcaguacaaccugagccacagcuucgccguggacgccgccggccacugcggcacccuggccaacggcgugcugcagaccuucaugagaauggccuggggcggcagcuacaucgcccuggacagcggcugcggcaacugggacugcaucaugaccagcuaccaguaccugaucauccagaacaccaccugggacgaccacugccaguucagcagacccagccccaucggcuaccugggccugcugagccagagaaccagagacaucuacaucagcagaagacugcugggcaccuucaccuggacccugagcgacagcgagggcaacgagacccccggcggcuacugccugaccagauggaugcugaucgaggccgagcugaagugcuucggcaacaccgccguggccaagugcaacgagaagcacgacgaggaguucugcgacaugcugagacuguucgacuucaacaagcaggccaucagaagacugaagaccgaggcccagaugagcauccagcugaucaacaaggccgugaacgcccugaucaacgaccagcugaucaugaagaaccaccugagagacaucaugugcauccccuacugcaacuacagcagauacugguaccugaaccacaccagcaccggcaagaccagccugcccagaugcuggcugaucagcaacggcagcuaccugaacgagaccaaguucagcgacgacaucgagcagcaggccgacaacaugaucaccgagaugcugcagaaggaguacaucgacagacagggcaagaccccccugggccugguggaccuguucguguucagcaccagcuucuaccugaucagcaucuuccugcaccuggugaagauccccacccacagacacaucgugggcaagcccugccccaagccccacagacugaaccacaugggcaucugcagcugcggccuguacaagcagcccggcgugcccgugagauggaagagaugaggacuaguuauaagacugacuagcccgaugggccucccaacgggcccuccuccccuccuugcaccgagauuaaucaaaggcucuuuucagagccaccaaaaaaaaaaaaaaaaaaaaaaaaaaaaaaaaaaaaaaaaaaaaaaaaaaaaaaaaaaaaaaaaagaauu

SEQ ID NO: 36201 - RNA, 1658 nt, Artificial Sequence
  mRNA product Design i-3 (hSL-A64-N5) comprising derived and/or modified sequence from LASV(AV;Clade V)__CCA30314__GPCmut9 (opt4)
aggagaaagcuuaccaugggccagaucgugaccuucuuccaggaggugccccacgugaucgaggaggugaugaacaucgugcugaucgcccugagcauccuggccgugcugaagggccuguacaacaucgccaccugcggccugaucggccugaucaccuuccugcugcugugcggcagaagcugcagcagcaaccuguacaagggcguguacgagcugcagagccuggaccugaacauggagacccugaacaugaccaugccccugagcugcaccaagaacaacagccaccacuacaucagagugggcaacgacaccggccuggagcugacccugaccaacaccagcauccugaaccacaaguucugcaaccugagcgacgcccacaagaaggaccuguacgaccacgcccugaugagcaucaucagcaccuuccaccugagcauccccaacuucaaccaguacgaggccaugagcugcgacuucaacggcggcaagaucagcgugcaguacaaccugagccacagcuacgccaucgacgccgccaaccacugcggcaccguggccaacggcauccugcagaccuucaugagaauggccuggggcggcagcuacaucgcccuggacagcggcugcggcaacugggacugcaucaugaccagcuaccaguaccugaucauccagaacaccaccugggagaaccacugccaguucagcagacccagccccaucggcuaccugggccugcugagccagagaaccagagacaucuacaucagcagaagacugcugggcaccuucaccuggacccugagcgacagcgagggcaacgccacccccggcggcuacugccugaccagauggaugcugaucgaggccgagcugaagugcuucggcaacaccgccguggccaagugcaacgagaagcacgacgaggaguucugcgacaugcugagacuguucgacuucaacaagcaggccaucagcagacugaagagcgaggcccagaugagcauccagcugaucaacaaggccgugaacgcccugaucaacgaccagcugaucaugaagaaccaccugagagacaucaugugcauccccuacugcaacuacagcaaguacugguaccugaaccacaccaucaccggcaagaccagccugcccaagugcuggcuggugagcaacggcagcuaccugaacgagacccacuucagcgacgacaucgagcagcaggccgacaacaugaucaccgagaugcugcagaaggaguacauggagagacagggcaagaccccccugggccugguggaccuguucguguucagcaccagcuucuaccugaucagcaucuuccugagacuggugaagauccccacccacagacacaucgugggcaagcccugccccaagccccacagacugaaccacaugggcaucugcagcugcggccuguacaagcagcccggcgugcccgugagauggaagagaugaggacuaguuauaagacugacuagcccgaugggccucccaacgggcccuccuccccuccuugcaccgagauuaaucaaaggcucuuuucagagccaccaaaaaaaaaaaaaaaaaaaaaaaaaaaaaaaaaaaaaaaaaaaaaaaaaaaaaaaaaaaaaaaaagaauu

SEQ ID NO: 36202 - RNA, 1655 nt, Artificial Sequence
  mRNA product Design i-3 (hSL-A64-N5) comprising derived and/or modified sequence from LASV(Togo/2016/7082;Clade VI)__AMR44577__GPCmut9 (opt4)
aggagaaagcuuaccaugggccagaucaucaccuucuuccaggaggugccccacgugaucgaggaggugaugaacaucgugcugaucgcccugagccugcuggccauccugaagggcguguacaacguggccaccugcggcaucaucggccuggugaccuuccuguuccugugcggcagaagcugcagccugaucuacaagggcagcuacgagcugcagacccuggagcugaacauggagacccugaacaugaccaugccccugagcugcaccaagaacagcagccaccacuacaucagagugggcaacgagaccggccuggagcugacccugaccaacaccagcaucaucaaccacaaguucugcaaccugagcgacgcccacaagagaaaccuguacgaccacgcccugaugagcauccugagcaccuuccaccugagcauccccaacuucaaccaguacgaggccaugagcugcgacuucaacggcggcaagaucagcgugcaguacaaccugagccacgccuacgccguggacgccgccgagcacugcggcaccguggccaacggcgugcugcagaccuucaugagaauggccuggggcggcagcuacaucgcccuggacagcggcugcggcaacugggacugcaucaugaccagcuaccaguaccugaucauccagaacaccaccugggaggaccacugccaguucagcagacccagccccaucggcuaccugggccugcugagccagagaaccagagacaucuacaucagcagaagacugcugggcaccuucaccuggacccugagcgacagcgagggcaacgagacccccggcggcuacugccugaccagauggaugcugaucgaggccgagcugaagugcuucggcaacaccgccguggccaagugcaacgagaagcacgacgaggaguucugcgacaugcugagacuguucgacuucaacaagcaggccauccagagacugaagagcgaggcccagaugagcauccagcugaucaacaaggccgugaacgcccugaucaacgaccagcugaucaugaagaaccaccugagagacaugaugugcauccccuacugcaacuacagcaaguacugguaccugaaccacaccagcagcggcagaaccagccugcccaagugcuggcuggugagcaacggcagcuaccugaacgagacccacuucagcgacgacaucgagcagcaggccgacaacaugaucaccgagaugcugcagaaggaguacaucgacagacagggcaagaccccccugggccugguggaccuguucguguucagcaccagcuucuaccugaucagcaucuuccugcaccugaucaagauccccacccacagacacaucgugggcaagcccugccccaagccccacagacugaaccacaugggcaucugcagcugcggccuguacaagcagcccggcgugcccaccagauggaagagaugaggacuaguuauaagacugacuagcccgaugggccucccaacgggcccuccuccccuccuugcaccgagauuaaucaaaggcucuuuucagagccaccaaaaaaaaaaaaaaaaaaaaaaaaaaaaaaaaaaaaaaaaaaaaaaaaaaaaaaaaaaaaaaaaagaauu

SEQ ID NO: 36203 - RNA, 1655 nt, Artificial Sequence
  mRNA product Design i-3 (hSL-A64-N5) comprising derived and/or modified sequence from LASV(KAK-428;Clade n.d. (VII))__ANH09740__GPCmut9 (opt4)
aggagaaagcuuaccaugggccagaucgugaccuucuuccaggaggugccccacgugaucgaggaggugaugaacaucgugcugaucgcccugagccugcuggccauccugaagggccuguacaacuucgccaccugcggcgugaucggccugaucaccuuccugcugcugugcggcagaagcugcagcgccaccuacaagggccaguacgagcugcagacccuggagcugaacauggagagccugaacaugaccaugccccugagcugcaccaagaacaacagccaccacuacaucagagccggcaacaacaccggccuggagcugacccugaccaacaccagcaucaucagccacaaguucugcaaccugagcgacgcccacaagaagaaccuguacgaccacacccugaugagcaucaucaccaccuuccaccugagcauccccaacuucaaccaguacgaggccaugagcugcgacuucaacggcggcaagaucagcauccaguacaaccugagccacagcuacgccggcgacgccgcccagcacugcggcaccguggccaacggcgugcugcagaccuucaugagaauggccuggggcggcagcuaccuggcccuggacagcggcugcagaggcugggacugcaucaucagcagcuaccaguaccugaucauccagaacaccaccugggacgaccacugccaguucagcagacccagccccaucggcuaccugggcuucgugagccagaagaccagagacaucuacaucagcagaagacugcugggcaccuucaccuggacccugagcgacagcgagggccacgacaugcccggcggcuacugccugaccagauggaugcugaucgaggccgaccugaagugcuucggcaacaccgccguggccaagugcaacgagaagcacgacgaggaguucugcgacauguggagacuguucgacuucaacaagcaggccauccagagacugaaggccgaggcccagaugaacauccagcugaucaacaaggccgugaacgcccugaucaacgaccagcugaugaugaagaaccaccugagagacaucaugugcauccccuacugcaacuacagcaaguucugguaccugaacaacaccaccaccggcagaaccagccugcccagaugcuggcugaucagcaacggcagcuaccugaacgagacccacuucagcgacgacaucgagcagcaggccgacaacaugaucaccgagaugcugcagaaggaguacauggacagacagggcaagaccccccugggccugguggaccuguucguguucagcaccagcuucuaccugaucaccaucuuccugcaccuggugaagauccccacccacagacacaucgugggcaagcccugccccaagccccacagacugaaccacaugggcaucugcagcugcggccuguacaagcagcccggcgugcccgugagauggaagagaugaggacuaguuauaagacugacuagcccgaugggccucccaacgggcccuccuccccuccuugcaccgagauuaaucaaaggcucuuuucagagccaccaaaaaaaaaaaaaaaaaaaaaaaaaaaaaaaaaaaaaaaaaaaaaaaaaaaaaaaaaaaaaaaaagaauu

SEQ ID NO: 36204 - RNA, 1655 nt, Artificial Sequence; identical to SEQ ID NO: 36198
  mRNA product Design i-3 (hSL-A64-N5) comprising derived and/or modified sequence from LASV(Pinneo-NIG-1969;Clade I)__AIT17836__GPCmut9 (opt4)

SEQ ID NO: 36205 - RNA, 1655 nt, Artificial Sequence
  mRNA product Design i-3 (hSL-A64-N5) comprising derived and/or modified sequence from LASV(ISTH0009-NIG-2011;Clade II)__AIT17404__GPCmut9 (opt4)
aggagaaagcuuaccaugggccagaucaucaccuucuuccaggaggugccccacgugaucgaggaggugaugaacaucgugcugaucgcccugagccugcuggccauccugaagggcaucuacaacguggccaccugcggccuguucggccuggugagcuuccugcugcugugcggcagaagcugcagcaccaccuacaagggcguguacgagcugcagacccuggagcuggacauggccagccugaacaugaccaugccccugagcugcaccaagaacaacagccaccacuacaucauggugggcaacgagaccggccuggagcugacccugaccaacaccagcaucaucaaccacaaguucugcaaccugagcgacgcccacaagaagaaccuguacgaccacgcccugaugagcaucaucagcaccuuccaccugagcauccccaacuucaaccaguacgaggccaugagcugcgacuucaacggcggcaagaucagcgugcaguacaaccugagccacgccuacgccguggacgccgccaaccacugcggcaccaucgccaacggcgugcugcagaccuucaugagaauggccuggggcggcagcuacaucgcccuggacagcggcugcggcagcugggacugcaucaugaccagcuaccaguaccugaucauccagaacaccaccugggaggaccacugccaguucagcagacccagccccaucggcuaccugggccugcugagccagagaaccagagacaucuacaucagcagaagacugcugggcaccuucaccuggacccugagcgacagcgagggcaacgagacccccggcggcuacugccugaccagauggaugcugaucgaggccgagcugaagugcuucggcaacaccgccguggccaagugcaacgagaagcacgacgaggaguucugcgacaugcugagacuguucgacuucaacaagcaggccaucagaagacugaagaccgaggcccagaugagcauccagcugaucaacaaggccgugaacgcccugaucaacgaccagcugaucaugaagaaccaccugagagacaucaugugcauccccuacugcaacuacagcaaguacugguaccugaaccacaccgugaccggcaagaccagccugcccagaugcuggcuggugagcaacggcagcuaccugaacgagacccacuucagcgacgacaucgagcagcaggccgacaacaugaucaccgagcugcugcagaaggaguacauggacagacagggcaagaccccccugggccugguggaccuguucguguucagcaccagcuucuaccugaucagcaucuuccugcaccugaucaagauccccacccacagacacaucaccggcaagcccugccccaagccccacagacugaaccacaugggcaucugcagcugcggccuguacaagcaccccggcgugcccgugaaguggaagagaugaggacuaguuauaagacugacuagcccgaugggccucccaacgggcccuccuccccuccuugcaccgagauuaaucaaaggcucuuuucagagccaccaaaaaaaaaaaaaaaaaaaaaaaaaaaaaaaaaaaaaaaaaaaaaaaaaaaaaaaaaaaaaaaaagaauu

SEQ ID NO: 36206 - RNA, 1655 nt, Artificial Sequence
  mRNA product Design i-3 (hSL-A64-N5) comprising derived and/or modified sequence from LASV(ISTH2010-NIG-2012;Clade II)__AIT17482__GPCmut9 (opt4)
aggagaaagcuuaccaugggccagaucaucaccuucuuccaggaggugccccacgugaucgaggaggugaugaacaucgugcugaucgcccugagccugcuggccauccugaagggcaucuacaacguggccaccugcggccuguucggccuggugagcuuccugcugcugugcggcagaagcugcagcaccaccuacaagggcguguacgagcugcagacccuggagcuggacauggccagccugaacaugaccaugccccugagcugcaccaagaacaacagccaccacuacaucauggugggcaacgagaccggccuggagcugacccugaccaacaccagcaucaucaaccacaaguucugcaaccugagcgacgcccacaagaagaaccuguacgaccacgcccugaugagcaucaucagcaccuuccaccugagcauccccaacuucaaccaguacgaggccaugagcugcgacuucaacggcggcaagaucagcgugcaguacaaccugagccacgccuacgccguggacgccgccaaccacugcggcaccaucgccaacggcgugcugcagaccuucaugagaauggccuggggcggcagcuacaucgcccuggacagcggcugcggcagcugggacugcaucaugaccagcuaccaguaccugaucauccagaacaucaccugggaggaccacugccaguucagcagacccagccccaucggcuaccugggccugcugagccagagaaccagagacaucuacaucagcagaagacugcugggcaccuucaccuggacccugagcgacagcgagggcaacgagacccccggcggcuacugccugaccagauggaugcugaucgaggccgagcugaagugcuucggcaacaccgccguggccaagugcaacgagaagcacgacgaggaguucugcgacaugcugagacuguucgacuucaacaagcaggccaucagaagacugaagaccgaggcccagaugagcauccagcugaucaacaaggccgugaacgcccugaucaacgaccagcugaucaugaagaaccaccugagagacaucaugugcauccccuacugcaacuacagcaaguacugguaccugaaccacaccgugaccggcaagaccagccugcccagaugcuggcuggugagcaacggcagcuaccugaacgagacccacuucagcgacgacaucgagcagcaggccgacaacaugaucaccgagcugcugcagaaggaguacaucgacagacagggcaagaccccccugggccugguggaccuguucguguucagcaccagcuucuaccugaucagcaucuuccugcaccuggugaagauccccacccacagacacguggugggcaagcccugccccaagccccacagacugaaccacaugggcaucugcagcugcggccuguacaagcaccccggcgugcccgugaaguggaagagaugaggacuaguuauaagacugacuagcccgaugggccucccaacgggcccuccuccccuccuugcaccgagauuaaucaaaggcucuuuucagagccaccaaaaaaaaaaaaaaaaaaaaaaaaaaaaaaaaaaaaaaaaaaaaaaaaaaaaaaaaaaaaaaaaagaauu

SEQ ID NO: 36207 - RNA, 1655 nt, Artificial Sequence
  mRNA product Design i-3 (hSL-A64-N5) comprising derived and/or modified sequence from LASV(Lassa virus/H.sapiens-wt/NGA/2015/ISTH_0543;Clade II)__AVO03639__GPCmut9 (opt4)
aggagaaagcuuaccaugggccagaucaucaccuucuuccaggaggugccccacgugaucgaggaggugaugaacaucgugcugaucgcccugagccugcuggccauccugaagggcaucuacaacguggccaccugcggccuguucggccuggugagcuuccugcugcugugcggcagaagcugcagcaccaccuacaagggcguguacgagcugcagacccuggagcuggacauggccaaccugaacaugaccaugccccugagcugcaccaagaacaacagccaccacuacaucauggugggcaacgagaccggccuggagcugacccugaccaacaccagcaucaucaaccacaaguucugcaaccugagcgacgcccacaagaagaaccuguacgaccacgcccugaugagcaucaucagcaccuuccaccugagcauccccaacuucaaccaguacgaggccaugagcugcgacuucaacggcggcaagaucagcgugcaguacaaccugagccacaccuacgccguggacgccgccaaccacugcggcaccaucgccaacggcgugcugcagaccuucaugagaauggccuggggcggcagcuacaucgcccuggacagcggcugcggcagcugggacugcaucaugaccagcuaccaguaccuggugauccagaacaccaccugggaggaccacugccaguucagcagacccagccccaucggcuaccugggccugcugagccagagaaccagagacaucuacaucagcagaagacugcugggcaccuucaccuggacccugagcgacagcgagggcaacgagacccccggcggcuacugccugaccagauggaugcugaucgaggccgagcugaagugcuucggcaacaccgccguggccaagugcaacgagaagcacgacgaggaguucugcgacaugcugagacuguucgacuucaacaagcaggccaucagaagacugaagaccgaggcccagaugagcauccagcugaucaacaaggccgugaacgcccugaucaacgaccagcugaucaugaagaaccaccugagagacaucaugugcauccccuacugcaacuacagcaaguacugguaccugaaccacaccgugaccggcaagaccagccugcccagaugcuggcuggugagcaacggcagcuaccugaacgagacccacuucagcgacgacaucgagcagcaggccgacaacaugaucaccgagcugcugcagaaggaguacaucgacagacagggcaagaccccccugggccugguggaccuguucguguucagcaccagcuucuaccugaucagcaucuuccugcaccuggugaagauccccacccacagacacaucaccggcaagcccugccccaagccccacagacugaaccacaugggcaucugcagcugcggccuguacaagcaccccggcgugcccgugaaguggaagagaugaggacuaguuauaagacugacuagcccgaugggccucccaacgggcccuccuccccuccuugcaccgagauuaaucaaaggcucuuuucagagccaccaaaaaaaaaaaaaaaaaaaaaaaaaaaaaaaaaaaaaaaaaaaaaaaaaaaaaaaaaaaaaaaaagaauu

SEQ ID NO: 36208 - RNA, 1655 nt, Artificial Sequence
  mRNA product Design i-3 (hSL-A64-N5) comprising derived and/or modified sequence from LASV(Lassa virus/H.sapiens-wt/NGA/2016/ISTH_0009;Clade II)__AVO03571__GPCmut9 (opt4)
aggagaaagcuuaccaugggccagaucaucaccuucuuccaggaggugccccacgugaucgaggaggugaugaacaucgugcugaucgcccugagccugcuggccauccugaagggcaucuacaacguggccaccugcggccugcugggccuggugagcuuccugcugcugugcggcagaagcugcagcaccaccuacaagggcguguacgagcugcagacccuggagcuggacauggccagccugaacaugaccaugccccugagcugcaccaagaacaacagccaccacuacaucauggugggcaacgagaccggccuggagcugacccugaccaacaccagcaucaucaaccacaaguucugcaaccugagcgacgcccacaagaagaaccuguacgaccacgcccugaugagcaucaucagcaccuuccaccugagcauccccaacuucaaccaguacgaggccaugagcugcgacuucaacggcggcagaaucagcgugcaguacaaccugagccacagcuacgccguggacgccgccaaccacugcggcaccaucgccaacggcgugcugcagaccuucaugagaauggccuggggcggcagcuacaucgcccuggacagcggcugcggcagcugggacugcaucaugaccagcuaccaguaccugaucauccagaacaccaccugggaggaccacugccaguucagcagacccagccccaucggcuaccugggccugcugagccagagaaccagagacaucuacaucagcagaagacugcugggcaccuucaccuggacccugagcgacagcgagggcaacgagacccccggcggcuacugccugaccagauggaugcugaucgaggccgagcugaagugcuucggcaacaccgccguggccaagugcaacgagaagcacgacgaggaguucugcgacaugcugagacuguucgacuucaacaagcaggccaucagaagacugaagaccgaggcccagaugagcauccagcugaucaacaaggccgugaacgcccugaucaacgaccagcugaucaugaagaaccaccugagagacaucaugugcauccccuacugcaacuacagcaaguacugguaccugaaccacaccgugaccggcaagaccagccugcccagaugcuggcuggugagcaacggcagcuaccugaacgagacccacuucagcgacgacaucgagcagcaggccgacaacaugaucaccgagcugcugcagaaggaguacaucgacagacagggcaagaccccccugggccugguggaccuguucguguucagcaccagcuucuaccugaucagcaucuuccugcaccuggugaagauccccacccacagacacaucaccggcaagcccugccccaagccccacagacugaaccacaugggcaucugcagcugcggccuguacaaccaccccggcgugcccgugaaguggaagagaugaggacuaguuauaagacugacuagcccgaugggccucccaacgggcccuccuccccuccuugcaccgagauuaaucaaaggcucuuuucagagccaccaaaaaaaaaaaaaaaaaaaaaaaaaaaaaaaaaaaaaaaaaaaaaaaaaaaaaaaaaaaaaaaaagaauu

SEQ ID NO: 36209 - RNA, 1655 nt, Artificial Sequence
  mRNA product Design i-3 (hSL-A64-N5) comprising derived and/or modified sequence from LASV(Lassa virus/H.sapiens-wt/NGA/2016/ISTH_0017;Clade II)__AVO03567__GPCmut9 (opt4)
aggagaaagcuuaccaugggccagaucaucaccuucuuccaggaggugccccacgugaucgaggaggugaugaacaucgugcugaucgcccugagccugcuggccauccugaagggcaucuacaacguggccaccugcggccuguucggccuggugagcuuccugcugcugugcggcagaagcugcagcaccaccuacaagggcguguacgagcugcagacccuggagcuggacauggccagccugaacaugaccaugccccugagcugcaccaagaacaacagccaccacuacaucauggugggcaacgagaccggccuggagcugacccugaccaacaccagcaucaucaaccacaaguucugcaaccugagcgacgcccacaagaagaaccuguacgaccacgcccugaugagcaucaucagcaccuuccaccugagcauccccaacuucaaccaguacgaggccaugagcugcgacuucaacggcggcaagaucagcgugcaguacaaccugagccacaccuacgccaucgacgccgccaaccacugcggcaccaucgccaacggcgugcugcagaccuucaugagaauggccuggggcggcagcuacaucgcccuggacagcggcugcggcagcugggacugcaucaugaccagcuaccaguaccugaucauccagaacaccaccugggaggaccacugccaguucagcagacccagccccaucggcuaccugggccugcugagccagagaaccagagacaucuacaucagcagaagacugcugggcaccuucaccuggacccugagcgacagcgagggcaacgagacccccggcggcuacugccugaccagauggaugcugaucgaggccgagcugaagugcuucggcaacaccgccguggccaagugcaacgagaagcacgacgaggaguucugcgacaugcugagacuguucgacuucaacaagcaggccaucagaagacugaagaccgaggcccagaugagcauccagcugaucaacaaggccgugaacgcccugaucaacgaccagcugaucaugaagaaccaccugagagacaucaugugcauccccuacugcaacuacagcaaguacugguaccugaaccacaccgugaccggcaagaccagccugcccagaugcuggcuggugagcaacggcagcuaccugaacgagacccacuucagcgacgacaucgagcagcaggccgacaacaugaucaccgagcugcugcagaaggaguacauggacagacagggcaagaccccccugggccugguggaccuguucguguucagcaccagcuucuaccugaucagcaucuuccugcaccuggugagaauccccacccacagacacgugaucggcaagcccugccccaagccccacagacugaaccacaugggcaucugcagcugcggccuguacaagcaccccggcgugcccgugaaguggaagagaugaggacuaguuauaagacugacuagcccgaugggccucccaacgggcccuccuccccuccuugcaccgagauuaaucaaaggcucuuuucagagccaccaaaaaaaaaaaaaaaaaaaaaaaaaaaaaaaaaaaaaaaaaaaaaaaaaaaaaaaaaaaaaaaaagaauu

SEQ ID NO: 36210 - RNA, 1655 nt, Artificial Sequence
  mRNA product Design i-3 (hSL-A64-N5) comprising derived and/or modified sequence from LASV(Lassa virus/H.sapiens-wt/NGA/2018/ISTH_0959;Clade II)__AVV65099__GPCmut9 (opt4)
aggagaaagcuuaccaugggccagaucaucaccuucuuccaggaggugccccacgugaucgaggaggugaugaacaucgugcugaucgcccugagccugcuggccauccugaagggcaucuacaacguggugaccugcggccuguucggccuggugagcuuccugcugcugugcggcagaagcugcagcaccaccuacaagggcguguacgagcugcagacccuggagcuggacauggccagccugaacaugaccaugccccugagcugcaccaagaacaacagccaccacuacaucauggugggcaacgagaccggccuggagcugacccugaccaacaccagcaucaucaaccacaaguucugcaaccugagcgacgcccacaagaagaaccuguacgaccacgcccugaugagcaucaucagcaccuuccaccugagcauccccaacuucaaccaguacgaggccaugagcugcgacuucaacggcggcaagaucagcgugcaguacaaccugagccacgccuacgccaucgacgccgccaaccacugcggcaccaucgccaacggcgugcugcagaccuucaugagaauggccuggggcggcagcuacaucgcccuggacagcggcugcggcagcugggacugcaucaugaccagcuaccaguaccugaucauccagaacaccaccugggaggaccacugccaguucagcagacccagccccaucggcuaccugggccugcugagccagagaaccagagacaucuacaucagcagaagacugcugggcaccuucaccuggacccugagcgacagcgagggcaacgagacccccggcggcuacugccugaccagauggaugcugaucgaggccgagcugaagugcuucggcaacaccgccguggccaagugcaacgagaagcacgacgaggaguucugcgacaugcugagacuguucgacuucaacaagcaggccaucagaagacugaagaccgaggcccagaugagcauccagcugaucaacaaggccgugaacgcccugaucaacgaccagcugaucaugaagaaccaccugagagacaucaugugcauccccuacugcaacuacagcaaguacugguaccugaaccacaccgugaccggcaagaccagccugcccagaugcuggcuggugagcaacggcagcuaccugaacgagacccacuucagcgacgacaucgagcagcaggccgacaacaugaucaccgagcugcugcagaaggaguacaucgacagacagggcaagaccccccugggccugguggaccuguucguguucagcaccagcuucuaccugaucagcaucuuccugcaccuggugaagauccccacccacagacacgugaucggcaagcccugccccaagccccacagacugaaccacaugggcaucugcagcugcggccuguacaagcaccccggcgugcccgugaaguggaagagaugaggacuaguuauaagacugacuagcccgaugggccucccaacgggcccuccuccccuccuugcaccgagauuaaucaaaggcucuuuucagagccaccaaaaaaaaaaaaaaaaaaaaaaaaaaaaaaaaaaaaaaaaaaaaaaaaaaaaaaaaaaaaaaaaagaauu

SEQ ID NO: 36211 - RNA, 1655 nt, Artificial Sequence
  mRNA product Design i-3 (hSL-A64-N5) comprising derived and/or modified sequence from LASV(LASV003-NIG-2008;Clade II)__AIT17580__GPCmut9 (opt4)
aggagaaagcuuaccaugggccagaucaucaccuucuuccaggaggugccccacgugaucgaggaggugaugaacaucgugcugaucgcccugagccugcuggccauccugaagggcaucuacaacguggccaccugcggccuguucggccuggugagcuuccugcugcugugcggcagaagcugcagcaccaccuacaagggcguguacgagcugcagacccuggagcuggacauggccagccugaacaugaccaugccccugagcugcaccaagaacaacagccaccacuacaucauggugggcaacgagaccggccuggagcugacccugaccaacaccagcaucaucaaccacaaguucugcaaccugagcgacgcccacaagaagaaccuguacgaccacgcccugaugagcaucaucagcaccuuccaccugagcauccccaacuucaaccaguacgaggccaugagcugcgacuucaacggcggcaagaucagcgugcaguacaaccugagccacaccuacgccguggacgccgccaaccacugcggcaccaucgccaacggcgugcugcagaccuucaugagaauggccuggggcggcagcuacaucgcccuggacagcggcugcggcagcugggacugcaucaugaccagcuaccaguaccugaucauccagaacaccaccugggaggaccacugccaguucagcagacccagccccaucggcuaccugggccugcugagccagagaaccagagacaucuacaucagcagaagacugcugggcaccuucaccuggacccugagcgacagcgagagcaacgagacccccggcggcuacugccugaccagauggaugcugaucgaggccgagcugaagugcuucggcaacaccgccguggccaagugcaacgagaagcacgacgaggaguucugcgacaugcugagacuguucgacuucaacaagcaggccaucagaagacugaaggccgaggcccagaugagcauccagcugaucaacaaggccgugaacgcccugaucaacgaccagcugaucaugaagaaccaccugagagacaucaugugcauccccuacugcaacuacagcaaguacugguaccugaaccacaccgugaccggcagaaccagccugcccagaugcuggcuggugagcaacggcagcuaccugaacgagacccacuucagcgacgacaucgagcagcaggccgacaacaugaucaccgagcugcugcagaaggaguacauggacagacagggcaagaccccccugggccugguggaccuguucguguucagcaccagcuucuaccugaucagcaucuuccugcaccuggugaagauccccacccacagacacgugaucggcaagcccugccccaagccccacagacugaaccacaugggcaucugcagcugcggccuguacaagcaccccggcgugcccgugaaguggaagagaugaggacuaguuauaagacugacuagcccgaugggccucccaacgggcccuccuccccuccuugcaccgagauuaaucaaaggcucuuuucagagccaccaaaaaaaaaaaaaaaaaaaaaaaaaaaaaaaaaaaaaaaaaaaaaaaaaaaaaaaaaaaaaaaaagaauu

SEQ ID NO: 36212 - RNA, 1655 nt, Artificial Sequence
  mRNA product Design i-3 (hSL-A64-N5) comprising derived and/or modified sequence from LASV(LASV035-NIG-2009;Clade II)__AIT17588__GPCmut9 (opt4)
aggagaaagcuuaccaugggccagaucaucaccuucuuccaggaggugccccacgugaucgaggaggugaugaacaucgugcugaucgcccugagccugcuggccauccugaagggcaucuacaacguggccaccugcggccuguucggccuggugagcuuccugcugcugugcggcagaagcugcagcaccaccuacaagggcguguacgagcugcagacccuggagcuggacauggccagccugaacaugaccaugccccugagcugcaccaagaacaacagccaccacuacaucauggugggcaacgagaccggccuggagcugacccugaccaacaccagcaucaucaaccacaaguucugcaaccugagcgacgcccacaagaagaaccuguacgaccacgcccugaugagcaucaucagcaccuuccaccugagcauccccaacuucaaccaguacgaggccaugagcugcgacuucaacggcggcaagaucagcgugcaguacaaccugagccacgccuacgccguggacgccgccaaccacugcggcaccaucgccaacggcgugcugcagaccuucaugagaauggccuggggcggcagcuacaucgcccuggacagcggcugcggcagcugggacugcaucaugaccagcuaccaguaccugaucauccagaacaccaccugggaggaccacugccaguucagcagacccagccccaucggcuaccugggccugcugagccagagaaccagagacaucuacaucagcagaagacugcugggcaccuucaccuggacccugagcgacagcgagggcaacgagacccccggcggcuacugccugaccagauggaugcugaucgaggccgagcugaagugcuucggcaacaccgccguggccaagugcaacgagaagcacgacgaggaguucugcgacaugcugagacuguucgacuucaacaagcaggccaucagaagacugaaggccgaggcccagaugagcauccagcugaucaacaaggccgugaacgcccugaucaacgaccagcugaucaugaagaaccaccugagagacaucaugugcauccccuacugcaacuacagcaaguacugguaccugaaccacaccgugaccggcaagaccagccugcccagaugcuggcuggugagcaacggcagcuaccugaacgagacccacuucagcgacgacaucgagcagcaggccgacaacaugaucaccgagcugcugcagaaggaguacaucgacagacagggcaagaccccccugggccugguggaccuguucguguucagcaccagcuucuaccugaucagcaucuuccugcaccuggugaagauccccacccacagacacgugaucggcaagcccugccccaagccccacagacugaaccacaugggcaucugcagcugcggccuguacaagcaccccggcgugcccgugaaguggaagagaugaggacuaguuauaagacugacuagcccgaugggccucccaacgggcccuccuccccuccuugcaccgagauuaaucaaaggcucuuuucagagccaccaaaaaaaaaaaaaaaaaaaaaaaaaaaaaaaaaaaaaaaaaaaaaaaaaaaaaaaaaaaaaaaaagaauu

SEQ ID NO: 36213 - RNA, 1655 nt, Artificial Sequence
  mRNA product Design i-3 (hSL-A64-N5) comprising derived and/or modified sequence from LASV(LASV1000-NIG-2009;Clade II)__AIT17782__GPCmut9 (opt4)
aggagaaagcuuaccaugggccagaucaucaccuucuuccaggaggugccccacgugaucgaggaggugaugaacaucgugcugaucgcccugagccugcuggccauccugaagggcaucuacaacguggccaccugcggccuguucggccuggugagcuuccugcugcugugcggcagaagcugcagcaccaccuacaagggcguguacgagcugcagacccuggagcuggacauggccagccugaacaugaccaugccccugagcugcaccaagaacaacagccaccacuacaucauggugggcaacgagaccggccuggagcugacccugaccaacaccagcaucaucaaccacaaguucugcaaccugagcgacgcccacaagaagaaccuguacgaccacgcccugaugagcaucaucagcaccuuccaccugagcauccccaacuucaaccaguacgaggccaugagcugcgacuucaacggcggcaagaucagcgugcaguacaaccugagccacaccuacgccguggacgccgccaaccacugcggcaccaucgccaacggcgugcugcagaccuucaugagaauggccuggggcggcagcuacaucgcccuggacagcggcugcggcagcugggacugcaucaugaccagcuaccaguaccugaucauccagaacaccaccugggaggaccacugccaguucagcagacccagccccaucggcuaccugggccugcugagccagagaaccagagacaucuacaucagcagaagacugcugggcaccuucaccuggacccugagcgacagcgagggcaacgagacccccggcggcuacugccugaccagauggaugcugaucgaggccgagcugaagugcuucggcaacaccgccguggccaagugcaacgagaagcacgacgaggaguucugcgacaugcugagacuguucgacuucaacaagcaggccaucaagagacugaagaccgaggcccagaugagcauccagcugaucaacaaggccgugaacgcccugaucaacgaccagcugaucaugaagaaccaccugagagacaucaugugcauccccuacugcaacuacagcaaguacugguaccugaaccacaccgugaccggcaagaccagccugcccagaugcuggcuggugagcaacggcagcuaccugaacgagacccacuucagcgacgacaucgagcagcaggccgacaacaugaucaccgagcugcugcagaaggaguacaucgacagacagggcaagaccccccugggccugguggaccuguucguguucagcaccagcuucuaccugaucagcaucuuccugcaccuggugaagauccccacccacagacacguggugggcaagcccugccccaagccccacagacugaaccacaugggcaucugcagcugcggccuguacaagcaccccggcgugcccgugaaguggaagagaugaggacuaguuauaagacugacuagcccgaugggccucccaacgggcccuccuccccuccuugcaccgagauuaaucaaaggcucuuuucagagccaccaaaaaaaaaaaaaaaaaaaaaaaaaaaaaaaaaaaaaaaaaaaaaaaaaaaaaaaaaaaaaaaaagaauu

SEQ ID NO: 36214 - RNA, 1655 nt, Artificial Sequence
  mRNA product Design i-3 (hSL-A64-N5) comprising derived and/or modified sequence from LASV(LASV221-NIG-2010;Clade II)__AIT17624__GPCmut9 (opt4)
aggagaaagcuuaccaugggccagaucaucaccuucuuccaggaggugccccacgugaucgaggaggugaugaacaucgugcugaucgcccugagccugcuggccauccugaagggcaucuacaacguggccaccugcggccuguucggccuggugagcuuccugcugcugugcggcagaagcugcagcaccaccuacaagggcguguacgagcugcagacccuggagcuggacauggccagccugaacaugaccaugccccugagcugcaccaagaacaacagccaccacuacaucauggugggcaacgagaccggccuggagcugacccugaccaacaccagcaucaucaaccacaaguucugcaaccugagcgacgcccacaagaagaaccuguacgaccacgcccugaugagcaucaucagcaccuuccaccugagcauccccaacuucaaccaguacgaggccaugagcugcgacuucaacggcggcaagaucagcgugcaguacaaccugagccacaccuacgccaucgacgccgccaaccacugcggcaccaucgccaacggcgugcugcagaccuucaugagaauggccuggggcggcagcuacaucgcccuggacagcggcugcggcagcugggacugcaucaugaccagcuaccaguaccugaucauccagaacaccaccugggaggaccacugccaguucagcagacccagccccaucggcuaccugggccugcugagccagagaaccagagacaucuacaucagcagaagacugcugggcaccuucaccuggacccugagcgacagcgagggcaacgagacccccggcggcuacugccugaccagauggaugcugaucgaggccgagcugaagugcuucggcaacaccgccguggccaagugcaacgagaagcacgacgaggaguucugcgacaugcugagacuguucgacuucaacaagcaggccaucagaagacugaagaccgaggcccagaugagcauccagcugaucaacaaggccgugaacgcccugaucaacgaccagcugaucaugaagaaccaccugagagacaucaugugcauccccuacugcaacuacagcaaguacugguaccugaaccacaccgugaccggcaagaccagccugcccagaugcuggcuggugagcaacggcagcuaccugaacgagacccacuucagcgacgacaucgagcagcaggccgacaacaugaucaccgagaugcugcagaaggaguacauggacagacagggcaagaccccccugggccugguggaccuguucguguucagcaccagcuucuaccugaucagcaucuuccugcaccuggugaagauccccacccacagacacgugaucggcaagcccugccccaagccccacagacugaaccacaugggcaucugcagcugcggccuguacaagcaccccggcgugcccgugaaguggaagagaugaggacuaguuauaagacugacuagcccgaugggccucccaacgggcccuccuccccuccuugcaccgagauuaaucaaaggcucuuuucagagccaccaaaaaaaaaaaaaaaaaaaaaaaaaaaaaaaaaaaaaaaaaaaaaaaaaaaaaaaaaaaaaaaaagaauu

SEQ ID NO: 36215 - RNA, 1655 nt, Artificial Sequence
  mRNA product Design i-3 (hSL-A64-N5) comprising derived and/or modified sequence from LASV(LASV237-NIG-2010;Clade II)__AIT17638__GPCmut9 (opt4)
aggagaaagcuuaccaugggccagaucaucaccuucuuccaggaggugccccacgugaucgaggaggugaugaacaucgugcugaucgcccugagccugcuggccauccugaagggcaucuacaacguggccaccugcggccuguucggccuggugagcuuccugcugcugugcggcagaagcugcagcaccaccuacaagggcguguacgagcugcagacccuggagcuggacauggccagccugaacaugaccaugccccugagcugcaccaagaacaacagccaccacuacaucauggugggcaacgagaccggccuggagcugacccugaccaacaccagcaucaucaaccacaaguucugcaaccugagcgacgcccacaagaaggaccuguacgaccacgcccugaugagcaucaucagcaccuuccaccugagcauccccaacuucaaccaguacgaggccaugagcugcgacuucaacggcggcaagaucagcgugcaguacaaccugagccacaccuacgccguggacgccgccaaccacugcggcaccaucgccaacggcgugcugcagaccuucaugagaauggccuggggcggcagcuacaucgcccuggacagcggcugcggcagcugggacugcaucaugaccagcuaccaguaccugaucauccagaacaccaccugggaggaccacugccaguucagcagacccagccccaucggcuaccugggccugcugagccagagaaccagagacaucuacaucagcagaagacugcugggcaccuucaccuggacccugagcgacagcgagggcaacgagacccccggcggcuacugccugaccagauggaugcugaucgaggccgagcugaagugcuucggcaacaccgccguggccaagugcaacgagaagcacgacgaggaguucugcgacaugcugagacuguucgacuucaacaagcaggccaucagaagacugaagaccgaggcccagaugagcauccagcugaucaacaaggccgugaacgcccugaucaacgaccagcugaucaugaagaaccaccugagagacaucaugugcauccccuacugcaacuacagcaaguacugguaccugaaccacaccgugaccggcaagaccagccugcccagaugcuggcuggugagcaacggcagcuaccugaacgagacccacuucagcgacgacaucgagcagcaggccgacaacaugaucaccgagcugcugcagaaggaguacauggacagacagggcaagaccccccugggccugguggaccuguucguguucagcaccagcuucuaccugaucagcaucuuccugcaccugaucaagauccccacccacagacacaucaccggcaagcccugccccaagccccacagacugaaccacaugggcaucugcagcugcggccuguacaagcaccccggcgugcccgugaaguggaagagaugaggacuaguuauaagacugacuagcccgaugggccucccaacgggcccuccuccccuccuugcaccgagauuaaucaaaggcucuuuucagagccaccaaaaaaaaaaaaaaaaaaaaaaaaaaaaaaaaaaaaaaaaaaaaaaaaaaaaaaaaaaaaaaaaagaauu

SEQ ID NO: 36216 - RNA, 1655 nt, Artificial Sequence
  mRNA product Design i-3 (hSL-A64-N5) comprising derived and/or modified sequence from LASV(LASV253-NIG-2011;Clade II)__AIT17670__GPCmut9 (opt4)
aggagaaagcuuaccaugggccagaucaucaccuucuuccaggaggugccccacgugaucgaggaggugaugaacaucgugcugaucgcccugagccugcuggccauccugaagggcaucuacaacguggccaccugcggccuguucggccuggugagcuuccugcugcugugcggcagaagcugcagcaccaccuacaagggcguguacgagcugcagacccuggagcuggacauggccagccugaacaugaccaugccccugagcugcaccaagaacaacagccaccacuacaucauggugggcaacgagaccggccuggagcugacccugaccaacaccagcaucaucaaccacaaguucugcaaccugagcgacgcccacaagaagaaccuguacgaccacgcccugaugagcaucaucagcaccuuccaccugagcauccccaacuucaaccaguacgaggccaugagcugcgacuucaacggcggcaagaucagcgugcaguacaaccugagccacaccuacgccguggacgccgccaaccacugcggcaccaucgccaacggcgugcugcagaccuucaugagaauggccuggggcggcagcuacaucgcccuggacagcggcugcggcagcugggacugcaucaugaccagcuaccaguaccugaucauccagaacaccaccugggaggaccacugccaguucagcagacccagccccaucggcuaccugggccugcugagccagagaaccagagacaucuacaucagcagaagacugcugggcaccuucaccuggacccugagcgacagcgagggcaacgagacccccggcggcuacugccugaccagauggaugcugaucgaggccgagcugaagugcuucggcaacaccgccguggccaagugcaacgagaagcacgacgaggaguucugcgacaugcugagacuguucgacuucaacaagcaggccaucagaagacugaaggccgaggcccagaugagcauccagcugaucaacaaggccgugaacgcccugaucaacgaccagcugaucaugaagaaccaccugagagacaucaugugcauccccuacugcaacuacagcaaguacugguaccugaaccacaccgugaccggcagaaccagccugcccagaugcuggcuggugagcaacggcagcuaccugaacgagacccacuucagcgacgacaucgagcagcaggccgacaacaugaucaccgagcugcugcagaaggaguacaucgacagacagggcaagaccccccugggccugguggaccuguucguguucagcaccagcuucuaccugaucagcaucuuccugcaccuggugaagauccccacccacagacacaucaucggcaagcccugccccaagccccacagacugaaccacaugggcaucugcagcugcggccuguacaagcaccccggcgugcccgugaaguggaagagaugaggacuaguuauaagacugacuagcccgaugggccucccaacgggcccuccuccccuccuugcaccgagauuaaucaaaggcucuuuucagagccaccaaaaaaaaaaaaaaaaaaaaaaaaaaaaaaaaaaaaaaaaaaaaaaaaaaaaaaaaaaaaaaaaagaauu

SEQ ID NO: 36217 - RNA, 1655 nt, Artificial Sequence
  mRNA product Design i-3 (hSL-A64-N5) comprising derived and/or modified sequence from LASV(LASV254-NIG-2011;Clade II)__AIT17674__GPCmut9 (opt4)
aggagaaagcuuaccaugggccagaucaucaccuucuuccaggaggugccccacgugaucgaggaggugaugaacaucgugcugaucgcccugagccugcuggccauccugaagggcaucuacaacguggccaccugcggccuguucggccuggugagcuuccugcugcugugcggcagaagcugcagcaccaccuacaagggcguguacgagcugcagacccuggagcuggacaugaccaaccugaacaugaccaugccccugagcugcaccaagaacaacagccaccacuacaucauggugggcaacgagaccggccuggagcugacccugaccaacaccagcaucaucaaccacaaguucugcaaccugagcgacgcccacaagaagaaccuguacaaccacgcccugaugagcaucaucagcaccuuccaccugagcauccccaacuucaaccaguacgaggccaugagcugcgacuucaacggcggcaagaucagcgugcaguacaaccugagccacagcuacgccguggacgccgccaaccacugcggcaccaucgccaacggcgugcugcagaccuucaugagaauggccuggggcggcagcuacaucgcccuggacagcggcugcggcaacugggacugcaucaugaccagcuaccaguaccugaucauccagaacaccaccugggaggaccacugccaguucagcagacccagccccaucggcuaccugggccugcugagccagagaaccagagacaucuacaucagcagaagacugcugggcaccuucaccuggacccugagcgacagcgagggcaacgagacccccggcggcuacugccugaccagauggaugcugaucgaggccgagcugaagugcuucggcaacaccgccguggccaagugcaacgagaagcacgacgaggaguucugcgacaugcugagacuguucgacuucaacaagcaggccaucagaagacugaagaccgaggcccaggccaacauccagcugaucaacaaggccgugaacgcccugaucaacgaccagcugaucaugaagaaccaccugagagacaucaugugcauccccuacugcaacuacagcaaguacugguaccugaaccacaccgugaccggcaagaccagccugcccagaugcuggcuggugagcaacggcagcuaccugaacgagacccacuucagcgacgacaucgagcagcaggccgacaacaugaucaccgagcugcugcagaaggaguacauggacagacagggcaagaccccccugggccugguggaccuguucguguucagcaccagcuucuaccugaucagcaucuuccugcaccuggugaagauccccacccacagacacgugaucggcaagcccugccccaagccccacagacugaaccacaugggcaucugcagcugcggccuguacaagcaccccggcgugcccgugaaguggaagagaugaggacuaguuauaagacugacuagcccgaugggccucccaacgggcccuccuccccuccuugcaccgagauuaaucaaaggcucuuuucagagccaccaaaaaaaaaaaaaaaaaaaaaaaaaaaaaaaaaaaaaaaaaaaaaaaaaaaaaaaaaaaaaaaaagaauu

SEQ ID NO: 36218 - RNA, 1655 nt, Artificial Sequence
  mRNA product Design i-3 (hSL-A64-N5) comprising derived and/or modified sequence from LASV(Nig08-A19;Clade III)__ADU56618__GPCmut9 (opt4)
aggagaaagcuuaccaugggccagaucgugaccuucuuccaggaggugccccacgugaucgaggaggugaugaacaucgugcugaucgcccugagcauccuggccauccugaagggccuguacaacaucgccaccugcggccugaucggccuggugaccuuccugcugcugagcggcagaagcugcagcaugaccuacaagggcguguacgagcugcagacccuggagcugaacaugaacacccugaacaugaccaugccccugagcugcaccaagaacaacagccaccacuacaucauggugggcaacgagaccggccuggagcugacccugaccaacaccagccugcugcaccacaaguucugcaaccugagcgacgcccacaagaagaaccuguacgaccacacccugaugagcaucaucagcaccuuccaccugagcauccccaacuucaaccaguacgaggccaugagcugcgacuucaacggcggcaagaucaccgugcaguacaaccugagccacagcuacgccaucgacgccgccaaccacugcggcaccguggccaacggcgugcugcagaccuucaugagaauggccuggggcggcagcuacaucgcccuggacagcggcugcggcaagugggacugcaucaugaccagcuaccaguaccugaucauccagaacaccaccugggaggaccacugccaguucagcagacccagccccaucggcuaccugggccugcugagccagagaaccagagacaucuacaucagcagaagacugcugggcaccuucaccuggacccugagcgacagcgagggcaacgagacccccggcggcuacugccugaccagauggaugcugaucgaggccgagcugaagugcuucggcaacaccgccguggccaagugcaacgagaagcacgacgaggaguucugcgacaugcugagacuguucgacuucaacaagcaggccaucagaagacugaaggccgaggcccagaugagcauccagcugaucaacaaggccgugaacgcccugaucaacgaccagcugaucaugaagaaccaccugagagacaucaugugcauccccuacugcaacuacagcaaguacugguaccugaaccacaccagcaccggcagaaccagccugcccagaugcuggcuggugagcaacggcagcuaccugaacgagacccacuucagcgacgacaucgagcagcaggccgacaacaugaucaccgagaugcugcagaaggaguaccuggacagacagggcaagaccccccugggccugguggaccuguucguguucagcaccagcuucuaccugaucagcaucuuccugcaccuggugaagauccccacccacagacacaucgugggcaagcccugccccaagccccacagacugaaccacaugggcaucugcagcugcggccuguacaagcagcccggcgugcccgugagauggaagagaugaggacuaguuauaagacugacuagcccgaugggccucccaacgggcccuccuccccuccuugcaccgagauuaaucaaaggcucuuuucagagccaccaaaaaaaaaaaaaaaaaaaaaaaaaaaaaaaaaaaaaaaaaaaaaaaaaaaaaaaaaaaaaaaaagaauu

SEQ ID NO: 36219 - RNA, 1658 nt, Artificial Sequence
  mRNA product Design i-3 (hSL-A64-N5) comprising derived and/or modified sequence from LASV(G1180-SLE-2010;Clade IV)__AIT17168__GPCmut9 (opt4)
aggagaaagcuuaccaugggccagaucgugaccuucuuccaggaggugccccacgugaucgaggaggugaugaacaucgugcugaucgcccugagcauccuggccgugcugaagggccuguacaacuucgccaccugcggccuggugggccugcugaccuuccugcugcugugcggcagaagcugcaccgccagcagauacaagggcguguacgagcugcagacccuggagcugaacauggagacccugaacaugaccaugccccugagcugcaccaagaacaacagccaccacuacaucauggugggcaacgagaccggccuggagcugacccugaccaacaccagcaucaucaaccacaaguucugcaaccugagcgacgcccacaagaagaaccuguacgaccacgcccugaugagcaucaucagcaccuuccaccugagcauccccaacuucaaccaguacgaggccaugagcugcgacuucaacggcggcaagaucagcgugcaguacaaccugagccacagcuacgccggcgacgccgccaaccacugcggcaccguggccaacggcgugcugcagaccuucaugagaauggccuggggcggcagcuacaucgcccuggacagcggcugcggcagcugggacugcaucaugaccagcuaccaguaccugaucauccagaacaccaccugggaggaccacugccaguucagcagacccagccccaucggcuaccugggccugcugagccagagaaccagagacaucuacaucagcagaagacugcugggcaccuucaccuggacccugagcgacagcgagggcaaggacacccccggcggcuacugccugaccagauggaugcugaucgaggccgagcugaagugcuucggcaacaccgccguggccaagugcaacgagaagcacgacgaggaguucugcgacaugcugagacuguucgacuucaacaagcaggccauccagagacugaaggccgaggcccagaugagcauccagcugaucaacaaggccgugaacgcccugaucaacgaccagcugaucaugaagaaccaccugagagacaucaugugcauccccuacugcaacuacagcaaguacugguaccugaaccacaccaccaccggcaagaccagccugcccaagugcuggcuggugagcaacggcagcuaccugaacgagacccacuucagcgacgacaucgagcagcaggccgacaacaugaucaccgagaugcugcagaaggaguacauggagagacagggcaagaccccccugggccugguggaccuguucguguucagcaccagcuucuaccugaucagcaucuuccugcaccuggugaagauccccacccacagacacaucgugggcaagagcugccccaagccccacagacugaaccacaugggcaucugcagcugcggccuguacaagcagcccggcgugcccgugaaguggaagagaugaggacuaguuauaagacugacuagcccgaugggccucccaacgggcccuccuccccuccuugcaccgagauuaaucaaaggcucuuuucagagccaccaaaaaaaaaaaaaaaaaaaaaaaaaaaaaaaaaaaaaaaaaaaaaaaaaaaaaaaaaaaaaaaaagaauu

SEQ ID NO: 36220 - RNA, 1658 nt, Artificial Sequence
  mRNA product Design i-3 (hSL-A64-N5) comprising derived and/or modified sequence from LASV(G1442-SLE-2011;Clade IV)__AIT17180__GPCmut9 (opt4)
aggagaaagcuuaccaugggccagaucgugaccuucuuccaggaggugccccacgugaucgaggaggugaugaacaucgugcugaucgcccugagcauccuggccgugcugaagggccuguacaacguggccaccugcggccugaucggccuggugaccuuccugcugcugugcggcagaagcugcaccaccacccuguacaagggcguguacgagcugcagacccuggagcugaacauggagacccugaacaugaccaugccccugagcugcaccaagaacaacagccaccacuacaucagagugggcaacgagaccggccuggagcugacccugaccaacaccagcaucaucaaccacaaguucugcaaccugagcgacgcccacaagaagaaccuguacgaccacgcccugaugagcaucaucagcaccuuccaccugagcauccccaacuucaaccaguacgaggccaugagcugcgacuucaacggcggcaagaucagcgugcaguacaaccugagccacagcuacgccggcgacgccgccaaccacugcggcaccguggccaacggcgugcugcagaccuucaugagaauggccuggggcggcagcuacaucgcccuggacagcggcugcggcaacugggacugcaucaugaccagcuaccaguaccugaucauccagaacaccaccugggacgaccacugccaguucagcagacccagccccaucggcuaccugggccugcugagccagagaaccagagacguguacaucagcagaagacugcugggcaccuucaccuggacccugagcgacagcgagggcaaggacacccccggcggcuacugccugaccagauggaugcugaucgaggccgagcugaagugcuucggcaacaccgccguggccaagugcaacgagaagcacgacgaggaguucugcgacaugcugagacuguucgacuucaacaagcaggccauccagagacugaaggccgaggcccagaugagcauccagcugaucaacaaggccgugaacgcccugaucaacgaccagcugaucaugaagaaccaccugagagacaucaugugcauccccuacugcaacuacagcaaguacugguaccugaacaacaccgccaccggcaagaccagccugcccaagugcuggcugaucagcaacggcagcuaccugaacgagacccacuucagcgacgacaucgagcaggaggccgacaacaugaucaccgagaugcugcagaaggaguacauggagagacagggcaagaccccccugggccugguggaccuguucguguucagcaccagcuucuaccugaucagcaucuuccugcaccuggugaagauccccacccacagacacaucgugggcaagagcugccccaagccccacagacugaaccacaugggcaucugcagcugcggccuguacaagcagcccggcgugcccgugagauggaagagaugaggacuaguuauaagacugacuagcccgaugggccucccaacgggcccuccuccccuccuugcaccgagauuaaucaaaggcucuuuucagagccaccaaaaaaaaaaaaaaaaaaaaaaaaaaaaaaaaaaaaaaaaaaaaaaaaaaaaaaaaaaaaaaaaagaauu

SEQ ID NO: 36221 - RNA, 1658 nt, Artificial Sequence
  mRNA product Design i-3 (hSL-A64-N5) comprising derived and/or modified sequence from LASV(G3010-SLE-2013;Clade IV)__AIT17344__GPCmut9 (opt4)
aggagaaagcuuaccaugggccagaucgugaccuucuuccaggaggugccccacgugaucgaggaggugaugaacaucgugcugaucgcccugagcauccuggccgugcugaagggccuguacaacuucgccaccugcggccuggugggccuggugaccuuccugcugcugugcggcagaagcugcaccaccagccuguacaagggcguguacgagcugcagacccuggagcugaacauggagacccugaacaugaccaugccccugagcugcaccaagaacaacagccaccacuacaucauggugggcaacgagaccggccuggagcugacccugaccaacaccagcaucaucaaccacaaguucugcaaccugagcgacgcccacaagaagaaccuguacaaccacgcccugaugagcaucaucagcaccuuccaccugagcauccccaacuucaaccaguacgaggccaugagcugcgacuucaacggcggcaagaucagcgugcaguacaaccugagccacagcuacgccggcgacgccgccagccacugcggcaccguggccaacggcgugcugcagaccuucaugagaauggccuggggcggcagcuacaucgcccuggacagcggcugcggcaagugggacugcaucaugaccagcuaccaguaccugaucauccagaacaccaccugggaggaccacugccaguucagcagacccagccccaucggcuaccugggccugcugagccagagaaccagagacaucuacaucagcagaagacugcugggcaccuucaccuggacccugagcgacagcgagggcaaggacacccccggcggcuacugccugaccagauggaugcugaucgaggccgagcugaagugcuucggcaacaccgccguggccaagugcaacgagaagcacgacgaggaguucugcgacaugcugagacuguucgacuucaacaagcaggccauccagagacugaagaccgaggcccagaugagcauccagcugaucaacaaggccgugaacgcccugaucaacgaccagcugaucaugaagaaccaccugagagacaucaugugcauccccuacugcaacuacagcaaguacugguaccugaaccacaccaccaccggcaagaccagccugcccaagugcuggcuggugagcaacggcagcuaccugaacgagacccacuucagcgacgacaucgagcagcaggccgacaacaugaucaccgagaugcugcagaaggaguacauggagagacagggcaagaccccccugggccugguggaccuguucguguucagcaccagcuucuaccugaucagcaucuuccugcaccuggugaagauccccacccacagacacaucgugggcaagagcugccccaagccccacagacugaaccacaugggcaucugcagcugcggccuguacaagcagcccggcgugcccgugagauggaagagaugaggacuaguuauaagacugacuagcccgaugggccucccaacgggcccuccuccccuccuugcaccgagauuaaucaaaggcucuuuucagagccaccaaaaaaaaaaaaaaaaaaaaaaaaaaaaaaaaaaaaaaaaaaaaaaaaaaaaaaaaaaaaaaaaagaauu

SEQ ID NO: 36222 - RNA, 1658 nt, Artificial Sequence
  mRNA product Design i-3 (hSL-A64-N5) comprising derived and/or modified sequence from LASV(G502-SLE-2009;Clade IV)__AIT17126__GPCmut9 (opt4)
aggagaaagcuuaccaugggccagaucgugaccuucuuccaggaggugccccacgugaucgaggaggugaugaacaucgugcugaucgcccugagcauccuggccgugcugaagggccuguacaacuucgccaccugcggccuggugggccugcugaccuuccugcugcugugcggcagaagcugcaccaccggccuguacaagggcguguacgagcugcagacccuggagcugaacauggagacccugaacaugaccaugccccugagcugcaccaagaacaacagccaccacuacaucauggugggcaacgagaccggccuggagcugacccugaccaacaccagcaucaucaaccacaaguucugcaaccugagcgacgcccacaagaagaaccuguacgaccacgcccugaugagcaucaucagcaccuuccaccugagcauccccaacuucaaccaguacgaggccaugagcugcgacuucaacggcggcaagaucagcgugcaguacaaccugagccacagcuacgccggcgacgccgccgaccacugcggcaccguggccaacggcgugcugcagaccuucaugagaauggccuggggcggcagcuacaucgcccuggacagcggcugcggcagaugggacugcaucaugaccagcuaccaguaccugaucauccagaacaccaccugggaggaccacugccaguucagcagacccagccccaucggcuaccugggccugcugagccagagaaccagagacaucuacaucagcagaagacugcugggcaccuucaccuggacccugagcgacagcgagggcaaggacacccccggcggcuacugccugaccagauggaugcugaucgaggccgagcugaagugcuucggcaacaccgccguggccaagugcaacgagaagcacgacgaggaguucugcgacaugcugagacuguucgacuucaacaagcaggccauccagagacugaaggccgaggcccagaugagcauccagcugaucaacaaggccgugaacgcccugaucaacgaccagcuggugaugaagaaccaccugagagacaucaugugcauccccuacugcaacuacagcagauacugguaccugaaccacaccaccaccggcagaaccagccugcccaagugcuggcuggugagcaacggcagcuaccugaacgagacccacuucagcgacgacaucgagcagcaggccgacaacaugaucaccgagaugcugcagaaggaguacauggagagacagggcaagaccccccugggccugguggaccuguucguguucagcaccagcuucuaccugaucagcaucuuccugcaccuggugaagauccccacccacagacacaucgugggcaagagcugccccaagccccacagacugaaccacaugggcaucugcagcugcggccuguacaagcagcccggcgugcccgugaaguggaagagaugaggacuaguuauaagacugacuagcccgaugggccucccaacgggcccuccuccccuccuugcaccgagauuaaucaaaggcucuuuucagagccaccaaaaaaaaaaaaaaaaaaaaaaaaaaaaaaaaaaaaaaaaaaaaaaaaaaaaaaaaaaaaaaaaagaauu

SEQ ID NO: 36223 - RNA, 1658 nt, Artificial Sequence
  mRNA product Design i-3 (hSL-A64-N5) comprising derived and/or modified sequence from LASV(G733-SLE-2010;Clade IV)__AIT17154__GPCmut9 (opt4)
aggagaaagcuuaccaugggccagaucgugaccuucuuccaggaggugccccacgugaucgaggaggugaugaacaucgugcugaucgcccugagcauccuggccgugcugaagggccuguacaacuucgccaccugcggcaucgugggccuggugagcuuccugcugcugugcggcagaagcugcaccaccagccuguacaagggcguguacgagcugcagacccuggagcugaacauggagacccugaacaugaccaugccccugagcugcaccaagaacaacagccaccacuacaucauggugggcaacgagaccggccuggagcugacccugaccaacaccagcaucaucaaccacaaguucugcaaccugagcgacgcccacaagaagaaccuguacgaccacgcccugaugagcaucaucagcaccuuccaccugagcauccccaacuucaaccaguacgaggccaugagcugcgacuucaacggcggcaagaucagcgugcaguacaaccugagccacagcuacgccggcgacgccgccaaccacugcggcaccaucgccaacggcgugcugcagaccuucaugagaauggccuggggcggcagcuacaucgcccuggacagcggcugcgacagaugggacugcaucaugaccagcuaccaguaccugaucauccagaacaccaccugggaggaccacugccaguucagcagacccagccccaucggcuaccugggccugcugagccagagaaccagagacaucuacaucagcagaagacugcugggcaccuucaccuggacccugagcgacagcgagggcaaggacacccccggcggcuacugccugaccagauggaugcugaucgaggccgagcugaagugcuucggcaacaccgccguggccaagugcaacgagaagcacgacgaggaguucugcgacaugcugagacuguucgacuucaacaagcaggccauccagagacugaaggccgaggcccagaugagcauccagcugaucaacaaggccgugaacgcccugaucaacgaccagcugaucaugaagaaccaccugagagacaucaugugcauccccuacugcaacuacagcaaguacugguaccugaaccacaccaccaccggcaagaccagccugcccaagugcuggcuggugagcaacggcagcuaccugaacgagacccacuucagcgacgacaucgagcagcaggccgacaacaugaucaccgagaugcugcagaaggaguacauggagagacagggcaagaccccccugggccugguggaccuguucguguucagcaccagcuucuaccugaucagcaucuuccugcaccuggugaagauccccacccacagacacguggugggcaagagcugccccaagccccacagacugaaccacaugggcaucugcagcugcggccuguacggccagcccggcgugcccgugaaguggaagagaugaggacuaguuauaagacugacuagcccgaugggccucccaacgggcccuccuccccuccuugcaccgagauuaaucaaaggcucuuuucagagccaccaaaaaaaaaaaaaaaaaaaaaaaaaaaaaaaaaaaaaaaaaaaaaaaaaaaaaaaaaaaaaaaaagaauu

SEQ ID NO: 36224 - RNA, 1658 nt, Artificial Sequence
  mRNA product Design i-3 (hSL-A64-N5) comprising derived and/or modified sequence from MOPV/LASV reassortant(IGS-1;Clade IV)__AFY05576__GPCmut9 (opt4)
aggagaaagcuuaccaugggccagaucgugaccuucuuccaggaggugccccacgugaucgaggaggugaugaacaucgugcugaucgcccugagcgugcuggccgugcugaagggccuguacaacuucgccaccugcggccuggugggccuggugaccuuccugcugcugugcggcagaagcugcaccaccagccuguacaagggcguguacgagcugcagacccuggagcugaacauggagacccugaacaugaccaugccccugagcugcaccaagaacaacagccaccacuacaucauggugggcaacgagaccggccuggagcugacccugaccaacaccagcaucaucaaccacaaguucugcaaccugagcgacgcccacaagaagaaccuguacgaccacgcccugaugagcaucaucagcaccuuccaccugagcauccccaacuucaaccaguacgaggccaugagcugcgacuucaacggcggcaagaucagcgugcaguacaaccugagccacagcuacgccggcgacgccgccaaccacugcggcaccguggccaacggcgugcugcagaccuucaugagaauggccuggggcggcagcuacaucgcccuggacagcggcugcggcaacugggacugcaucaugaccagcuaccaguaccugaucauccagaacaccaccugggaggaccacugccaguucagcagacccagccccaucggcuaccugggccugcugagccagagaaccagagacaucuacaucagcagaagacugcugggcaccuucaccuggacccugagcgacagcgagggcgaggacacccccggcggcuacugccugaccagauggaugcugaucgaggccgagcugaagugcuucggcaacaccgccguggccaagugcaacgagaagcacgacgaggaguucugcgacaugcugagacuguucgacuucaacaagcaggccauccagagacugaaggccgaggcccagaugagcauccagcugaucaacaaggccgugaacgcccugaucaacgaccagcugaucaugaagaaccaccugagagacaucaugugcauccccuacugcaacuacagcaaguacugguaccugaaccacaccaccaccggcagaaccagccugcccaagugcuggcuggugagcaacggcagcuaccugaacgagacccacuucagcgacgacaucgagcagcaggccgacaacaugaucaccgagaugcugcagaaggaguacauggagagacagggcaagaccccccugggccugguggaccuguucguguucagcaccagcuucuaccugaucagcaucuuccugcaccuggugaagauccccacccacagacacaucgugggcaagagcugccccaagccccacagacugaaccacaugggcaucugcagcugcggccuguacaagcagcccggcgugcccgugaaguggaagagaugaggacuaguuauaagacugacuagcccgaugggccucccaacgggcccuccuccccuccuugcaccgagauuaaucaaaggcucuuuucagagccaccaaaaaaaaaaaaaaaaaaaaaaaaaaaaaaaaaaaaaaaaaaaaaaaaaaaaaaaaaaaaaaaaagaauu

SEQ ID NO: 36225 - RNA, 1658 nt, Artificial Sequence
  mRNA product Design i-3 (hSL-A64-N5) comprising derived and/or modified sequence from LASV(LM765-SLE-2012;Clade IV)__AIT17814__GPCmut9 (opt4)
aggagaaagcuuaccaugggccagaucgugaccuucuuccaggaggugccccacgugaucgaggaggugaugaacaucgugcugaucgcccugagcauccuggccgugcugaagggccuguacaacuucgccaccugcggccuggugggccuggugaccuuccugcugcugugcggcagaagcugcaccaccagccuguacaagggcguguacgagcugcagacccuggagcugaacauggagacccugaacaugaccaugccccugagcugcaccaagaacaacagccaccacuacaucauggugggcaacgagaccggccuggagcugacccugaccaacaccagcaucaucgaccacaaguucugcaaccugagcgacgcccacagaaagaaccuguacgaccacgcccugaugagcaucaucagcaccuuccaccugagcauccccaacuucaaccaguacgaggccaugagcugcgacuucaacggcggcaagaucagcgugcaguacaaccugagccacagcuacgccaaggacgccgccgaccacugcggcaccguggccaacggcgugcugcagaccuucaugagaauggccuggggcggcagcuacaucgcccuggacagcggcugcggcagaugggacugcaucaugaccagcuaccaguaccugaucauccagaacaccaccugggaggaccacugccaguucagcagacccagccccaucggcuaccugggccugcugagccagagaaccagagacaucuacaucagcagaagacugcugggcaccuucaccuggacccugagcgacagcgagggcaaggacacccccggcggcuacugccugaccagauggaugcugaucgaggccgagcugaagugcuucggcaacaccgccguggccaagugcaacgagaagcacgacgaggaguucugcgacaugcugagacuguucgacuucaacaagcaggccauccagagacugaaggccgaggcccagaugagcauccagcugaucaacaaggccgugaacgcccugaucaacgaccagcugaucaugaagaaccaccugagagacaucaugugcauccccuacugcaacuacagcaaguacugguaccugaaccacaccaccaccggcaagaccagccugcccaagugcuggcuggugagcaacggcagcuaccugaacgagacccacuucagcgacgacaucgagcagcaggccgacaacaugaucaccgagaugcugcagaaggaguacauggagagacagggcaagaccccccugggccugguggaccuguucguguucagcaccagcuucuaccugaucagcaucuuccugcaccuggugaagauccccacccacagacacaucgugggcaagcccugccccaagccccacagacugaaccacaugggcaucugcagcugcggccuguacaagcagcccggcgugcccgugaaguggaagagaugaggacuaguuauaagacugacuagcccgaugggccucccaacgggcccuccuccccuccuugcaccgagauuaaucaaaggcucuuuucagagccaccaaaaaaaaaaaaaaaaaaaaaaaaaaaaaaaaaaaaaaaaaaaaaaaaaaaaaaaaaaaaaaaaagaauu

SEQ ID NO: 36226 - RNA, 1658 nt, Artificial Sequence
  mRNA product Design i-3 (hSL-A64-N5) comprising derived and/or modified sequence from LASV(LM776-SLE-2012;Clade IV)__AIT17824__GPCmut9 (opt4)
aggagaaagcuuaccaugggccagaucgugaccuucuuccaggaggugccccacgugaucgaggaggugaugaacaucgugcugaucgcccugagcauccuggccgugcugaagggccuguacaacuucgccaccugcggccuggugggccuggugaccuuccugcugcugugcggcagaagcugcaccaccagcguguacaagggcguguacgagcugcagacccuggagcugaacauggagacccugaacaugaccaugccccugagcugcaccaagaacaacagccaccacuacaucauggugggcaacgagaccggccuggagcugacccugaccaacaccagcaucaucaaccacaaguucugcaaccugagcgacgcccacaagaagaaccuguacgaccacgcccugaugagcaucaucagcaccuuccaccugagcauccccaacuucaaccaguacgaggccaugagcugcgacuucaacggcggcaagaucagcgugcaguacaaccugagccacagcuacgccggcgacgccgccaaccacugcggcaccguggccaacggcgugcugcagaccuucaugagaauggccuggggcggcagcuacaucgcccuggacagcggcugcggcaagugggacugcaucaugaccagcuaccaguaccugaucauccagaacaccaccugggaggaccacugccaguucagcagacccagccccaucggcuaccugggccugcugagccagagaaccagagacaucuacaucagcagaagacugcugggcaccuucaccuggacccugagcgacagcgagggcaaggacacccccggcggcuacugccugaccagauggaugcugaucgaggccgagcugaagugcuucggcaacaccgccguggccaagugcaacgagaagcacgacgaggaguucugcgacaugcugagacuguucgacuucaacaagcaggccauccagagacugaaggccgaggcccagaugagcauccagcugaucaacaaggccgugaacgcccugaucaacgaccagcugaucaugaagaaccaccugagagacaucaugugcauccccuacugcaacuacagcaaguacugguaccugaaccacaccaccaccggcaagaccagccugcccaagugcuggcuggugagcaacggcagcuaccugaacgagacccacuucagcgacgacaucgagcagcaggccgacaacaugaucaccgagaugcugcagaaggaguacauggagagacagggcaagaccccccugggccugguggaccuguucguguucagcaccagcuucuaccugaucagcaucuuccugcaccuggugaagauccccacccacagacacaucgugggcaagagcugccccaagccccacagacugaaccacaugggcaucugcagcugcggccuguacaagcagcccggcgugcccgugagauggaagagaugaggacuaguuauaagacugacuagcccgaugggccucccaacgggcccuccuccccuccuugcaccgagauuaaucaaaggcucuuuucagagccaccaaaaaaaaaaaaaaaaaaaaaaaaaaaaaaaaaaaaaaaaaaaaaaaaaaaaaaaaaaaaaaaaagaauu

SEQ ID NO: 36227 - RNA, 1658 nt, Artificial Sequence
  mRNA product Design i-3 (hSL-A64-N5) comprising derived and/or modified sequence from LASV(Mad39;Clade IV)__ANH09722__GPCmut9 (opt4)
aggagaaagcuuaccaugggccagaucgugaccuucuuccaggaggugccccacgugaucgaggaggugaugaacaucgugcugaucgcccugagcauccuggccgugcugaagggccuguacaacguggccaccugcggccugaucggccuggugaccuuccugcugcugugcggcagaagcugcaccaccacccuguacaagggcguguacgagcugcaggcccuggagcugaacauggagacccugaacaugaccaugccccugagcugcaccaagaacaacagccaccacuacaucagagugggcaacgagaccggccuggagcugacccugaccaacaccagccugaucaaccacaaguucugcaaccugagcgacgcccacaagaagaaccuguacgaccacgcccugaugagcaucaucagcaccuuccaccugagcauccccaacuucaaccaguacgaggccaugagcugcgacuucaacgacggcaagaucagcgugcaguacaaccugagccacaccuacgccggcgacaccgccaaccacugcggcaccguggccaacggcgugcugcagaccuucaugagaauggccuggggcggcagcuacaucgcccuggacagcggcugcggcggcugggacugcaucaugaccagcuaccaguaccugaucauccagaacaccaccugggaggaccacugccaguucagcagacccagccccaucggcuaccugggccugcugagccagagaaccagagacaucuacaucagcagaagacugcugggcaccuucaccuggacccugagcgacagcgagggcaaggacacccccggcggcuacugccugaccagauggaugcugaucgaggccgagcugaagugcuucggcaacaccgccguggccaagugcaacgagaagcacgacgaggaguucugcgacaugcugagacuguucgacuucaacaagcaggccauccagagacugaaggccgaggcccagaugagcauccagcugaucaacaaggccgugaacgcccugaucaacgaccagcugaucaugaagaaccaccugagagacaucaugugcauccccuacugcaacuacagcaaguacugguaccugaaccacaccgugaccggcaagaccagccugcccaagugcuggcuggugagcaacggcagcuaccugaacgagacccacuucagcgacgacaucgagcagcaggccgacaacaugaucaccgagaugcugcagaaggaguacauggagagacagggcaagaccccccugggccugguggaccuguucguguucagcaccagcuucuaccugaucagcaucuuccugcaccuggugaagauccccacccacagacacguggugggcaagcccugccccaagccccacagacugaaccacaugggcaucugcagcugcggcuucuacaagcagcccggcgugcccgugagauggaagagaugaggacuaguuauaagacugacuagcccgaugggccucccaacgggcccuccuccccuccuugcaccgagauuaaucaaaggcucuuuucagagccaccaaaaaaaaaaaaaaaaaaaaaaaaaaaaaaaaaaaaaaaaaaaaaaaaaaaaaaaaaaaaaaaaagaauu

SEQ ID NO: 36228 - RNA, 1658 nt, Artificial Sequence
  mRNA product Design i-3 (hSL-A64-N5) comprising derived and/or modified sequence from LASV(Z0947-SLE-2011;Clade IV)__AIT17840__GPCmut9 (opt4)
aggagaaagcuuaccaugggccagaucgugaccuucuuccaggaggugccccacgugaucgaggaggugaugaacaucgugcugaucgcccugagcauccuggccgugcugaagggccuguacaacuucgccaccugcggccuggugggccuggugaccuuccugcugcugugcggcagaagcugcaccaucagccuguacaagggcguguacgagcugcagacccuggagcugaacauggagacccugaacaugaccaugccccugagcugcaccaagaacaacagccaccacuacaucauggugggcaacgagaccggccuggagcugacccugaccaacaccagcaucaucaaccacaaguucugcaaccugagcgacgcccacaagaagaaccuguacgaccacgcccugaugagcaucaucagcaccuuccaccugagcauccccaacuucaaccaguacgaggccaugagcugcgacuucaacggcggcaagaucagcgugcaguacaaccugagccacagcuacgccggcgacgccgccaaccacugcggcaccguggccaacggcgugcugcagaccuucaugagaauggccuggggcggcagcuacaucgcccuggacagcggcugcgacagaugggacugcaucaugaccagcuaccaguaccugaucauccagaacaccaccugggaggaccacugccaguucagcagacccagccccaucggcuaccugggccugcugagccagagaaccagagacaucuacaucagcagaagacugcugggcaccuucaccuggacccugagcgacagcgagggcaaggacacccccggcggcuacugccugaccagauggaugcugaucgaggccgagcugaagugcuucggcaacaccgccguggccaagugcaacgagaagcacgacgaggaguucugcgacaugcugagacuguucgacuucaacaagcaggccauccagagacugaaggccgaggcccagaugagcauccagcugaucaacaaggccgugaacgcccugaucaacgaccagcugaucaugaagaaccaccugagagacaucaugugcauccccuacugcaacuacagcaaguacugguaccugaaccacaccaccaccggcaagaccagccugcccaagugcuggcuggugagcaacggcagcuaccugaacgagacccacuucagcgacgacaucgagcagcaggccgacaacaugaucaccgagaugcugcagaaggaguacauggagagacagggcaagaccccccugggccugguggaccuguucguguucagcaccagcuucuaccugaucagcaucuuccugcaccuggugaagauccccacccacagacacaucgugggcaagcccugccccaagccccacagacugaaccacaugggcaucugcagcugcggccuguacaagcagcccggcgugcccgugaaguggaagagaugaggacuaguuauaagacugacuagcccgaugggccucccaacgggcccuccuccccuccuugcaccgagauuaaucaaaggcucuuuucagagccaccaaaaaaaaaaaaaaaaaaaaaaaaaaaaaaaaaaaaaaaaaaaaaaaaaaaaaaaaaaaaaaaaagaauu

SEQ ID NO: 36229 - RNA, 1658 nt, Artificial Sequence
  mRNA product Design i-3 (hSL-A64-N5) comprising derived and/or modified sequence from LASV(Josiah;Clade IV)__NP_694870__GPCmut9 (opt5)
aggagaaagcuuaccaugggccagaucgugaccuucuuucaagaggucccccacguuauugaagaggugaugaacaucgugcugauugcccucagcguccuggcugugcuuaaggggcuguacaauuucgccacaugcggacucguuggccuggugacguuucuucugcucugugggagauccugcaccacaucucuguauaaaggagucuacgaacugcagacccucgagcugaacauggaaacacuuaauaugaccaugccucugagcuguacaaagaacaauucccaucacuauaucauggugggcaacgagaccgggcucgagcugacgcuuaccaauacaucuauuaucaaccauaaauucugcaaucugagcgacgcgcacaagaaaaaccucuacgaucaugcucugauguccaucauuucuaccuuucaccugagcaucccgaauuucaaccaguaugaagccauguccugugacuuuaauggaggcaagauuagcguucaguacaaccucucucacuccuaugccggcgaugcugccaaucauugcgggacaguggcuaacggaguccugcaaaccuucaugcggauggccuggggcgggagcuacaucgcgcuugacucuggauguggcaacugggauugcauuaugacguccuaccaguaucugaucauucagaauacaaccugggaggaccacugucaguuuagccgccccucuccuaucggguaccucggacugcuuucccaaagaacacgggauaucuauauuagccgcagacugcucggcaccuucaccuggacacuguccgacucugaaggcaaggauacgcccgggggauacugccugacccgguggaugcucaucgaggccgagcugaaauguuuuggcaacacagcuguggccaagugcaaugaaaaacaugacgaggaguucugcgauaugcuucgccuguuugacuucaacaagcaggcuauucagagacucaaagccgaagcgcagaugagcauccaacugauuaauaaggccgugaacgcucuuaucaaugaucagcugaucaugaagaaccaccuccgggacauuauguguaucccuuauugcaauuacuccaaauauugguaccugaaccacaccacaaccgggcgcacgagccugcccaaguguuggcucgucucuaauggauccuaccugaacgaaacacauuucagcgacgauauugagcagcaagccgacaauaugaucaccgagaugcuucagaaagaauauauggagagacagggcaagaccccucuggggcucguugaucuguuuguguucucuaccagcuuuuaccugauuuccaucuuccuucaccucgugaaaaucccgacacaucggcacauugucggaaagucuugccccaaaccucaucgccugaaccacaugggcaucuguagcugcggccuguauaagcagcccggggugccuguuaaguggaaaagaugaggacuaguuauaagacugacuagcccgaugggccucccaacgggcccuccuccccuccuugcaccgagauuaaucaaaggcucuuuucagagccaccaaaaaaaaaaaaaaaaaaaaaaaaaaaaaaaaaaaaaaaaaaaaaaaaaaaaaaaaaaaaaaaaagaauu

SEQ ID NO: 36230 - RNA, 1655 nt, Artificial Sequence
  mRNA product Design i-3 (hSL-A64-N5) comprising derived and/or modified sequence from LASV(LP;Clade I)__AAF86701__GPCmut9 (opt5)
aggagaaagcuuaccaugggccagaucauuaccuucuuucaagaggugccccacgucaucgaagagguuaugaacauugugcugaucgcccucagccugcuugcuauucugaaggggcucuacaauaucgccacaugcggaaucauuggccugguggcguuccuuuuucugugugggaaauccugcucucucacgcugaagggaggcuaugaacugcagacccucgagcugaacauggaaacacuuaauaugaccaugccucugagcuguaccaaaaacuccucucaucacuacaucagagucgggaaugagacaggacucgagcugacacuuaccaacacgagcauuaucaaucauaaguucugcaaccuguccgacgcucacaaaaagaaucucuaugaucaugcccugaugucuauuaucagcaccuuucaccuguccauuccgaacuucaaucaguacgaagccaugagcugugacuuuaacggcggcaagaucucugugcaguauaaucucucccacagcuacgcuggggaugccgcugagcauugcggaacaguugccaacggcgugcugcaaaccuucaugcggauggcguggggagggcgcuauaucgcccuugacucuggcugugggaauugggauugcauuaugacauccuaccaguaccugaucauucagaacaccacgugggaagaccacugucaguuuagcagacccucuccuaucggauaucucggccugcuuucccaacggacacgcgauauuuacaucagcagacggcugcucggcaccuucacauggacccuguccgacucugaggggaacgagacccccggaggcuauugccugacacgcuggaugcucaucgaagcugagcugaaauguuuugggaauacggccgucgcuaagugcaacgaaaaacaugaugaggaguucugcgacaugcuuagacuguuugauuucaauaagcaggccauucggcgccucaaagcggaagcccagaugagcauccagcugauuaacaaggcugugaaugcccuuaucaacgaccaacugauuaugaagaaucaccucagagauaucauguguaucccuuacugcaacuauuccaaauacugguaucugaaucacaccagcucuggacggacaucccugcccaaguguuggcucauuagcaacggcucuuaccugaaugagacccaguucagcgacgacaucgaacagcaagcugauaacaugauuacagagaugcuucagaaagaauacaucgagcgccaggggaagaccccucugggacucguugacauuuuuaucuucuccacgucuuuuuaucugauuagcaucuuccugcaucuuaucaaaauuccgacacacagacauaucgugggcaagcccugcccuaaaccccaccggcucaaucauaugggcgucuguuccugcgggcuguacaagcacccuggagugcccaccaaguggaaacgcugaggacuaguuauaagacugacuagcccgaugggccucccaacgggcccuccuccccuccuugcaccgagauuaaucaaaggcucuuuucagagccaccaaaaaaaaaaaaaaaaaaaaaaaaaaaaaaaaaaaaaaaaaaaaaaaaaaaaaaaaaaaaaaaaagaauu

SEQ ID NO: 36231 - RNA, 1655 nt, Artificial Sequence
  mRNA product Design i-3 (hSL-A64-N5) comprising derived and/or modified sequence from LASV(803213;Clade II)__AAF86703__GPCmut9 (opt5)
aggagaaagcuuaccaugggccagaucauuaccuucuuucaagaggugccccacgucaucgaagagguuaugaacauugugcugaucgcccucagccugcuugcuauucugaaggggaucuacaauguggccacaugcggacucuucggccugaucuccuuucuucugcucugugggagaucuugcagcgucacguauaaaggaguguacgaacugcagacccuggagcucaacauggcgaaucugaacaugacaaugccucuuuccuguaccaagaauaacucucaucacuauauuaugguuggcaaugaaacagggcuggagcucacccugacaaacaccagcaucauuaaucauaaauucugcaaccuuuccgacgcucacaagaaaaaucuguacgaucaugcccucaugucuaucauuagcacguuucaccuguccaucccgaacuucaaucaguaugaggccaugagcugugacuuuaacggaggcaagauuucugugcaguacaaucugucccacagcuucgcugucgaugccgcuaaccauugcggcaccaucgccaacggggugcuccaaacauuuaugcggauggcguggggaggcucuuauaucgcccuggacuccggguguggaaauugggauugcauuaugaccagcuaccaguaccuuaucauucagaacacaaccugggaagaccacugucaguucucucgccccuccccuaucggcuaucuggggcuccugagccaaagaacgcgggauauuuacaucucccgcagacuucugggaacauuuaccuggacacucucugacagcgagggcaaugaagcucccggcggguauugccugacccgguggaugcugaucgaggccgagcucaaguguuucggaaacaccgcuguugccaaaugcaaugaaaagcaugaugaggaauuuugcgacaugcugcgccuuuucgauuucaacaaacaggcgauuaagagacugaaaacagaggcccagauguccauccagcucauuaauaaggcugugaacgcccugaucaaugaccaacuuauuaugaagaaccaucugcgggauaucauguguaucccuuacugcaauuauagccgcuacugguaucucaaccacacggucaccggcaaaacaucucugcccagauguuggcugguguccaaugggagcuaccucaacgaaacccacuuuucugacgacauugagcagcaggcugauaauaugaucacagagaugcugcaaaaggaauacauggaccggcagggaaaaaccccucuuggccugguggaucucuucgucuuuagcacguccuucuaucugauuucuaucuuucugcaccuuguuaagauuccgacacaucgccacaucguggggaaacccugcccuaagccccauagacucaaccacaugggaauuuguagcugcggccuguacaaacacccuggcgugcccgucaaguggaagcggugaggacuaguuauaagacugacuagcccgaugggccucccaacgggcccuccuccccuccuugcaccgagauuaaucaaaggcucuuuucagagccaccaaaaaaaaaaaaaaaaaaaaaaaaaaaaaaaaaaaaaaaaaaaaaaaaaaaaaaaaaaaaaaaaagaauu

SEQ ID NO: 36232 - RNA, 1655 nt, Artificial Sequence
  mRNA product Design i-3 (hSL-A64-N5) comprising derived and/or modified sequence from LASV(GA391;Clade III)__CAA36645__GPCmut9 (opt5)
aggagaaagcuuaccaugggccagaucgugaccuucuuucaagaggucccccacguuauugaagaggugaugaacaucgugcugauugcccucagcauccuggcuauucuuaaggggcuguacaaugucgccacaugcggacucaucggccuggugacguuccuucugcucuccgggagaucuuguagccugaucuauaaaggaaccuacgaacugcagacacucgagcugaacauggaaacccuuaauaugacaaugccucuguccugcaccaagaacaauucucaucacuauauucggguuggcaacgagacagggcucgagcugacccuuacgaauaccagcauccugaaccauaaauuuuguaaucucuccgacgcgcacaagcgcaaccuguacgaucauucucugaugagcauuaucuccacauuccaccucagcauuccgaauuuuaaccaguaugaagcuaugucuugcgacuucaauggaggcaaaaucaccgugcaguacaaccugucccacagcuuugccgucgaugccgcuggccauugugggacacuugccaauggagugcugcaaaccuucaugagaauggcuuggggcgggucuuauauugcccucgacuccggaugcggcaacugggauuguaucaugacgagcuaccaguaccugaucauucagaacacaaccugggacgaucacugccaguuuucucggcccuccccuaucggguaucuuggacugcucagccaacgcacaagagacauuuacaucucccggcgccugcugggcaccuucaccuggacacucucugauagcgagggcaaugaaacgcccgggggauauugucugaccagauggaugcuuauugaggcggagcugaagugcuuuggcaacacagccguugcuaaguguaaugaaaaacaugacgaggaguucugcgauaugcuccggcuguuugacuucaacaagcaggccauccgcagacuuaaaaccgaagcucagauguccauccagcugauuaauaaggccgugaacgcgcucaucaaugaucaacugauuaugaaaaaccaucugcgggacaucaugugcauuccuuacuguaauuauagccgcuacugguaucucaaccacacaucuaccgggaagacgucccugcccagaugcuggcuuaucagcaauggaucuuaccugaacgaaacaaaguucagcgacgauaucgagcagcaggccgacaauaugauuaccgagaugcuccaaaaagaauacaucgaucggcagggcaagaccccucuggggcuggucgaccuuuuuguguucuccacaucuuuuuaucucauuagcaucuuccugcaccuggugaaaauuccgacccaccgccauaucgucggaaagcccuguccuaaaccccacagacucaaccauaugggcauuugcuccuguggccuguacaagcagccugggguucccgugcgguggaaaagaugaggacuaguuauaagacugacuagcccgaugggccucccaacgggcccuccuccccuccuugcaccgagauuaaucaaaggcucuuuucagagccaccaaaaaaaaaaaaaaaaaaaaaaaaaaaaaaaaaaaaaaaaaaaaaaaaaaaaaaaaaaaaaaaaagaauu

SEQ ID NO: 36233 - RNA, 1658 nt, Artificial Sequence
  mRNA product Design i-3 (hSL-A64-N5) comprising derived and/or modified sequence from LASV(AV;Clade V)__CCA30314__GPCmut9 (opt5)
aggagaaagcuuaccaugggccagaucgugaccuucuuucaagaggucccccacguuauugaagaggugaugaacaucgugcugauugcccucagcauccuggcuguccuuaaggggcuguacaauauugccacaugcggacucaucggccugaucacguuccuucugcucugugggagauccugcucuagcaaccuguauaaaggaguguacgaacugcagucccucgaccugaauauggagacccuuaacaugacaaugccucugucuuguaccaagaauaacagccaucacuauauucggguuggcaaugauacagggcucgaacugacccuuacaaacaccuccauccugaaucauaaauuuugcaaccucucugacgcgcacaagaaagaucuguacgaccaugcucugaugagcauuaucuccacguuccaccucagcauuccgaauuuuaaccaguaugaggccaugucuugugauuucaauggaggcaagaucuccgugcaguacaaccugagccacucuuaugccauugacgcugccaaucauugcggcaccgucgcuaacgggauccuucaaacauuuaugcgcauggccuggggaggcuccuacaucgcgcuggauagcggguguggaaacugggacugcauuaugaccucuuaccaguaucucaucauucagaauacaaccugggagaaccacugucaguucuccagacccagcccuaucggcuaccuggggcuucugucccaacggacgcgcgauauuuauaucucuagacggcuccugggaacauuuaccuggacacugagcgacuccgaaggcaaugccacccccggcggguacugccucacccgcuggaugcugaucgaggcugaacuuaaguguuucggaaacacagccguggcuaaaugcaaugagaagcaugaugaggaauuuugcgacaugcugagacucuucgauuuuaacaaacaggccauuagccggcugaagucugaggcgcagauguccauccagcuuauuaauaaagccguuaacgcucugaucaaugaccaacucauuaugaagaaccaucugcgcgacaucauguguaucccuuauugcaauuacagcaaguauugguaccugaaccacacgauuaccggcaaaacaucucuccccaaguguuggcuggugagcaauggguccuaccuuaacgaaacccacuucucugaugacaucgagcagcaggccgauaauaugauuacagaaaugcugcaaaaagaguauauggagagacagggaaagaccccucucggccuggucgaccuguucguguuuagcacguccuucuaccuuaucagcauuuuucuccggcuggugaaaaucccgacacaccgccauauugucgggaagcccugcccuaaaccccacagacugaaccauaugggaaucuguucuugcggccucuauaagcagccuggcguucccgugcgguggaagcgcugaggacuaguuauaagacugacuagcccgaugggccucccaacgggcccuccuccccuccuugcaccgagauuaaucaaaggcucuuuucagagccaccaaaaaaaaaaaaaaaaaaaaaaaaaaaaaaaaaaaaaaaaaaaaaaaaaaaaaaaaaaaaaaaaagaauu

SEQ ID NO: 36234 - RNA, 1655 nt, Artificial Sequence
  mRNA product Design i-3 (hSL-A64-N5) comprising derived and/or modified sequence from LASV(Togo/2016/7082;Clade VI)__AMR44577__GPCmut9 (opt5)
aggagaaagcuuaccaugggccagaucauuaccuucuuucaagaggugccccacgucaucgaagagguuaugaacauugugcugaucgcccucagccugcuugcuauucugaaggggguguacaaugucgccacaugcggaaucaucggccucgugacguuccuguuucuuugugggagauccugcucucugauuuauaaaggaagcuacgaacuccagacccuggagcugaacauggaaacacucaauaugaccaugccucuguccuguacaaagaacucuagccaucacuauauccggguuggcaaugagaccgggcuugagcugacacucaccaacacguccauuaucaaucauaaauucugcaaccugucugacgcgcacaagcgcaaucuuuacgaucaugcucugaugagcauucucuccaccuuucaccugagcaucccgaacuucaaucaguaugaagccaugucuugugacuuuaacggaggcaaaauuuccgugcaguacaaucugagccacgccuaugcugucgaugccgcugagcauugcggcacaguggccaacgggguucuccaaaccuucaugagaauggcguggggaggcucuuacaucgcccuggacuccggguguggaaauugggauugcaucaugacaagcuaccaguaucuuauuauccagaacaccacgugggaagaccacugucaguuuucucggcccuccccuauuggcuaccuggggcuccugagccaacgcacaagagauaucuauauuucccggcgccuucugggaaccuucacauggacccucucugacagcgagggcaacgagacccccggcggguacugccugacaagauggaugcugaucgaagcugagcucaaguguuuuggaaauacggccguggcuaagugcaacgaaaaacaugaugaggaguucugcgacaugcugcggcuuuuugauuucaauaagcaggccauccagcgccugaaauccgaagcgcagaugagcauucaacucaucaacaaggccgucaaugcucugauuaacgaccagcuuaucaugaaaaaucaccugagagauaugauguguauuccuuauugcaacuacucuaaguauugguaccucaaucacaccuccagcggccggacaucucugcccaaguguuggcuggugagcaacggguccuaccucaaugagacccauuucucugacgacaucgaacagcaagccgauaacaugaucacagagaugcugcagaaagaauauauugaccgccagggaaagaccccucuuggccugguggaucucuuugucuucagcacguccuuuuaccugaucagcauuuuccugcaccuuaucaaaauuccgacacauagacacaucguugggaagcccugcccuaaaccccaucggcucaaucacaugggaauuuguucuugcggccuguauaagcagccuggcgugcccacccgcuggaaaagaugaggacuaguuauaagacugacuagcccgaugggccucccaacgggcccuccuccccuccuugcaccgagauuaaucaaaggcucuuuucagagccaccaaaaaaaaaaaaaaaaaaaaaaaaaaaaaaaaaaaaaaaaaaaaaaaaaaaaaaaaaaaaaaaaagaauu

SEQ ID NO: 36235 - RNA, 1655 nt, Artificial Sequence
  mRNA product Design i-3 (hSL-A64-N5) comprising derived and/or modified sequence from LASV(KAK-428;Clade n.d. (VII))__ANH09740__GPCmut9 (opt5)
aggagaaagcuuaccaugggccagaucgugaccuucuuucaagaggucccccacguuauugaagaggugaugaacaucgugcugauugcccucagccugcuugcuauccugaaggggcucuacaauuucgccacaugcggagucauuggccugaucacguuucuucugcucugugggagauccugcucugcgaccuauaaaggacaguacgaacugcagacacuggagcucaacauggaaagccugaauaugaccaugccucuuuccuguacaaagaacaauucucaucacuauauccgggcuggcaacaauaccgggcuggagcucacacugaccaacacgagcauuaucucccauaaauucugcaaucuuucugacgcccacaagaaaaaccuguacgaucauacccucaugagcauuaucacaaccuuucaccuguccauuccgaauuucaaccaguaugaggccaugagcugugacuuuaauggaggcaagaucucuauucaauacaaccugucccacagcuaugcuggcgaugccgcucagcauugcgggacaguggccaauggaguucuccagaccuucaugcgcauggcguggggcgggucuuaccuggcccuugacuccggauguagaggcugggauugcaucaucagcucuuaccaguaucugauuauccaaaacacgacaugggacgaucacugucaguuuucccggcccagcccuauuggguaccucggauucgugucccagaagacccgcgacaucuauauuucuagacggcugcuuggcacauuuaccuggacccugagcgauuccgaaggccaugacaugcccgggggauacugccucacacgcuggaugcugaucgaggcugaucugaaauguuucggcaacacggccgucgcuaagugcaaugaaaaacacgacgaggaguuuugcgauauguggagacucuucgacuucaacaagcaggccauccaacggcugaaagcggaagcccagaugaauauucagcuuaucaacaaggcugugaaugcccugauuaacgaccaacucaugaugaagaaucaucugcgcgauaucauguguauuccuuauugcaacuacagcaaauuuugguaucuuaauaacaccacaaccgggagaacaucucugccccgguguuggcucaucuccaauggaagcuaccugaacgagacccacuucucugacgauaucgaacagcaggcugacaauaugauuacggagaugcugcagaaggaauacauggaucgccaaggcaaaacaccucucgggcugguugaccuuuuuguguucagcaccuccuuuuaucugaucaccauuuuccuccaccuggucaagaucccgacacauagacacauugugggaaaacccugcccuaagccccaucggcugaaccacaugggcaucuguucuugcggccuuuacaaacagccuggggugcccguccgcuggaagagaugaggacuaguuauaagacugacuagcccgaugggccucccaacgggcccuccuccccuccuugcaccgagauuaaucaaaggcucuuuucagagccaccaaaaaaaaaaaaaaaaaaaaaaaaaaaaaaaaaaaaaaaaaaaaaaaaaaaaaaaaaaaaaaaaagaauu

SEQ ID NO: 36236 - RNA, 1655 nt, Artificial Sequence; identical to SEQ ID NO: 36230
  mRNA product Design i-3 (hSL-A64-N5) comprising derived and/or modified sequence from LASV(Pinneo-NIG-1969;Clade I)__AIT17836__GPCmut9 (opt5)

SEQ ID NO: 36237 - RNA, 1655 nt, Artificial Sequence
  mRNA product Design i-3 (hSL-A64-N5) comprising derived and/or modified sequence from LASV(ISTH0009-NIG-2011;Clade II)__AIT17404__GPCmut9 (opt5)
aggagaaagcuuaccaugggccagaucauuaccuucuuucaagaggugccccacgucaucgaagagguuaugaacauugugcugaucgcccucagccugcuugcuauucugaaggggaucuacaauguggccacaugcggacucuucggccuggucuccuuucuucugcucugugggagaucuugcagcacgaccuauaaaggaguguacgaacugcagacacuggagcucgacauggcgucccugaacaugaccaugccucuuucuuguacaaagaauaacagccaucacuauaucaugguuggcaaugaaaccgggcuggagcucacacugaccaacacguccauuaucaaucauaaauucugcaaccuuucugaugcucacaagaaaaaucuguacgaccaugcccucaugagcauuaucuccaccuuucaccugagcauuccgaacuucaaucaguaugaggccaugucuugugauuuuaacggaggcaagaucuccgugcaguacaaucugagccacgcuuaugccgucgacgcugccaaccauugcggcacaauugcgaauggggugcuccaaaccuucaugcggauggccuggggaggcucuuacaucgcucuggauuccggguguggaagcugggacugcaucaugacaucuuaccaguaucuuauuauccagaacaccacgugggaagaucacugucaguuuucccgccccagcccuauuggcuaccuggggcuccugucccaaagaacacgggacaucuauauuucucgcagacuucugggaaccuucacauggacccucagcgauuccgagggcaacgaaacccccggcggguacugccugacacgguggaugcugaucgaggccgagcucaaguguuuuggaaauacggcuguugccaaaugcaacgaaaagcaugacgaggaguucugcgauaugcugcgccuuuuugacuucaauaaacaggcgaucagacggcugaagaccgaagcccagaugagcauucagcucaucaacaaagcugugaaugcccugauuaacgaucaacuuaucaugaagaaucaucugcgcgacauuauguguaucccuuauugcaacuacucuaaguauugguaccucaaucacacagucaccggcaaaacaucccugcccagauguuggcuggugagcaacgggucuuaccucaaugaaacccacuucagcgacgauaucgagcagcaggcugacaacaugauuacggagcugcuucaaaaggaauauauggaucggcagggaaaaacaccucugggccucguggaccuguuugucuucuccaccucuuuuuaccugaucagcauuuuccuucaccucaucaagauuccgacccaucgccacaucacagggaaacccugcccuaagccccauagacugaaucacaugggaauuuguuccugcggccuguauaaacacccuggcguucccgugaaguggaagcggugaggacuaguuauaagacugacuagcccgaugggccucccaacgggcccuccuccccuccuugcaccgagauuaaucaaaggcucuuuucagagccaccaaaaaaaaaaaaaaaaaaaaaaaaaaaaaaaaaaaaaaaaaaaaaaaaaaaaaaaaaaaaaaaaagaauu

SEQ ID NO: 36238 - RNA, 1655 nt, Artificial Sequence
  mRNA product Design i-3 (hSL-A64-N5) comprising derived and/or modified sequence from LASV(ISTH2010-NIG-2012;Clade II)__AIT17482__GPCmut9 (opt5)
aggagaaagcuuaccaugggccagaucauuaccuucuuucaagaggugccccacgucaucgaagagguuaugaacauugugcugaucgcccucagccugcuugcuauucugaaggggaucuacaauguggccacaugcggacucuucggccuggucuccuuucuucugcucugugggagaucuugcagcacgaccuauaaaggaguguacgaacugcagacacuggagcucgacauggcgucccugaacaugaccaugccucuuucuuguacaaagaauaacagccaucacuauaucaugguuggcaaugaaaccgggcuggagcucacacugaccaacacguccauuaucaaucauaaauucugcaaccuuucugaugcucacaagaaaaaucuguacgaccaugcccucaugagcauuaucuccaccuuucaccugagcauuccgaacuucaaucaguaugaggccaugucuugugauuuuaacggaggcaagaucuccgugcaguacaaucugagccacgcuuaugccgucgacgcugccaaccauugcggcacaauugcgaauggggugcuccaaaccuucaugcggauggccuggggaggcucuuacaucgcucuggauuccggguguggaagcugggacugcaucaugacaucuuaccaguaucuuauuauccagaacauuaccugggaagaucacugucaguuuucccgccccagcccuaucggcuaccuggggcuccugucccaaagaacgcgggacauuuauaucucucgcagacuucugggaacauucaccuggacacucagcgauuccgagggcaacgaaacccccggcggguacugccugacccgguggaugcugaucgaggccgagcucaaguguuuuggaaauacagcuguugccaaaugcaacgaaaagcaugacgaggaguucugcgauaugcugcgccuuuuugacuucaauaaacaggcgauuagacggcugaagacggaagcccagaugagcauccagcucauuaacaaagcugugaaugcccugaucaacgaucaacuuauuaugaagaaucaucugcgcgacaucauguguaucccuuauugcaacuacucuaaguauugguaccucaaucacaccgucacaggcaaaaccucccugcccagauguuggcuggugagcaacgggucuuaccucaaugaaacacacuucagcgacgauauugagcagcaggcugacaacaugaucaccgagcugcuucaaaaggaauauauugaucggcagggaaaaacgccucugggccucguggaccuguuugucuucuccacaucuuuuuaccugaucagcauuuuccuucaccucguuaagaucccgacccaucgccacgugguggggaaacccugcccuaagccccauagacugaaucacaugggaauuuguuccugcggccuguauaaacacccuggcguccccgugaaguggaagcggugaggacuaguuauaagacugacuagcccgaugggccucccaacgggcccuccuccccuccuugcaccgagauuaaucaaaggcucuuuucagagccaccaaaaaaaaaaaaaaaaaaaaaaaaaaaaaaaaaaaaaaaaaaaaaaaaaaaaaaaaaaaaaaaaagaauu

SEQ ID NO: 36239 - RNA, 1655 nt, Artificial Sequence
  mRNA product Design i-3 (hSL-A64-N5) comprising derived and/or modified sequence from LASV(Lassa virus/H.sapiens-wt/NGA/2015/ISTH_0543;Clade II)__AVO03639__GPCmut9 (opt5)
aggagaaagcuuaccaugggccagaucauuaccuucuuucaagaggugccccacgucaucgaagagguuaugaacauugugcugaucgcccucagccugcuugcuauucugaaggggaucuacaauguggccacaugcggacucuucggccuggucuccuuucuucugcucugugggagaucuugcagcacgaccuauaaaggaguguacgaacugcagacacuggagcucgacauggcgaaccugaauaugaccaugccucuuuccuguacaaagaacaauucucaucacuauaucaugguuggcaacgaaaccgggcuggagcucacacugaccaauacgagcauuaucaaccauaaauucugcaaucuuuccgaugcucacaagaaaaaccuguacgaccaugcccucaugucuauuaucagcaccuuucaccuguccauuccgaauuucaaccaguaugaggccaugagcugugauuuuaauggaggcaagaucucugugcaguacaaccugucccacacauaugcugucgacgccgcuaaucauugcggcaccauugccaacggggugcuccaaacauucaugcggauggcguggggaggcagcuacaucgcccuggauucuggguguggauccugggacugcaucaugaccagcuaccaguaucuuguuauucagaacacgacaugggaagaucacugucaguuuucucgccccuccccuaucggcuaccuggggcuccugagccaaagaacccgggacauuuauaucucccgcagacuucugggaacauucaccuggacccucucugauagcgagggcaaugaaacacccggcggguacugccugacgcgguggaugcugauugaggcugagcucaaguguuuuggaaacaccgccguggcuaaaugcaaugaaaagcaugacgaggaguucugcgauaugcugcgccuuuuugacuucaacaaacaggccaucagacggcugaagacagaagcgcagauguccauccagcucauuaauaaagccgucaacgcucugaucaaugaucaacuuauuaugaagaaccaucugcgcgacaucauguguauuccuuauugcaauuacagcaaguauugguaccucaaccacaccgugacaggcaaaaccucucugcccagauguuggcugguguccaaugggagcuaccucaacgaaacgcacuucucugacgauaucgagcagcaggccgacaauaugaucacagagcugcuucaaaaggaauauauugaucggcagggaaaaaccccucugggccucgucgaccuguuuguuuucagcaccuccuuuuaccugaucucuauuuuccuucaccucgugaagaucccgacacaucgccacauuaccgggaaacccugcccuaagccccauagacugaaccacaugggaaucuguagcugcggccuguauaaacacccuggcgugcccgucaaguggaagcggugaggacuaguuauaagacugacuagcccgaugggccucccaacgggcccuccuccccuccuugcaccgagauuaaucaaaggcucuuuucagagccaccaaaaaaaaaaaaaaaaaaaaaaaaaaaaaaaaaaaaaaaaaaaaaaaaaaaaaaaaaaaaaaaaagaauu
